United States Patent Application Publication US 2023/0026259 A1 - sequence listing, part 37

SEQ ID NO: 124252 - DNA, 4005 bp, Homo sapiens
  Payload ID: 4396
  Gene Symbol: COA7
  Gene Name: cytochrome c oxidase assembly factor 7 (putative)
  Uniprot ID: Q96BR5
  ENST ID: ENST00000371538
  CDS Start-End: 41-736
tccgccggctcacgtgaccgtctttgggccggcgcgaaccatggccggcatggtggacttccaggatgaggagcaggtcaagtcctttttggagaacatggaggtggagtgcaactaccactgctaccacgagaaggacccggacggttgctatcggctggtggactatttggaagggatccggaagaattttgatgaggctgccaaggtgttgaagtttaactgtgaagagaaccagcacagtgatagctgctacaaactgggggcctactatgtgactggaaaaggtggtctgacccaggacctgaaagctgccgccaggtgctttttgatggcgtgtgagaagcctggaaagaagtcaatagcagcatgtcacaacgttggcctcctggcacatgatggacaggttaatgaggatggccagcctgacttgggaaaggccagggactactacacaagggcctgtgatggtggctatacttccagttgcttcaacctcagtgccatgttcctgcagggtgccccaggctttcccaaggacatggacctggcatgtaaatactccatgaaagcctgtgacctgggtcatatctgggcctgtgccaatgccagtcgcatgtacaagctgggggatggtgttgataaggatgaggccaaggccgaggtgctaaaaaatcgagcccagcagctacacaaagaacagcagaaaggtgtccaacccttaacatttgggtaatgtggtccaccctccctcccaggcaacaaactgcttgaggctggcagctcctgtttctgaagactgatgcagcccttgaaggtcaacctgctggagcaaaaaaacttgggacttgaatttgtagctccatttacatggatccattgccccagctactggagtatagcctacaatgtttatttcagtcaatattcctttatctgggtgttctgtacaatgtttattacagtcaatattccttcatctggatgttctgtgaagatagccatgtttatgggggtcttagttttcaaactctggcaactctgtgaaaaataggagcaaactagagagccctggagattggtagtagggaagggaggatagcaggaagtttgaaaaattagcagccccggggcctaaaggaatcagctgtcatcattttcatcattattattttggttaggatggcttgaaaatcagaacgtatcttggtttacgtaattgaggtcttaaagaactaagaacagttaaatagtcacaactaccaccctctgacttacataatcattggtgtgggcttcgttttgcctttagagtcacatctttcagtaaattcacagagatcaagagggacgtgcaacatacagcttaaaggctgttatgcttcagggttgctgaagaagatgaaacatcagcctgccatcgtctagaagagacattggcagttaaaaattagcacctccagtgtagtcgcctggcactgcccatcatgctgagggagcagattcttcccaaggcagcttcagctaggagtttgtaagcaaggactttgtgacacatttgtcccctggaactgagcctttttaactgtccctgtgaatgaacaattttgagtgacctacggtttgtgttaattagtgttctttccagattccaggtaccgtagagagtatgttctttgtggtggttgtgccttttaagaacatttgtggccgggcacggtggctcacgcctgtaaccccagcactttgggtggccaaggcgggtggatcacgagatcaggagatcatgaccatcctggctaacacggggaaaccccatctctactaaaaaatacaaaaaattagccgggcgtggtggcaggcgcctgtagtcccagctactggggaggctgaggcaggagaattgcttgaacccgggaggcggagcttgcagtgagctgagattgcgccactgccctccagcctgggcgatagagtgagactccgtctcaaaaaaaaaaaaaaatttgctttttctgttgtctccccagcttgtcaccagggggcgagcttgccatttccctgctggtaacaataccattctgtcaccatctactgttttaggcttccgttttgcagccgtcctgaaaggaaggcttgctgtgtaaatgaaggcttgtgagcacagcagccagcctctcaagttgatagaggacagggacttccccaagtgcacagaggagatttcaaaagacatcaaattcactttttaaaaatgtaaagtagcttttggtgtgcttaaactaggtcaggccaggcgtggtggctcatgcctgtaatcctagcattttgggaggccaaggcaggtggatcacttgaggtcaggagttcgagatcagcctggccaacatgacgaaacccctttctctactaaaaatataaaaattagctgggcgtggtgatgcatacctgtaatcccagctacttcggaggctgaggcaggagaatcacttgaacctgggaggcagaggttgcagtaaactgagactgtgccactgcactccagcctgggcaacacagcaagactctgtctcaaaaacaaaaacaaaactaggccaggtgcagtggctcacgcttgcaatcccagcactttgggaggccgaggcaggcggatcacgaggtcaggatttcgagaacagcctggccaacatagtgaaacctcgtatctactaaaaatacaaaaattatctgggtgtggtggtgggcacctgttgtcccagctattcaggaggctgaggcaggagaatcgcttgaacccaggaggtggaggttgcagtgagccaagaccatgccattgcactccagccaggtaacagagtgagactctgtctcaaaaaaacacacacacacacacacacaaaactgtaggtcaaaaaacatgaaaatatgttcaacatcactaattagggaaatgtaaatcaaaaaccacaatgaactcttaaaattcaacagtaagaaaacaacctgattaaaaacaggccaaaacccttaacatatctcagcaaagaagatagacaggtggcaaataagcatatgaaaagatgttccatataacatgtcatcaggaaaatgcaagttagaacaacagaccactatacaactattagaatggccaaaatccaaagcaccgacagcatgaaatgctgggaaagttggagcaaccagaactcttattccttgctggtgggaacgcaagatggcacagccactttggaagacagttaagcagtttcttacaaaaactaggtaagctcttaccatgtgatccagcaatcttgctctttagtatttacctgaaggaactgaaaacatgtccacacaaaaaccagcacatggatgtttatagcagctttatctataattgccaaaactcaacccaaaatgtctttcagtaggtaaatgggtaaataaattgtggtgcatgtagtcattattcagtgcttaaatcaagctatgacaaattatgagttatcaagctataagaagtcacagaggaacttaaatgaatgctactaaatgaagccagtctgaaaaggcttcatattaaatgatgccaactatatgacactgggatgtattctggaaaaggcaaaactatggagacagtaaaaagcagtgggtgggggaggggagggaggaataattggagcacagaagatttttagggcagcgaaactactctgtatgatactataattataaatacctgtcattgtacatatgtccaaccccctaaaatgtacaacaccaagagtgaaccctaatgtaaactgtggactttgagtgataatgatgtgtcagtgtaggttcatcaattactgcaaatgtacctctttggtgggagatgttgaaaatggtggagactatgcatgtgtggggacaacaactatatgggaaatctctgtaccctctcaattttgctgtaaacctaaaattgctctaaaatataaagtctattaaaaccac

SEQ ID NO: 124253 - DNA, 2356 bp, Homo sapiens
  Payload ID: 4397
  Gene Symbol: COX15
  Gene Name: cytochrome c oxidase assembly homolog 15 (yeast)
  Uniprot ID: Q7KZN9
  ENST ID: ENST00000016171
  CDS Start-End: 52-1284
agaccacagagccctgggttgtggaagaggtggctgttccctgtcatcagtatgcagcgattgctctttccgccgttgagggccttgaaggggaggcagtatctgccgctcctggctcctagggcagcgcctagagcacagtgtgattgcatcaggcgccctttgaggccagggcaatacagcaccatctctgaagtagctttgcaatctggaaggggtacagtgtcccttccctcaaaggctgctgagcgggtggtgggccgatggctcctggtctgcagtggaacagtggctggagcagttattcttggtggagtaactaggttgacagagtctggcctctcgatggtagattggcatttaataaaggagatgaagccacctacaagccaagaggaatgggaagcagaattccaaagataccagcaatttccagaatttaaaatcttgaatcatgatatgacactgacagaattcaagttcatctggtacatggagtactcacaccgaatgtggggtcgccttgtaggccttgtgtacatcctgcctgctgcctacttttggagaaagggctggctcagccgtggcatgaaaggacgtgttcttgccctctgtggcctcgtctgcttccagggtctgttgggatggtatatggtgaaaagtggactagaagaaaaatcagactcccatgacatccctcgggtcagtcagtaccgccttgctgcccacctgggatcagccctggttctttattgtgccagcttgtggacctcactgtcactgctactccctccgcacaagttgcctgaaacccaccaactcctacagttgagacgatttgctcatggaacagcaggtctggtgttccttacggccctctcaggggcttttgtggcagggctagatgctgggcttgtttataactcctttcccaaaatgggagaatcctggatcccggaggacctctttaccttctcccccatcctgaggaatgtttttgagaatcccaccatggtgcagtttgatcaccggattctgggaatcacttcagtcactgccattacagtgctctacttcctctctcggagaattccccttcctagaaggaccaagatggcagcagtgactctgctggctttggcgtatacacaggtgggcttgggcatcagcacgctgctgatgtatgtcccaactcctctggccgccactcaccagtcaggctccttggctttgctcactggtgctctttggctgatgaatgaactccgaagagtcccaaaatgattcttagaggaccagcctcctgggactgtgactgcttttgagagctcttcagagatcataagaacttgggcttttctacgagatgaccttgacataccaagtggtttccaaatggtcaacttacttaaaaatcttttcctgttttgagatagtcactggatcaagaatgcattaagtgtggttaccctaaatgttcccttttaaatctgcttttcatgttgaaaatcagttttaatgtagagaaagaaatgtctgccatttgctgcttaacaggctttgtgtcaggtttttcagtgttggcaagctcttggttctacgtggatgatttctacgtggatgttctcctgagtccttaattctgcctaaatagaatttctttatgatcttaacttcacttccattaggtgaagattgaaaggataggattgacatacccaaagtagccagctggtcttcagcaaaaaaaaaaaagctaatgtcttctaatatcctgattttcagaaatggggaaattgcagattttgacaagcttaatgtgtatatgtagcaaaatggtttttaagtacttggaaaaggaggtaatcgccaaatagttccatttttttttttttttttgagacagagtttcactcttgttgcccaggctggagtacaatggcgtgatctcagctcactctgcaacctccacttcccaggttcaagcgattctcatgcctcagcctcccgagtagctgggactacaggcacaagtcaccatgcctggctaattttgtatttttagtagagaaggggtttcaccacattggccgggctggtcttgaactcctgacctcaggtaatccgcccatctcggcttcccaaagtgctgagattacaggcatgggccaccacgcccagctagttcctcttttgataaggctgttaacattacaaggtcagagagaggaatggaatcgacagtataaattggttcctgagagggtttcctaacagctttgtaataagaaaaatatggccttgatggtgtagtgcatggacatctacccagataaacaaattgttgactgctgaa

SEQ ID NO: 124254 - DNA, 2788 bp, Homo sapiens
  Payload ID: 4397
  Gene Symbol: COX15
  Gene Name: cytochrome c oxidase assembly homolog 15 (yeast)
  Uniprot ID: Q7KZN9
  ENST ID: ENST00000370483
  CDS Start-End: 52-1218
agaccacagagccctgggttgtggaagaggtggctgttccctgtcatcagtatgcagcgattgctctttccgccgttgagggccttgaaggggaggcagtatctgccgctcctggctcctagggcagcgcctagagcacagtgtgattgcatcaggcgccctttgaggccagggcaatacagcaccatctctgaagtagctttgcaatctggaaggggtacagtgtcccttccctcaaaggctgctgagcgggtggtgggccgatggctcctggtctgcagtggaacagtggctggagcagttattcttggtggagtaactaggttgacagagtctggcctctcgatggtagattggcatttaataaaggagatgaagccacctacaagccaagaggaatgggaagcagaattccaaagataccagcaatttccagaatttaaaatcttgaatcatgatatgacactgacagaattcaagttcatctggtacatggagtactcacaccgaatgtggggtcgccttgtaggccttgtgtacatcctgcctgctgcctacttttggagaaagggctggctcagccgtggcatgaaaggacgtgttcttgccctctgtggcctcgtctgcttccagggtctgttgggatggtatatggtgaaaagtggactagaagaaaaatcagactcccatgacatccctcgggtcagtcagtaccgccttgctgcccacctgggatcagccctggttctttattgtgccagcttgtggacctcactgtcactgctactccctccgcacaagttgcctgaaacccaccaactcctacagttgagacgatttgctcatggaacagcaggtctggtgttccttacggccctctcaggggcttttgtggcagggctagatgctgggcttgtttataactcctttcccaaaatgggagaatcctggatcccggaggacctctttaccttctcccccatcctgaggaatgtttttgagaatcccaccatggtgcagtttgatcaccggattctgggaatcacttcagtcactgccattacagtgctctacttcctctctcggagaattccccttcctagaaggaccaagatggcagcagtgactctgctggctttggcgtatacacagggccctgtcttattcaactttacttttaaaatcagtgatttggatgaaggcatcagaaacatctgatttgaggatggagcaacccaatattgctaatataatagatgacagtggcaactgaaaacagtcccagaatgaccccatcgagatgaaattaaacagattagaaatgtaacatactcatttaaattaaataagttgtataagtttgggctgaagaaacctggccttatatcatttcatataaaaaagacgggattttagttgtcctcaggttcaatatgaaccaagtagtattcatgttgttattatatgataacagaaaaattagtggtacttcaggttttatcagtagaagtgtcacagccatagtcaaaatacccctaacatactgcatttcactctgggtaccaaatttaagcaagatattgatggccactaagtgtgtatccagaagaagagatcagaatgatgagtccagaacccctgtcacacagggaataggtgaaggaactagggatatttaactggagcagagaacatctggagagagagcaagattcctgtccttgagaagttgaagccgtctcatgcagaagagggaatgagcttccattatgctgcagagctggcagcaatggatgaaagttgcaggaagttagttttagttctgtagaaggcaagagtagggtagaccaaatcaaatgctcactggggtcaggctgatggagacagtaacactggcgagcaggtgccccagctcggactatactgctgagttctggtctgttgctgccactctacaggtccagggttgttagatcttctgggtttttgttttgctttttgaaataaggaaaataagcttatcttaagtttatttttccttggatatacctagattccatacagtgacaatacaaatacaaaggaagaacatctggatttcatccttgacctcatttacaaagcaaaaagagatgctggattcagatataaatgtttaattttgcagtgtttaagtcagcaaatcttctgttttttaaaaataagccacatatctagatttttctgtgaaagctctcaattaagtgttgggaactaatttcaagattttaaaaaatgttatgcaggcttaacgtgtctgagagccataaatgacctaacgtttcccgttagtctctgaactaggtgatctcagttctctttcaactccagtactctgtaagtttctgtgacctgtagtgtaccattctcaggtggtgatatggtttggatgttttgtcccctccaaatctcatgttcaaagtgtgacattcagtgttagaggtgggcctagtaggaggtatttgggtcatgggggcggatcccttatgtatgactttgtgccatccccatagtaatgagtgagttctcactctggttgtttatgcaagagctggttgtttaaaagagcctggaacttcctcctctctcgcttgctctctctcaccatgtgacacactggctccccttcaccttctgccatgattgtaagcttcgtgaggccctcaccagaagcagatgccagcgccatgcttcctatacagttctatgcagaacagtgagccaaataaacctcttttctttctaaaaa

SEQ ID NO: 124255 - DNA, 708 bp, Homo sapiens
  Payload ID: 4398
  Gene Symbol: COX4I1
  Gene Name: cytochrome c oxidase subunit IV isoform 1
  Uniprot ID: P13073
  ENST ID: ENST00000253452
  CDS Start-End: 71-580
gcggccttgctctcttccggtcgcgggacaccgggtgtagagggcggtcgcggcgggcagtggcggcagaatgttggctaccagggtatttagcctagttggcaagcgagcaatttccacctctgtgtgtgtacgagctcatgaaagtgttgtgaagagcgaagacttttcgctcccagcttatatggatcggcgtgaccaccccttgccggaggtggcccatgtcaagcacctgtctgccagccagaaggcattgaaggagaaggagaaggcctcctggagcagcctctccatggatgagaaagtcgagttgtatcgcattaagttcaaggagagctttgctgagatgaacaggggctcgaacgagtggaagacggttgtgggcggtgccatgttcttcatcggtttcaccgcgctcgttatcatgtggcagaagcactatgtgtacggccccctcccgcaaagctttgacaaagagtgggtggccaagcagaccaagaggatgctggacatgaaggtgaaccccatccagggcttagcctccaagtgggactacgaaaagaacgagtggaagaagtgagagatgctggcctgcgcctgcacctgcgcctggctctgtcaccgccatgcaactccatgcctatttactggaaacctgttatgccaaacagttgtaccactgctaataaatgaccagtttacctgaaa

SEQ ID NO: 124256 - DNA, 1481 bp, Homo sapiens
  Payload ID: 4398
  Gene Symbol: COX4I1
  Gene Name: cytochrome c oxidase subunit IV isoform 1
  ENST ID: ENST00000564903
  CDS Start-End: 5-385
cagaatgttggctaccagggtatttagcctagttggcaagcgagcaatttccacctctgtgtgtgtacgagctcatgaaagtgttgtgaagagcgaagacttttcgctcccagcttatatggatcggcgtgaccaccccttgccggaggtggcccatgtcaagcacctgtctgccagccagaaggcattgaaggagaaggagaaggcctcctggagcagcctctccatggatgagaaagtcgagttgtatcgcattaagttcaaggagagctttgctgagatgaacaggggctcgaacgagtggaagacggttgtgggcggtgccatgttcttcatcggtttcaccgcgctcgttatcatgtggcagaagcactatggtgagtagagagggaggaaggcatgggcgcctggactggggctccagcctgcagtgcccattggtgggctgtcggggacctccataccttgaggctatgagatagggactgcattccagagttcatctcaggattgtttccaggccttggtgacctggagaactgaagtcgtgggaggttagtttataagccagcatctgattattcatagccatgcttgttgggtggtgaaataccttaactactttgtacagcacaccacgttttcagtagcaatttatgtgctcaccagtcacttagcgaaagatgacttcgtgaaggttcgagcaaggataaggggactcattcattgaatgactgtctggactgttgtgaggactgcatctcaacagccagcatctgggggtcccgacctgatagtttgtgtgtgggcattgccgggttgctcgctcgtggtaatgactcttccccgaggttctttctgtccaggcagaacaggcatttttgcattctgaataggtatattctcgtacttttggtttgaatgtggatgtgggttaataacagacccgaatctatttgatcttccaggtcaccttgggctctgtttgtcagatcctgttatccatagcctttagagaggaccttctgcttttagcttattttgttgctaactttttacaaacaaagggctaattttaaaatgtcagtgttgtcagtggtcagaaaccgtgtgtttgagcgggtgttgagtggcaggtggctctgctgacctggtggctggtgtgtcgggaggatttaacctgtgtgagggattggcctagaaacaacctgttgagatagtcttgccccataacctgtctcacaccgtagtgtacggccccctcccgcaaagctttgacaaagagtgggtggccaagcagaccaagaggatgctggacatgaaggtgaaccccatccagggcttagcctccaagtgggactacgaaaagaacgagtggaagaagtgagagatgctggcctgcgcctgcacctgcgcctggctctgtcaccgccatgcaactccatgcctatttactggaaacctgttatgccaaacagttg

SEQ ID NO: 124257 - DNA, 566 bp, Homo sapiens
  Payload ID: 4398
  Gene Symbol: COX4I1
  Gene Name: cytochrome c oxidase subunit IV isoform 1
  ENST ID: ENST00000565078
  CDS Start-End: 438-566
tttacactttgccagataaggaatcggctctgcgaaggtgcgaagaaccaaatcctagcgattaatgtcccaacaacgtgaacacttcctgcaactcgaaatcctcaagggaaactctgtcgaatccccaccaagtgaacgatgacttgtttctacaaaggctactgatttcaggaaactaacgtataactcgtcgccttaaagtgcctctaaaagcatccacgacggttaaagtcgctgctactacgggacgctatttattcagcgccaagacccaagcgccatcgtggatcaccccattcctggccacggcaaccctagggagcgggtcctaggagcctgctggagggcgaccgctgggccagcttcctctctgctgactgaggggaggccaggctgcctgcaaggggaaggggccctttccgcgcttaccaggaatgttggctaccagggtatttagcctagttggcaagcgagcaatttccacctctgtgtgtgtacgagctcatgaaagtgttgtgaagagcgaagacttttcgctcccagcttatatggatcggcgtgac

SEQ ID NO: 124258 - DNA, 794 bp, Homo sapiens
  Payload ID: 4398
  Gene Symbol: COX4I1
  Gene Name: cytochrome c oxidase subunit IV isoform 1
  ENST ID: ENST00000568794
  CDS Start-End: 72-491
cgcggccttgctctcttccggtcgcgggacaccgggtgtagagggcggtcgcggcgggcagtggcggcagaatgttggctaccagggtatttagcctagttggcaagcgagcaatttccacctctgtgtgtgtacgagctcatgaaagtgttgtgaagagcgaagacttttcgctcccagcttatatggatcggcgtgaccaccccttgccggaggtggcccatgtcaagcacctgtctgccagccagaaggcattgaaggagaaggagaaggcctcctggagcagcctctccatggatgagaaagtcgagttgtatcgcattaagttcaaggagagctttgctgagatgaacaggggctcgaacgagtggaagacggttgtgggcggtgccatgttcttcatcggtttcaccgcgctcgttatcatgtggcagaagcactatggtcaccttgggctctgtttgtcagatcctgttatccatagcctttagagaggaccttctgcttttagcttattttgttgctaactttttacaaacaaagggctaattttaaaatgtcagtgttgtcagtggtcagaaaccgtgtgtttgagcgggtgttgagtggcaggtggctctgctgacctggtggctggtgtgtcgggaggatttaacctgtgtgagggattggcctagaaacaacctgttgagatagtcttgccccataacctgtctcacaccgtagtgtacggccccctcccgcaaagctttgacaaagagtgggtggccaagcagaccaagaggatgctggac

SEQ ID NO: 124259 - DNA, 490 bp, Homo sapiens
  Payload ID: 4398
  Gene Symbol: COX4I1
  Gene Name: cytochrome c oxidase subunit IV isoform 1
  ENST ID: ENST00000566405
  CDS Start-End: 167-490
ttccggtcgcgggacaccgggtgtagagggcggtcgcggcgggcagtggcggcagaatgttggctaccagggtatttagcctagttggcaagcgagcaatttccacctctgtgtgtgtacgagctcatgtgttgtgaagagcgaagacttttcgctcccagcttatatggatcggcgtgaccaccccttgccggaggtggcccatgtcaagcacctgtctgccagccagaaggcattgaaggagaaggagaaggcctcctggagcagcctctccatggatgagaaagtcgagttgtatcgcattaagttcaaggagagctttgctgagatgaacaggggctcgaacgagtggaagacggttgtgggcggtgccatgttcttcatcggtttcaccgcgctcgttatcatgtggcagaagcactatgtgtacggccccctcccgcaaagctttgacaaagagtgggtggccaagcagaccaagaggatgctg

SEQ ID NO: 124260 - DNA, 471 bp, Homo sapiens
  Payload ID: 4398
  Gene Symbol: COX4I1
  Gene Name: cytochrome c oxidase subunit IV isoform 1
  ENST ID: ENST00000566115
  CDS Start-End: 117-245
gccgggtgcgggcggagtcttcctcgatcccgtggtgctccgcggcgcggccttgctctcttccggtcgcgggacaccgggtgtagagggcggtcgcggcgggcagtggcggcagaatgttggctaccagggtatttagcctagttggcaagcgagcaatttccacctctgtgtgtgtacgagctcatgtagagacggggtttcaccatgttagccaggatggtctcgatctcctgacatcgtgatccgcctgcctgggcctcccaaagtgctgggattacaggtgtgagccaccgcgcccagccctgcagaaagtgttgtgaagagcgaagacttttcgctcccagcttatatggatcggcgtgaccaccccttgccggaggtggcccatgtcaagcacctgtctgccagccagaaggcattgaaggagaaggagaaggcctcctggagcagcctctccatggatgagaa

SEQ ID NO: 124261 - DNA, 617 bp, Homo sapiens
  Payload ID: 4398
  Gene Symbol: COX4I1
  Gene Name: cytochrome c oxidase subunit IV isoform 1
  ENST ID: ENST00000564544
  CDS Start-End: 47-298
gggacaccgggtgtagagggcggtcgcggcgggcagtggcggcagaatgttggctaccagggtatttagcctagttggcaagcgagcaatttccacctctgtgtgtgtacgagctcatgaaagtgttgtgaagagcgaagacttttcgctcccagcttatatggatcggcgtgaccaccccttgccggaggtggcccatgtcaagcacctgtctgccagccagaaggcattgaaggagaaggagaaggcctcctggagcagcctctccatggatgagaaagtcgagtgtgggtattgaagggacccacaggcgcgcccagcagctctcggaagcgttgtatcgcattaagttcaaggagagctttgctgagatgaacaggggctcgaacgagtggaagacggttgtgggcggtgccatgttcttcatcggtttcaccgcgctcgttatcatgtggcagaagcactatgggcttagcctccaagtgggactacgaaaagaacgagtggaagaagtgagagatgctggcctgcgcctgcacctgcgcctggctctgtcaccgccatgcaactccatgcctatttactggaaacctgttatgccaaacagttgtaccact

SEQ ID NO: 124262 - DNA, 716 bp, Homo sapiens
  Payload ID: 4398
  Gene Symbol: COX4I1
  Gene Name: cytochrome c oxidase subunit IV isoform 1
  Uniprot ID: P13073
  ENST ID: ENST00000561569
  CDS Start-End: 79-588
cttccggtcgcgggacaccgggtgtagagggcggtcgcggcgggcagtggcggcaggtgtacatttttatctttcagaatgttggctaccagggtatttagcctagttggcaagcgagcaatttccacctctgtgtgtgtacgagctcatgaaagtgttgtgaagagcgaagacttttcgctcccagcttatatggatcggcgtgaccaccccttgccggaggtggcccatgtcaagcacctgtctgccagccagaaggcattgaaggagaaggagaaggcctcctggagcagcctctccatggatgagaaagtcgagttgtatcgcattaagttcaaggagagctttgctgagatgaacaggggctcgaacgagtggaagacggttgtgggcggtgccatgttcttcatcggtttcaccgcgctcgttatcatgtggcagaagcactatgtgtacggccccctcccgcaaagctttgacaaagagtgggtggccaagcagaccaagaggatgctggacatgaaggtgaaccccatccagggcttagcctccaagtgggactacgaaaagaacgagtggaagaagtgagagatgctggcctgcgcctgcacctgcgcctggctctgtcaccgccatgcaactccatgcctatttactggaaacctgttatgccaaacagttgtaccactgctaataaatgaccagtttacctgaaa

SEQ ID NO: 124263 - DNA, 873 bp, Homo sapiens
  Payload ID: 4398
  Gene Symbol: COX4I1
  Gene Name: cytochrome c oxidase subunit IV isoform 1
  Uniprot ID: P13073
  ENST ID: ENST00000562336
  CDS Start-End: 194-703
ctctcttccggtcgcgggacaccgggtgtagagggcggtcgcggcgggcagtggcggcaggtgagacaggaggtggccggtgcggcgccgccaggccgggccgggtcggggggccgggagccatcaagtctgcacgtccgcagcctggccgctcggcttcagcaggaagcaccgaatgggcctcggagccagaatgttggctaccagggtatttagcctagttggcaagcgagcaatttccacctctgtgtgtgtacgagctcatgaaagtgttgtgaagagcgaagacttttcgctcccagcttatatggatcggcgtgaccaccccttgccggaggtggcccatgtcaagcacctgtctgccagccagaaggcattgaaggagaaggagaaggcctcctggagcagcctctccatggatgagaaagtcgagttgtatcgcattaagttcaaggagagctttgctgagatgaacaggggctcgaacgagtggaagacggttgtgggcggtgccatgttcttcatcggtttcaccgcgctcgttatcatgtggcagaagcactatgtgtacggccccctcccgcaaagctttgacaaagagtgggtggccaagcagaccaagaggatgctggacatgaaggtgaaccccatccagggcttagcctccaagtgggactacgaaaagaacgagtggaagaagtgagagatgctggcctgcgcctgcacctgcgcctggctctgtcaccgccatgcaactccatgcctatttactggaaacctgttatgccaaacagttgtaccactgctaataaatgaccagtttacctgaaaccctttgtgatcagttctttaatgatacctaaatgaaagcta

SEQ ID NO: 124264 - DNA, 693 bp, Homo sapiens
  Payload ID: 4399
  Gene Symbol: COX4I2
  Gene Name: cytochrome c oxidase subunit IV isoform 2 (lung)
  Uniprot ID: Q96KJ9
  ENST ID: ENST00000376075
  CDS Start-End: 76-591
caggtccctccgcagcgggttctcagttgctcgctgggcagacccaggtcgcgctcccactgccgagcccgcgagatgctccccagagctgcctggagcttggtgctgaggaaaggtggaggtggaagacgagggatgcacagctcagaaggcaccacccgtggtggggggaagatgtccccctacaccaactgctatgcccagcgctactaccccatgccagaagagcccttctgcacagaactcaacgctgaggagcaggccctgaaggagaaggagaagggaagctggacccagctgacccacgccgaaaaggtggccttgtaccggctccagttcaatgagacctttgcggagatgaaccgtcgctccaatgagtggaagacagtgatgggttgtgtcttcttcttcattggattcgcagctctggtgatttggtggcagcgggtctacgtatttcctccaaagccgatcaccttgacggacgagcggaaagcccagcagctgcagcgcatgctggacatgaaggtgaatcctgtgcagggcctggcctcccgctgggactatgagaagaagcagtggaagaagtgacttgcatccccagctgtctccctgaggctccgccctggctgggagcctctggcggcccctcccctcccctgcccttaaccccagtaaagctccaaaaaaaaa

SEQ ID NO: 124265 - DNA, 1268 bp, Homo sapiens
  Payload ID: 4400
  Gene Symbol: COX5A
  Gene Name: cytochrome c oxidase subunit Va
  Uniprot ID: P20674
  ENST ID: ENST00000322347
  CDS Start-End: 155-607
cggtggctcctcccgcccacgcgccagagtcgcagtgggcgggcctacgtgctccgcccgctgtgagcctgtccggcccccgcccgctccggagcaacccgcgagcttacaccggcttctctctgtcctcagcccgcgcgccgccatcgccgtcatgctgggcgccgctctccgccgctgcgctgtggccgcaaccacccgggccgaccctcgaggcctcctgcactccgcccggacccccggccccgccgtggctatccagtcagttcgctgctattcccatgggtcacaggagacagatgaggagtttgatgctcgctgggtaacatacttcaacaagccagatatagatgcctgggaattgcgtaaagggataaacacacttgttacctatgatatggttccagagcccaaaatcattgatgctgctttgcgggcatgcagacggttaaatgattttgctagtacagttcgtatcctagaggttgttaaggacaaagcaggacctcataaggaaatctacccctatgtcatccaggaacttagaccaactttaaatgaactgggaatctccactccggaggaactgggccttgacaaagtgtaaaccgcatggatgggcttccccaaggatttattgacattgctacttgagtgtgaacagttacctggaaatactgatgataacatattaccttatttgaacaagttttcctttattgagtaccaagccatgtaatggtaacttggactttaataaaagggaaatgagtttgaactgaaattaggtatttgtttcatgtgtttgcattaataagcagaaaattaagtgctgtattggtttcatggttttgctgccctcttacatgctgagagaactgtgttaattctctggaaaccatctgacatgaaaatcagcttcattaatatgtttgggtgccctagcttgtaaattagctgaaggctagaagtcatttatatagaattttcttgttgacaccctaggcttaggggactggttgtctgtggggatagatcaaattgtgtacctttccaaaacaggttttaatgatgtttaaaagtggtcactgagatagtcttgaggatgtgctatgcagtagccaagccctcttacggtgtgttcctctcttagtgcccctttcctttcctacctgttcttcccttgcagtggtgtattagccttggacattaaaacatttgctttgtaaatttggaggcattctgattaaacagctgagtaaaacaaa

SEQ ID NO: 124266 - DNA, 571 bp, Homo sapiens
  Payload ID: 4400
  Gene Symbol: COX5A
  Gene Name: cytochrome c oxidase subunit Va
  ENST ID: ENST00000568783
  CDS Start-End: 70-531
gctccggagcaacccgcgagcttacaccggcttctctctgtcctcagcccgcgcgccgccatcgccgtcatgctgggcgccgctctccgccgctgcgctgtggccgcaaccacccgggccgaccctcgaggcctcctgcactccgcccggacccccggccccgccgtggctatccagtcagttcgctgctattcccatgggtcacaggagacagatgaggagtttgatgctcgctgggtaacatacttcaacaagccagatatagatgcctgggaattgcgtaaagggataaacacacttgttacctatgatatggttccagagcccaaaatcattgatgctgctttgcgggcatgcagacggttaaatgattttgctagtacagttcgtatcctagaggttgttaagatgggcttccccaaggatttattgacattgctacttgagtgtgaacagttacctggaaatactgatgataacatattaccttatttgaacaagttttcctttattgagtaccaagccatgtaatggtaacttggactttaataaaagggaaatgagtttgaac

SEQ ID NO: 124267 - DNA, 441 bp, Homo sapiens
  Payload ID: 4400
  Gene Symbol: COX5A
  Gene Name: cytochrome c oxidase subunit Va
  ENST ID: ENST00000562233
  CDS Start-End: 57-311
ccgcgagcttacaccggcttctctctgtcctcagcccgcgcgccgccatcgccgtcatgctgggcgccgctctccgccgctgcgctgtggccgcaaccacccgggccgaccctcgaggcctcctgcactccgcccggacccccggccccgccgtggctatccagtcagttcgctgctattcccatgggtcacaggagacagatgaggagtttgatgctcgctgggtaacatacttcaacaagccagatatagatgcctgggaattgcgtaaagatgggcttccccaaggatttattgacattgctacttgagtgtgaacagttacctggaaatactgatgataacatattaccttatttgaacaagttttcctttattgagtaccaagccatgtaatggtaacttggactttaataaaagggaaatgagtttgaactgaaa

SEQ ID NO: 124268 - DNA, 582 bp, Homo sapiens
  Payload ID: 4400
  Gene Symbol: COX5A
  Gene Name: cytochrome c oxidase subunit Va
  ENST ID: ENST00000568517
  CDS Start-End: 233-442
ctgcccgccgcctcgagtagtggaggacctgaaagcgcgcccccggggcctccccccgcgcaacttcctggctgtgccaccgcggacagctatccagtcagttcgctgctattcccatgggtcacaggagacagatgaggagtttgatgctcgctgggtaacatacttcaacaagccagatatagatgcctgggaattgcgtaaagggataaacacacttgttacctatgatatggttccagagcccaaaatcattgatgctgctttgcgggcatgcagacggttaaatgattttgctagtacagttcgtatcctagaggttgttaaggacaaagcaggacctcataaggaaatctacccctatgtcatccaggaacttagaccaactttaaatgaactgggaatctccactccggaggaactgggccttgacaaagtgtaaaccgcatggatgggcttccccaaggatttattgacattgctacttgagtgtgaacagttacctggaaatactgatgataacatattaccttatttgaacaagttttcctttattgagtaccaagccatgtaatggtaact

SEQ ID NO: 124269 - DNA, 568 bp, Homo sapiens
  Payload ID: 4400
  Gene Symbol: COX5A
  Gene Name: cytochrome c oxidase subunit Va
  Uniprot ID: P20674
  ENST ID: ENST00000564811
  CDS Start-End: 53-505
gagcttacaccggcttctctctgtcctcagcccgcgcgccgccatcgccgtcatgctgggcgccgctctccgccgctgcgctgtggccgcaaccacccgggccgaccctcgaggcctcctgcactccgcccggacccccggccccgccgtggctatccagtcagttcgctgctattcccatgggtcacaggagacagatgaggagtttgatgctcgctgggtaacatacttcaacaagccagatatagatgcctgggaattgcgtaaagggataaacacacttgttacctatgatatggttccagagcccaaaatcattgatgctgctttgcgggcatgcagacggttaaatgattttgctagtacagttcgtatcctagaggttgttaaggacaaagcaggacctcataaggaaatctacccctatgtcatccaggaacttagaccaactttaaatgaactgggaatctccactccggaggaactgggccttgacaaagtgtaaaccgcatgggtaagcgacaaaccactgaagaaggcaggaaaacaatccagagaggtgtgggtg

SEQ ID NO: 124270 - DNA, 579 bp, Homo sapiens
  Payload ID: 4400
  Gene Symbol: COX5A
  Gene Name: cytochrome c oxidase subunit Va
  ENST ID: ENST00000567270
  CDS Start-End: 67-402
ccggagcaacccgcgagcttacaccggcttctctctgtcctcagcccgcgcgccgccatcgccgtcatgctgggcgccgctctccgccgctgcgctgtggccgcaaccacccgggccgaccctcgaggcctcctgcactccgcccggacccccggccccgccgtggggataaacacacttgttacctatgatatggttccagagcccaaaatcattgatgctgctttgcgggcatgcagacggttaaatgattttgctagtacagttcgtatcctagaggttgttaaggacaaagcaggacctcataaggaaatctacccctatgtcatccaggaacttagaccaactttaaatgaactgggaatctccactccggaggaactgggccttgacaaagtgtaaaccgcatggatgggcttccccaaggatttattgacattgctacttgagtgtgaacagttacctggaaatactgatgataacatattaccttatttgaacaagttttcctttattgagtaccaagccatgtaatggtaacttggactttaataaaagggaaatgagtttgaactgaaa

SEQ ID NO: 124271 - DNA, 712 bp, Homo sapiens
  Payload ID: 4401
  Gene Symbol: COX5B
  Gene Name: cytochrome c oxidase subunit Vb
  Uniprot ID: P10606
  ENST ID: ENST00000258424
  CDS Start-End: 48-437
gtctctgcagcttgttcccggaagttttgctgctagtcgcggacgcaatggcttcaaggttacttcgcggagctggaacgctggccgcgcaggccctgagggctcgcggccccagtggcgcggccgcgatgcgctccatggcatctggaggtggtgttcccactgatgaagagcaggcgactgggttggagagggagatcatgctggctgcaaagaagggactggacccatacaatgtactggccccaaagggagcttcaggcaccagggaagaccctaatttagtcccctccatctccaacaagagaatagtaggctgcatctgtgaagaggacaataccagcgtcgtctggttttggctgcacaaaggcgaggcccagcgatgcccccgctgtggagcccattacaagctggtgccccagcagctggcacactgagcacctgcactaaattactcaaaatgtgctgtaaagtttcttctttccagtaaagactagccattgcattggctccttctcccatagatggctggtcttatttcttacccgtattctttggtaggcatggaatatgcttattttgggaaaagctgtctgttaatgctagcttgccatccacttactgaaagtgtataaccagtgtatagtgcttagattaataataagaatagatcgacaacccgtaatgcaatgaatgggaccacctggtatga

SEQ ID NO: 124272 - DNA, 572 bp, Homo sapiens
  Payload ID: 4402
  Gene Symbol: COX6A1
  Gene Name: cytochrome c oxidase subunit VIa polypeptide 1
  Uniprot ID: P12074
  ENST ID: ENST00000229379
  CDS Start-End: 38-367
acttccgcttccggcgctgcggcagtccagatcaaaaatggcggtagttggtgtgtcctcggtttctcggctgctgggtcggtcccgcccacagctggggcggcctatgtcgagtggcgcccatggcgaagagggctcagctcgcatgtggaagactctcaccttcttcgtcgcgctccccggggtggcagtcagcatgctgaatgtgtacctgaagtcgcaccacggagagcacgagagacccgagttcatcgcctacccccatctccgcatcaggaccaagccgtttccctggggagatggtaaccatactctattccataaccctcatgtgaatccacttccaactggctacgaagatgaataaagagaatctggaccactacccgggcaccagggaccacagcactggtttggaccgttactctgcacatggaccagaaaaagtatatgggaccttaagctcaccttctttacttgtatcaaatgatgactggtatactggtctcccatccctttgcttgtggcaggagatggcttaaataaataacttaaatttagattggtcatga

SEQ ID NO: 124273 - DNA, 440 bp, Homo sapiens
  Payload ID: 4403
  Gene Symbol: COX6A2
  Gene Name: cytochrome c oxidase subunit VIa polypeptide 2
  Uniprot ID: Q02221
  ENST ID: ENST00000287490
  CDS Start-End: 104-397
agtgctccagactcaacaggtgattggcccagagaggggaggtgaccccaggccccaggaaagggagcgaggacagcgctggttcccggctccccgcaccatcatggctttgcctctgaggcccctgacccggggcttggccagcgctgccaaaggaggccacggaggagcaggagctcgtacctggcgtctgctgaccttcgtgctggcgctgcccagcgtggccctctgcaccttcaactcctatctccactcgggccaccgcccgcgccccgagttccgtccctaccaacacctccgcatccgcaccaagccctacccctggggggacggcaaccacactctgttccacaatagccacgtgaaccctctgcccacgggctacgaacacccctgaggccccggacgcccccggacacaataaaggtgtgaagcttcga

SEQ ID NO: 124274 - DNA, 667 bp, Homo sapiens
  Payload ID: 4404
  Gene Symbol: COX6B1
  Gene Name: cytochrome c oxidase subunit VIb polypeptide 1 (ubiquitous)
  Uniprot ID: P14854
  ENST ID: ENST00000246554
  CDS Start-End: 193-453
tgggcgtggcttgaatgacttcagtggcctcctcctgggagggagctgaagccgctcgcaagactcccgtagtccccacctctctcagcttccggctggtagtagttccgcttcctgtccgactgtggtgtctttgctgagggtcacattgagctgcaggttgaatccggggtgcctttaggattcagcaccatggcggaagacatggagaccaaaatcaagaactacaagaccgccccttttgacagccgcttccccaaccagaaccagactagaaactgctggcagaactacctggacttccaccgctgtcagaaggcaatgaccgctaaaggaggcgatatctctgtgtgcgaatggtaccagcgtgtgtaccagtccctctgccccacatcctgggtcacagactgggatgagcaacgggctgaaggcacgtttcccgggaagatctgaactggctgcatctccctttcctctgtcctccatccttctcccaggatggtgaagggggacctggtacccagtgatccccaccccaggatcctaaatcatgacttacctgctaataaaaactcattggaaaagtgagactatgcgtgtgaacgggccaggcagtggcaagaagctgggctggaatcagtgccctgaccagggaggggcttgaatg

SEQ ID NO: 124275 - DNA, 435 bp, Homo sapiens
  Payload ID: 4404
  Gene Symbol: COX6B1
  Gene Name: cytochrome c oxidase subunit VIb polypeptide 1 (ubiquitous)
  Uniprot ID: P14854
  ENST ID: ENST00000392201
  CDS Start-End: 96-356
catcctcccttttggacgttggaggggccgcagcgtcatctccgatgcaccctcatcctcagataccgggtagagatctcgccggattcagcaccatggcggaagacatggagaccaaaatcaagaactacaagaccgccccttttgacagccgcttccccaaccagaaccagactagaaactgctggcagaactacctggacttccaccgctgtcagaaggcaatgaccgctaaaggaggcgatatctctgtgtgcgaatggtaccagcgtgtgtaccagtccctctgccccacatcctgggtcacagactgggatgagcaacgggctgaaggcacgtttcccgggaagatctgaactggctgcatctccctttcctctgtcctccatccttctcccaggatggtgaagggggacctggtacccagtgatcccc

SEQ ID NO: 124276 - DNA, 660 bp, Homo sapiens
  Payload ID: 4404
  Gene Symbol: COX6B1
  Gene Name: cytochrome c oxidase subunit VIb polypeptide 1 (ubiquitous)
  Uniprot ID: P14854
  ENST ID: ENST00000592141
  CDS Start-End: 266-526
tagggcctgcgattatccccttttgtcagtaaacaggctcagagataccaagcgacctagctgaacctacacagcgaccaggatttggcccaggagtttgtcctccagggctcttcatggctaattcacaggcgtggcctctcgcggcttgcctgggccgcagcctggctcccgggtgtccagtccatcctcccttttggacgttggaggggccgcagcgtcatctccgatgcaccctcatcctcagataccgggattcagcaccatggcggaagacatggagaccaaaatcaagaactacaagaccgccccttttgacagccgcttccccaaccagaaccagactagaaactgctggcagaactacctggacttccaccgctgtcagaaggcaatgaccgctaaaggaggcgatatctctgtgtgcgaatggtaccagcgtgtgtaccagtccctctgccccacatcctgggtcacagactgggatgagcaacgggctgaaggcacgtttcccgggaagatctgaactggctgcatctccctttcctctgtcctccatccttctcccaggatggtgaagggggacctggtacccagtgatccccaccccaggatcctaaatcatgacttacctgctaataaaaactcattggaaaagtg

SEQ ID NO: 124277 - DNA, 290 bp, Homo sapiens
  Payload ID: 4404
  Gene Symbol: COX6B1
  Gene Name: cytochrome c oxidase subunit VIb polypeptide 1 (ubiquitous)
  ENST ID: ENST00000590618
  CDS Start-End: 1-122
tggcggaagacatggagaccaaaatcaagaactacaagaccgccccttttgacagccgcttccccaaccagaaccagactagaaactgctggcagaactacctgggtcacagactgggatgagcaacgggctgaaggcacgtttcccgggaagatctgaactggctgcatctccctttcctctgtcctccatccttctcccaggatggtgaagggggacctggtacccagtgatccccaccccaggatcctaaatcatgacttacctgctaataaaaactcattggaaaa

SEQ ID NO: 124278 - DNA, 1663 bp, Homo sapiens
  Payload ID: 4405
  Gene Symbol: COX6B2
  Gene Name: cytochrome c oxidase subunit VIb polypeptide 2 (testis)
  Uniprot ID: Q6YFQ2
  ENST ID: ENST00000326529
  CDS Start-End: 184-450
gcggtgcacgacggctcccattggctggggctcgggcgtcctagccaatccggccgcggggtgcgtttctcctgacccgggtgggaccgcaccccgcggactcagaagcgagcggcaccccgggaccatcccacagcagatccagtggccgccaacgtcaggctggagttgcctccttcgtggatgttggatgtggaagcccaggagccccccaaggggaaatggtcgacgccgcccttcgacccgcgcttccccagccagaaccagatccgtaactgctaccagaacttcctggactaccaccgctgcctcaagaccaggacccgccgcgggaagagcacgcagccctgcgagtactatttccgcgtgtaccactcgctgtgccccatcagctgggtggagagctggaacgagcagatcaagaacgggattttcgccggcaaaatctgactgccccagcgcggcttcctctgaagatgcagtgatcctgcatctttttgtctcgcggagccccgggtctcggttatccacccctacctcccagtgtctaagccacgaataatgccaccagccttcgagttccttgtttcccttgctctggtctccacgtgtatgatggggttctcaggcccaggcttcgaccagaggaccctctgccaccaccgtttcttcctgtccttgagctaccttggtgaactcatgaccccaggcccctgctccaccaggatgtcccccaggtcctgccagctgggaagtgccagcatgaacgcctccaacttcgtggaagccagggtcccctgcagctgagggacgccaagcagacacacctgccctccccagccagctcctgtctgtatgggcgagatgactgagagcgcccacgtccctaaggctgtcctgaccctccatgctgcgacaaggacagggaatggtcggtcactatgggcctggtgtctcccctcccccaccacccggtgctgcccagctcaagccagaagctgactttggccgccatggggacatcaggcaaggtctggagacatttttggttggggcagaggcatgctcctggcatcgagtgggtggagaccagagaagccgctcaacatcctgcaatgcatgggacaggccctgcctagaaacaccagctcagcatggcagcagtgcggaggccaggaaaccctgatcgccagtttctaacgccctcaccatttttatttttatttttattttttttgagacagagtttcgctcctgtcacccaggctggagtacaatgatgcgatctcagctcactgcaacctctgcctcccgggttcaagtgattctcctgcctcagcctcccgagtagctgggattacaggcatgcaccaccacgcccagcttattttgtatttttagtagagacggggtttctccgtgttggtcaggctggtctcaaactcctgacctcaggcaatctgcccacctcagcctcccaaagtgctgggattacaggcgtgagccactgcacccggctcaccactagtttttagccctttttgttgggggtggggtgggggcagaggagaggcggatacagaaacttgtgagaatgtgatgaacgctctgaaccccctataaaaaatgtgcatgtaaatatatactctcaacatttaaaaga

SEQ ID NO: 124279 - DNA, 1396 bp, Homo sapiens
  Payload ID: 4405
  Gene Symbol: COX6B2
  Gene Name: cytochrome c oxidase subunit VIb polypeptide 2 (testis)
  Uniprot ID: Q6YFQ2
  ENST ID: ENST00000590900
  CDS Start-End: 20-286
ggagttgcctccttcgtggatgttggatgtggaagcccaggagccccccaaggggaaatggtcgacgccgcccttcgacccgcgcttccccagccagaaccagatccgtaactgctaccagaacttcctggactaccaccgctgcctcaagaccaggacccgccgcgggaagagcacgcagccctgcgagtactatttccgcgtgtaccactcgctgtgccccatcagctgggtggagagctggaacgagcagatcaagaacgggattttcgccggcaaaatctgactgccccagcgcggcttcctctgaagatgcagtgatcctgcatctttttgtctcgcggagccccgggtctcggttatccacccctacctcccagtgtctaagccacgaataatgcaggtagatgcctcgcgttgacagctacgagccagcccagggtccccagttctcaacactgtcccacccagatggctccaagggtgaccctagacaagcttcttgacctgtgtgagcccgaggttccccaaggcaaaccaagatggctcagggccccattatcagaggaggacacaccctagatgagccatcccccaggatgacgccacctctgagatcttggtctcctggctccgtctctgaccacaacccaagaatggggtgagggcacagggtgtggactcaactacaggagggcttcctgttcatgcaacgtccccagagccttgacgaatgcacagaggcgctggcagaaccacgggggcaggacccctctctgagtcacagaatggagctaagttggtgaggtcacccagccgccactgccccactgatgcctgagccaggggcaggggcagacctgcccggcctggcctccagcctggtggaccatcacctgtgcaaactccgaacacctcctccaggtgctctggctggctttccctggtgtccagtagccgcctcctgagacccctaatgccagcctcacagtctcagcaacctcccagccaccagccttcgagttccttgtttcccttgctctggtctccacgtgtatgatggggttctcaggcccaggcttcgaccagaggaccctctgccaccaccgtttcttcctgtccttgagctaccttggtgaactcatgaccccaggcccctgctccaccaggatgtcccccaggtcctgccagctgggaagtgccagcatgaacgcctccaacttcgtggaagccagggtcccctgcagctgagggacgccaagcagacacacctgccctccccagccagctcctgtctgtatgggcgagatgactgagagcgcccacgtccctaaggctgtcctgaccctccatgctgcgacaaggacagggaatggtcggtcactatgggcctggt

SEQ ID NO: 124280 - DNA, 2083 bp, Homo sapiens
  Payload ID: 4405
  Gene Symbol: COX6B2
  Gene Name: cytochrome c oxidase subunit VIb polypeptide 2 (testis)
  Uniprot ID: Q6YFQ2
  ENST ID: ENST00000593184
  CDS Start-End: 81-347
agaagcgagcggcaccccgggaccatcccacagcagatccagtggccgccaacgtcaggctggagttgcctccttcgtggatgttggatgtggaagcccaggagccccccaaggggaaatggtcgacgccgcccttcgacccgcgcttccccagccagaaccagatccgtaactgctaccagaacttcctggactaccaccgctgcctcaagaccaggacccgccgcgggaagagcacgcagccctgcgagtactatttccgcgtgtaccactcgctgtgccccatcagctgggtggagagctggaacgagcagatcaagaacgggattttcgccggcaaaatctgactgccccagcgcggcttcctctgaagatgcagtgatcctgcatctttttgtctcgcggagccccgggtctcggttatccacccctacctcccagtgtctaagccacgaataatggtagatgcctcgcgttgacagctacgagccagcccagggtccccagttctcaacactgtcccacccagatggctccaaggccaaggagtgccgcttgacaaagccctagggttccagcctggtcctgctgagggagccgtgagaccagtcagcctggggtgctggttttcccaacgggtactccctgagctatcagccttccagaggggctcctaggagggggaagccccatcctctgactgaagcggtcctatgaggccctgttcaaccccagggttcaaaggacacaccctagatgagccatcccccaggatgacgccacctctgagatcttggtctcctggctccgtctctgaccacaacccaagaatggggtgagggcacagggtgtggactcaactacaggagggcttcctgttcatgcaacgtccccagagccttgacgaatgcacagaggcgctggcagaaccacgggggcaggacccctctctgagtcacagaatggagctaagttggtgaggtcacccagccaccagccttcgagttccttgtttcccttgctctggtctccacgtgtatgatggggttctcaggcccaggcttcgaccagaggaccctctgccaccaccgtttcttcctgtccttgagctaccttggtgaactcatgaccccaggcccctgctccaccaggatgtcccccaggtcctgccagctgggaagtgccagcatgaacgcctccaacttcgtggaagccagggtcccctgcagctgagggacgccaagcagacacacctgccctccccagccagctcctgtctgtatgggcgagatgactgagagcgcccacgtccctaaggctgtcctgaccctccatgctgcgacaaggacagggaatggtcggtcactatgggcctggtgtctcccctcccccaccacccggtgctgcccagctcaagccagaagctgactttggccgccatggggacatcaggcaaggtctggagacatttttggttggggcagaggcatgctcctggcatcgagtgggtggagaccagagaagccgctcaacatcctgcaatgcatgggacaggccctgcctagaaacaccagctcagcatggcagcagtgcggaggccaggaaaccctgatcgccagtttctaacgccctcaccatttttatttttatttttattttttttgagacagagtttcgctcctgtcacccaggctggagtacaatgatgcgatctcagctcactgcaacctctgcctcccgggttcaagtgattctcctgcctcagcctcccgagtagctgggattacaggcatgcaccaccacgcccagcttattttgtatttttagtagagacggggtttctccgtgttggtcaggctggtctcaaactcctgacctcaggcaatctgcccacctcagcctcccaaagtgctgggattacaggcgtgagccactgcacccggctcaccactagtttttagccctttttgttgggggtggggtgggggcagaggagaggcggatacagaaacttgtgagaatgtgatgaacgctctgaaccccctataaaaaatgtgcatgtaaatatatactctcaacattt

SEQ ID NO: 124281 - DNA, 1944 bp, Homo sapiens
  Payload ID: 4405
  Gene Symbol: COX6B2
  Gene Name: cytochrome c oxidase subunit VIb polypeptide 2 (testis)
  Uniprot ID: Q6YFQ2
  ENST ID: ENST00000588572
  CDS Start-End: 66-332
cccgggaccatcccacagcagatccagtggccgccaacgtcaggctggagttgcctccttcgtggatgttggatgtggaagcccaggagccccccaaggggaaatggtcgacgccgcccttcgacccgcgcttccccagccagaaccagatccgtaactgctaccagaacttcctggactaccaccgctgcctcaagaccaggacccgccgcgggaagagcacgcagccctgcgagtactatttccgcgtgtaccactcgctgtgccccatcagctgggtggagagctggaacgagcagatcaagaacgggattttcgccggcaaaatctgactgccccagcgcggcttcctctgaagatgcagtgatcctgcatctttttgtctcgcggagccccgggtctcggttatccacccctacctcccagtgtctaagccacgaataatgcagccaccagccttcgagttccttgtttcccttgctctggtctccacgtgtatgatggggttctcaggcccaggcttcgaccagaggaccctctgccaccaccgtttcttcctgtccttgagctaccttggtgaactcatgaccccaggcccctgctccaccaggatgtcccccaggtcctgccagctgggaagtgccagcatgaacgcctccaacttcgtggaagccagggtcccctgcagctgagggacgccaagcagacacacctgccctccccagccagctcctgtctgtatgggcgagatgactgagagcgcccacgtccctaaggctgtcctgaccctccatgctgcgacaaggacagggaatggtcggtcactatgggcctggtgtctcccctcccccaccacccggtgctgcccagctcaagccagaagctgactttggccgccatggggacatcaggcaaggtctggagacatttttggttggggcagaggcatgctcctggcatcgagtgggtggagaccagagaagccgctcaacatcctgcaatgcatgggacaggccctgcctagaaacaccagctcagcatggcagcagtgcggaggccaggaaaccctgatcgccagtttctaacgccctcaccatttttatttttatttttattttttttgagacagagtttcgctcctgtcacccaggctggagtacaatgatgcgatctcagctcactgcaacctctgcctcccgggttcaagtgattctcctgcctcagcctcccgagtagctgggattacaggcatgcaccaccacgcccagcttattttgtatttttagtagagacggggtttctccgtgttggtcaggctggtctcaaactcctgacctcaggcaatctgcccacctcagcctcccaaagtgctgggattacaggcgtgagccactgcacccggctcaccactagtttttagccctttttgttgggggtggggtgggggcagaggagaggcggatacagaaacttgtgagaatgtgatgaacgctctgaaccccctataaaaaatgtgcatgtaaatatatactctcaacatttaaaagatttcagaaggttcctggaaattccaatgtccacccatgagtcctcagctgagactccctgctccgctgccctctttgtctaagagctgtggcaacagcacctgaatttcagaaacaaaaggccgggcgcggtggctcacacctgtcatcctagcactttgggaggcagaggcaggaggatcgcttgagctcaggagttcgagactagccttagcaacacagtgagacacaattgctacaaaaagattttaaaattagtttgacggggtggcgtgtgcctatggtcccagctactcaggaggctgaggcaggagaattgcttcaatccaggaggtggaggttgcagtgagccgagatggcgccactgcactccagcctgggccacagaccctgtctc

SEQ ID NO: 124282 - DNA, 479 bp, Homo sapiens
  Payload ID: 4405
  Gene Symbol: COX6B2
  Gene Name: cytochrome c oxidase subunit VIb polypeptide 2 (testis)
  Uniprot ID: Q6YFQ2
  ENST ID: ENST00000589467
  CDS Start-End: 89-355
gcggactcagaagcgagcggcaccccgggaccatcccacagcagatccagtggccgccaacgtcaggctggagttgcctccttcgtggatgttggatgtggaagcccaggagccccccaaggggaaatggtcgacgccgcccttcgacccgcgcttccccagccagaaccagatccgtaactgctaccagaacttcctggactaccaccgctgcctcaagaccaggacccgccgcgggaagagcacgcagccctgcgagtactatttccgcgtgtaccactcgctgtgccccatcagctgggtggagagctggaacgagcagatcaagaacgggattttcgccggcaaaatctgactgccccagcgcggcttcctctgaagatgcagtgatcctgcatctttttgtctcgcggagccccgggtctcggttatccacccctacctcccagtgtctaagccacgaataatggtatgctgtt

SEQ ID NO: 124283 - DNA, 433 bp, Homo sapiens
  Payload ID: 4406
  Gene Symbol: COX6C
  Gene Name: cytochrome c oxidase subunit VIc
  Uniprot ID: P09669
  ENST ID: ENST00000297564
  CDS Start-End: 73-300
agcacggttcgtttttcctttagtcaggaaggacgttggtgttgagcatacgtatcaaggacagtaactaccatggctcccgaagttttgccaaaacctcggatgcgtggccttctggccaggcgtctgcgaaatcatatggctgtagcattcgtgctatccctgggggttgcagctttgtataagtttcgtgtggctgatcaaagaaagaaggcatacgcagatttctacagaaactacgatgtcatgaaagattttgaggagatgaggaaggctggtatctttcagagtgtaaagtaatcttggaatataaagaatttcttcaggttgaattacctagaagtttgtcactgacttgtgttcctgaactatgacacatgaatatgtgggctaagaaatagttcctcttgataaataaacaattaacaaatac

SEQ ID NO: 124284 - DNA, 571 bp, Homo sapiens
  Payload ID: 4406
  Gene Symbol: COX6C
  Gene Name: cytochrome c oxidase subunit VIc
  Uniprot ID: P09669
  ENST ID: ENST00000520271
  CDS Start-End: 212-439
ttgcatccctaccccgacactgcgggttgtcacaacggcaccctcccgctttctctctgcctcggatttagtcgtgactgtgtgtctccgccgtggtgcagcttcaggcctctcccgcatctactctctcacgcttccgctgcggcctgagggagggcggcgggcggaccacggaccggggttagcatacgtatcaaggacagtaactaccatggctcccgaagttttgccaaaacctcggatgcgtggccttctggccaggcgtctgcgaaatcatatggctgtagcattcgtgctatccctgggggttgcagctttgtataagtttcgtgtggctgatcaaagaaagaaggcatacgcagatttctacagaaactacgatgtcatgaaagattttgaggagatgaggaaggctggtatctttcagagtgtaaagtaatcttggaatataaagaatttcttcaggttgaattacctagaagtttgtcactgacttgtgttcctgaactatgacacatgaatatgtgggctaagaaatagttcctcttgataaataaacaattaacaaata

SEQ ID NO: 124285 - DNA, 562 bp, Homo sapiens
  Payload ID: 4406
  Gene Symbol: COX6C
  Gene Name: cytochrome c oxidase subunit VIc
  Uniprot ID: P09669
  ENST ID: ENST00000522934
  CDS Start-End: 100-327
ttctgcgcctgcgcgcggctacagcacggttcgtttttcctttagtcaggaaggacgttggtgttgaggttagcatacgtatcaaggacagtaactaccatggctcccgaagttttgccaaaacctcggatgcgtggccttctggccaggcgtctgcgaaatcatatggctgtagcattcgtgctatccctgggggttgcagctttgtataagtttcgtgtggctgatcaaagaaagaaggcatacgcagatttctacagaaactacgatgtcatgaaagattttgaggagatgaggaaggctggtatctttcagagtgtaaagtaatcttggaatataaagaatttcttcaggttgaattacctagaagtttgtcactgacttgtgttcctgaactatgacacatgaatatgtgggctaagaaatagttcctcttgataaataaacaattaacaaatactttggacactatgatgattctccacagtacctgcctcaaacaaaaatacaagagaaggatcacagttgaagacagttcaacagcaaaagaaatctgcagtct

SEQ ID NO: 124286 - DNA, 1098 bp, Homo sapiens
  Payload ID: 4406
  Gene Symbol: COX6C
  Gene Name: cytochrome c oxidase subunit VIc
  Uniprot ID: P09669
  ENST ID: ENST00000520468
  CDS Start-End: 456-683
actgcatgggatcggtattaatctgtttgtctttttcatcttctgggctgtgagctcctagaagtcagctttttcacttttacccaagccaaacggttattcgcgtaaggttggttataattaaaatgtcggtttgtgcacatggtttgggactctgtgtatgagtacgactaatatcttcaatttactaagaagataaagaggtcgataaataaggaggtcaagcccgttttgcaaggtcacacaggaaagaagcagaccacgaaatgaacttcggctgtcacctgcggtgggcgcactagaggtcttttgaactccttcggctaccgtcgccgcgttctcgctgtgcactcttattctgcgcctgcgcgcggctacagcacggttcgtttttcctttagtcaggaaggacgttggtgttgaggttagcatacgtatcaaggacagtaactaccatggctcccgaagttttgccaaaacctcggatgcgtggccttctggccaggcgtctgcgaaatcatatggctgtagcattcgtgctatccctgggggttgcagctttgtataagtttcgtgtggctgatcaaagaaagaaggcatacgcagatttctacagaaactacgatgtcatgaaagattttgaggagatgaggaaggctggtatctttcagagtgtaaagtaatcttggaatataaagaatttcttcaggttgaattacctagaagtttgtcactgacttgtgttcctgaactatgacacatgaatatgtgggctaagaaatagttcctcttgataaataaacaattaacaaatactttggacagtaagtctttctcagttcttaatgataatgcagggcacttactagcataagaattggtttgggatttaactgtttatgaagctaacttgatttccgtgttttgttaaaatttcattgttctagcacatctttaactgtgatagtttgtccgtttcattgcagttacttggtcttgggctatggattaaaaagtgttcttcatgagcctgtaagactactgtactgtgggctctaagaagagatagaatcctaataaaatctatccttggccttc

SEQ ID NO: 124287 - DNA, 694 bp, Homo sapiens
  Payload ID: 4406
  Gene Symbol: COX6C
  Gene Name: cytochrome c oxidase subunit VIc
  Uniprot ID: P09669
  ENST ID: ENST00000522940
  CDS Start-End: 337-564
tttgcatccctaccccgacactgcgggttgtcacaacggcaccctcccgctttctctctgcctcggatttagtcgtgactgtgtgtctccgccgtggtgcagcttcaggcctctcccgcatctactctctcacgcttccgctgcggcctgagggagggcggcgggcggaccacggaccggggtgggttgcgacggccccaccgaagccgggtgggctgcgggaccctcgagaacccagctggcttcggagtgagctggcccggggctggtacccgctgcgctttttcacagccattgtgaccttggttagcatacgtatcaaggacagtaactaccatggctcccgaagttttgccaaaacctcggatgcgtggccttctggccaggcgtctgcgaaatcatatggctgtagcattcgtgctatccctgggggttgcagctttgtataagtttcgtgtggctgatcaaagaaagaaggcatacgcagatttctacagaaactacgatgtcatgaaagattttgaggagatgaggaaggctggtatctttcagagtgtaaagtaatcttggaatataaagaatttcttcaggttgaattacctagaagtttgtcactgacttgtgttcctgaactatgacacatgaatatgtgggctaagaaatagttcctcttgataaataaacaattaacaaa

SEQ ID NO: 124288 - DNA, 513 bp, Homo sapiens
  Payload ID: 4406
  Gene Symbol: COX6C
  Gene Name: cytochrome c oxidase subunit VIc
  Uniprot ID: P09669
  ENST ID: ENST00000524245
  CDS Start-End: 155-382
gcaggaggggaaggatgggcttcctgcaacctcccttgccccacggcttcccatcctacccccggccgcgttagctgaaggccagcagggacgcaaaagtttttaggccccttaggtctttaggttagcatacgtatcaaggacagtaactaccatggctcccgaagttttgccaaaacctcggatgcgtggccttctggccaggcgtctgcgaaatcatatggctgtagcattcgtgctatccctgggggttgcagctttgtataagtttcgtgtggctgatcaaagaaagaaggcatacgcagatttctacagaaactacgatgtcatgaaagattttgaggagatgaggaaggctggtatctttcagagtgtaaagtaatcttggaatataaagaatttcttcaggttgaattacctagaagtttgtcactgacttgtgttcctgaactatgacacatgaatatgtgggctaagaaatagttcctcttgataaataaacaattaacaaat

SEQ ID NO: 124289 - DNA, 745 bp, Homo sapiens
  Payload ID: 4406
  Gene Symbol: COX6C
  Gene Name: cytochrome c oxidase subunit VIc
  Uniprot ID: P09669
  ENST ID: ENST00000523016
  CDS Start-End: 74-301
cggttcgtttttcctttagtcaggaaggacgttggtgttgaggttagcatacgtatcaaggacagtaactaccatggctcccgaagttttgccaaaacctcggatgcgtggccttctggccaggcgtctgcgaaatcatatggctgtagcattcgtgctatccctgggggttgcagctttgtataagtttcgtgtggctgatcaaagaaagaaggcatacgcagatttctacagaaactacgatgtcatgaaagattttgaggagatgaggaaggctggtatctttcagagtgtaaagtaatcttggaatataaaggtaatatggttatttgaagttacttaaaaaaaaatttctaattgtggtaaaatgcaaatacaggtgactgtccctcacaatgtttagacttaagattttttgactttacgatggtgtggaagtgatacacatttggtagaaaccatactttgaattttgatctttgtccacatgagcaataagtggcacaatacttttgtgatgtgggggagcaccaatgaccacatcccccagtcagaaacataatcacaagggtaaacagctgatgctgtactctgtagtgttgtgtgagatactcagtgttttattataagctaggctttgtgttagatgattttcttcagctgtaggctaacataagtgttctgagcacatttaaggtagggaaggctaagctatgatgtaagttaggtgtattaaatgcatttt

SEQ ID NO: 124290 - DNA, 429 bp, Homo sapiens
  Payload ID: 4406
  Gene Symbol: COX6C
  Gene Name: cytochrome c oxidase subunit VIc
  Uniprot ID: P09669
  ENST ID: ENST00000517682
  CDS Start-End: 70-297
acggttcgtttttcctttagtcaggaaggacgttggtgttgagcatacgtatcaaggacagtaactaccatggctcccgaagttttgccaaaacctcggatgcgtggccttctggccaggcgtctgcgaaatcatatggctgtagcattcgtgctatccctgggggttgcagctttgtataagtttcgtgtggctgatcaaagaaagaaggcatacgcagatttctacagaaactacgatgtcatgaaagattttgaggagatgaggaaggctggtatctttcagagtgtaaagtaatcttggaatataaagaatttcttcaggttgaattacctagaagtttgtcactgacttgtgttcctgaactatgacacatgaatatgtgggctaagaaatagttcctcttgataaataaacaattaacaaata

SEQ ID NO: 124291 - DNA, 724 bp, Homo sapiens
  Payload ID: 4406
  Gene Symbol: COX6C
  Gene Name: cytochrome c oxidase subunit VIc
  Uniprot ID: P09669
  ENST ID: ENST00000518171
  CDS Start-End: 91-318
tgcgcgcggctacagcacggttcgtttttcctttagtcaggaaggacgttggtgttgaggttagcatacgtatcaaggacagtaactaccatggctcccgaagttttgccaaaacctcggatgcgtggccttctggccaggcgtctgcgaaatcatatggctgtagcattcgtgctatccctgggggttgcagctttgtataagtttcgtgtggctgatcaaagaaagaaggcatacgcagatttctacagaaactacgatgtcatgaaagattttgaggagatgaggaaggctggtatctttcagagtgtaaagtaatcttggaatataaagggtctccctctgtcacccaggccgtagtgctgtagtgcgatcatggctcactgcagcctcaacctcccaggctcaagggatcttcctgcctcagcctcccaagaagctggcactataggcatgtgccaccacacctggctaacttctttatttttagtagagacagggtttcaccatattacctgggctgtgcttgaattcctgggctcaggcgatccgtccaccttggcctcccaaagtgttgggattacaggcgtgagccactgtgcctggcataattttggtattttttgatagtagccatcctaataggtatgaggtggtatcattgtggttttgatttgcatttccctgattatttgtgttcttgagcatcttttcatgtacttat

SEQ ID NO: 124292 - DNA, 566 bp, Homo sapiens
  Payload ID: 4406
  Gene Symbol: COX6C
  Gene Name: cytochrome c oxidase subunit VIc
  Uniprot ID: P09669
  ENST ID: ENST00000520517
  CDS Start-End: 101-328
attctgcgcctgcgcgcggctacagcacggttcgtttttcctttagtcaggaaggacgttggtgttgaggttagcatacgtatcaaggacagtaactaccatggctcccgaagttttgccaaaacctcggatgcgtggccttctggccaggcgtctgcgaaatcatatggctgtagcattcgtgctatccctgggggttgcagctttgtataagtttcgtgtggctgatcaaagaaagaaggcatacgcagatttctacagaaactacgatgtcatgaaagattttgaggagatgaggaaggctggtatctttcagagtgtaaagtaatcttggaatataaagaatttcttcaggttgaattacctagaagtttgtcactgacttgtgttcctgaactatgacacatgaatatgtgggctaagaaatagttcctcttgataaataaacaattaacaaatactttggacaccagcccaagaaaaaaggagaaaaatctttcctccacataaatcatctattcaacattaaactcagcactgaaataaaagctctgtttgcctagctc

SEQ ID NO: 124293 - DNA, 762 bp, Homo sapiens
  Payload ID: 4407
  Gene Symbol: COX7A1
  Gene Name: cytochrome c oxidase subunit VIIa polypeptide 1 (muscle)
  Uniprot ID: P24310
  ENST ID: ENST00000292907
  CDS Start-End: 463-702
gttacagatacggaaacaggctcggaggtgcaatctctggctgtgtagacagaacagggagttggaacacggccttatgcgtttcctcactctcacataccagcgggcagggagagatccggggaggagttgcacttgcccccggcggaaatctccaaaaatctgcaaaaatgtattccctggtaccgctttgggctccggtgggaccaagcgaaattccgagaccgaaacggatgcgcgctgcggcccagggtgcgggtctggaccgcctcctccgtggtggacgaatccgaggagcaggactccccgcaacccagccccagccccagccccagccccgccgcgtccccagctgtcacgctgcgcgcagcgggtggggcctggggttcctggacagaggaggactacgcgtgtccttgggcggagaagggaggtgactccggcggaagaggacaaggcagaatgcaggcccttcgggtgtcccaggcgctgatccgctccttcagctccaccgcccggaaccgctttcagaaccgagtgcgcgagaaacagaagctcttccaggaggacaatgacatcccgttgtacctgaagggcggcatcgttgacaacatcctgtaccgagtgacaatgacgctgtgtctgggcggcactgtctacagcttgtactcccttggctgggcctccttccccaggaattaagaccaagaagcctggggggcctgagagacttgaacaagtgtcaataaacgctggcctctg

SEQ ID NO: 124294 - DNA, 211 bp, Homo sapiens
  Payload ID: 4407
  Gene Symbol: COX7A1
  Gene Name: cytochrome c oxidase subunit VIIa polypeptide 1 (muscle)
  ENST ID: ENST00000589154
  CDS Start-End: 30-211
gtgactccggcggaagaggacaaggcagaatgcaggcccttcgggtgtcccaggcgctgatccgctccttcagctccaccgcccggaaccgctttcagaaccgagaggacaatgacatcccgttgtacctgaagggcggcatcgttgacaacatcctgtaccgagtgacaatgacgctgtgtctgggcggcactgtctacagcttgtactc

SEQ ID NO: 124295 - DNA, 407 bp, Homo sapiens
  Payload ID: 4407
  Gene Symbol: COX7A1
  Gene Name: cytochrome c oxidase subunit VIIa polypeptide 1 (muscle)
  ENST ID: ENST00000437291
  CDS Start-End: 276-347
ttaggccccccagaacaaagtccttctgggtcctctcccttccaggaccctctaggcagcccggtcacccccaggccagactccagggcgagtcccctcccaacccagctggcagttcgcgggtgtcccaggcgctgatccgctccttcagctccaccgcccggaaccgctttcagaaccgagtgcgcgagaaacagaagctcttccaggaggacaatgacatcccgttgtacctgaagggcggcatcgttgacaacatcctgtaccgagtgacaatgacgctgtgtctgggcggcactgtctacagcttgtactcccttggctgggcctccttccccaggaattaagaccaagaagcctggggggcctgagagacttgaacaagtgtcaataaacgctggcctctg

SEQ ID NO: 124296 - DNA, 914 bp, Homo sapiens
  Payload ID: 4408
  Gene Symbol: COX7A2
  Gene Name: cytochrome c oxidase subunit VIIa polypeptide 2 (liver)
  ENST ID: ENST00000370081
  CDS Start-End: 312-659
aagtaccttattattccattgtcttaacactgactgacttctctatcttttcttgtgccttgacatctgtcttgagctctagatttttcattattaatctcttgagaaatgaaggttaataatgaattaacctaagttagtaaggcccaagcagcaatcattccacacaagcctgggtttaataaggtcaaaacaggaataatctcacaccaacctgagatttcttacattcctcattactgtgaatggtatagccaaccaccttgaggagcgcaagcctctcttcggcccggaaagatttaagttcgtgaatgcatacgcaagactcggaggtagttccggttccggcgtggccattttcgttggtggtgttcagttgtggcggttgctggtcagtaacagccaagatgctgcggaatctgctggctcttcgtcagattgggcagaggacgataagcactgcttcccgcaggcattttaaaaataaagttccggagaagcaaaaactgttccaggaggatgatgaaattccactgtatctaaagggtggggtagctgatgccctcctgtatagagccaccatgattcttacagttggtggaacagcatatgccatatatgagctggctgtggcttcatttcccaagaagcaggagtgacttcagtcatcccagcaatcgcttggttcagtttcattcagctctctatggaccagtaatctgataaataaccgagctcttctttggggatcaatatttattgacttgtagtaactgccaccaataaagcagtctttaccatgctttgtctgattttatcactttatgccaataatttcaacttttggtcagccttgtaaatcttaggtaaggatcaaagaaatgattcttttgccactaaacttgtgaaagcaa

SEQ ID NO: 124297 - DNA, 773 bp, Homo sapiens
  Payload ID: 4408
  Gene Symbol: COX7A2
  Gene Name: cytochrome c oxidase subunit VIIa polypeptide 2 (liver)
  ENST ID: ENST00000370089
  CDS Start-End: 180-527
cagccttagctccagggaccagcctactgaacatcgaaaaggtcaggaacgagatcacgggactgagacggcgagccggctagagcggatagagccgtactgccgctctagtttttcttttgctctctatggttaggagcgcaagcctctcttcggcccggaaagatttaagttcgtgaatgcatacgcaagactcggaggtagttccggttccggcgtggccattttcgttggtggtgttcagttgtggcggttgctggtcagtaacagccaagatgctgcggaatctgctggctcttcgtcagattgggcagaggacgataagcactgcttcccgcaggcattttaaaaataaagttccggagaagcaaaaactgttccaggaggatgatgaaattccactgtatctaaagggtggggtagctgatgccctcctgtatagagccaccatgattcttacagttggtggaacagcatatgccatatatgagctggctgtggcttcatttcccaagaagcaggagtgacttcagtcatcccagcaatcgcttggttcagtttcattcagctctctatggaccagtaatctgataaataaccgagctcttctttggggatcaatatttattgacttgtagtaactgccaccaataaagcagtctttaccatgctttgtctgattttatcactttatgccaataatttcaacttttggtcagccttgtaaatcttaggtaaggatcaaagaaatgattcttttgccactaaacttg

SEQ ID NO: 124298 - DNA, 366 bp, Homo sapiens
  Payload ID: 4408
  Gene Symbol: COX7A2
  Gene Name: cytochrome c oxidase subunit VIIa polypeptide 2 (liver)
  ENST ID: ENST00000377978
  CDS Start-End: 57-366
ggccattttcgttggtggtgttcagttgtggcggttgctggtcagtaacagccaagatgctgcggaatctgctgtttcacacttgttgcccaggctggagtgcaatggcgcgatctcagctcactgcaacctccgcctcccaggttcaagctattctcctgcctcagcctcccaagtatctgggattacaggctcttcgtcagattgggcagaggacgataagcactgcttcccgcaggcattttaaaaataaagttccggagaagcaaaaactgttccaggaggatgatgaaattccactgtatctaaagggtggggtagctgatgccctcctgtatagagccaccatgattcttacagttggtg

SEQ ID NO: 124299 - DNA, 501 bp, Homo sapiens
  Payload ID: 4408
  Gene Symbol: COX7A2
  Gene Name: cytochrome c oxidase subunit VIIa polypeptide 2 (liver)
  ENST ID: ENST00000459637
  CDS Start-End: 1-203
cattttcgttggtggtgttcagttgtggcggttgctggtcagtaacagccaagatgctgcggaatctgctggctcttcgtcagattgggcagaggacgataagcactgcttcccgcaggcattttaaaaataaagttccggagaagcaaaaactgttccaggtactgaagtattttataggagatgttacttgtaattattagattaccaaaaggaggatgatgaaattccactgtatctaaagggtggggtagctgatgccctcctgtatagagccaccatgattcttacagttggtggaacagcatatgccatatatgagctggctgtggcttcatttcccaagaagcaggagtgacttcagtcatcccagcaatcgcttggttcagtttcattcagctctctatggaccagtaatctgataaataaccgagctcttctttggggatcaatatttattgacttgtagtaactgccaccaataaagcagtctttaccatg

SEQ ID NO: 124300 - DNA, 357 bp, Homo sapiens
  Payload ID: 4408
  Gene Symbol: COX7A2
  Gene Name: cytochrome c oxidase subunit VIIa polypeptide 2 (liver)
  ENST ID: ENST00000460985
  CDS Start-End: 55-216
ccattttcgttggtggtgttcagttgtggcggttgctggtcagtaacagccaagatgctgcggaatctgctggaggatgatgaaattccactgtatctaaagggtggggtagctgatgccctcctgtatagagccaccatgattcttacagttggtggaacagcatatgccatatatgagctggctgtggcttcatttcccaagaagcaggagtgacttcagtcatcccagcaatcgcttggttcagtttcattcagctctctatggaccagtaatctgataaataaccgagctcttctttggggatcaatatttattgacttgtagtaactgccaccaataaagcagtctttacca

SEQ ID NO: 124301 - DNA, 325 bp, Homo sapiens
  Payload ID: 4408
  Gene Symbol: COX7A2
  Gene Name: cytochrome c oxidase subunit VIIa polypeptide 2 (liver)
  ENST ID: ENST00000472311
  CDS Start-End: 52-282
ttttcgttggtggtgttcagttgtggcggttgctggtcagtaacagccaagatgctgcggaatctgctggctcttcgtcagattgggcagaggacgataagcactgcttcccgcaggcattttaaaaataaagttccggagaagcaaaaactgttccaggaacagcatatgccatatatgagctggctgtggcttcatttcccaagaagcaggagtgacttcagtcatcccagcaatcgcttggttcagtttcattcagctctctatggaccagtaatctgataaataaccgagctcttctttggggatcaatatttattgactt

SEQ ID NO: 124302 - DNA, 480 bp, Homo sapiens
  Payload ID: 4408
  Gene Symbol: COX7A2
  Gene Name: cytochrome c oxidase subunit VIIa polypeptide 2 (liver)
  ENST ID: ENST00000509698
  CDS Start-End: 62-337
ggcgtggccattttcgttggtggtgttcagttgtggcggttgctggtcagtaacagccaagatgctgcggaatctgctggctcttcgtcagattgggcagaggacgataagcactgcttcccgcaggcattttaaaaataaagttccggagaagcaaaaactgttccaggaggatgatgaaattccactgtatctaaagggtggggtagctgatgccctcctgtatagagccaccatgattcttacagttggtggtaaggcctttggaatgtttgaaggaacagcatatgccatatatgagctggctgtggcttcatttcccaagaagcaggagtgacttcagtcatcccagcaatcgcttggttcagtttcattcagctctctatggaccagtaatctgataaataaccgagctcttctttggggatcaatatttattgacttgtagtaactgccaccaataaagcagtctttaccatg

SEQ ID NO: 124303 - DNA, 1112 bp, Homo sapiens
  Payload ID: 4409
  Gene Symbol: COX7A2L
  Gene Name: cytochrome c oxidase subunit VIIa polypeptide 2 like
  Uniprot ID: O14548
  ENST ID: ENST00000234301
  CDS Start-End: 56-400
cttctctggggcggtcgcgttggcagcggatgcgggaagccggactctgggcgtcatgtactacaagtttagtggcttcacgcagaagttggcaggagcatgggcttcggaggcctatagcccgcagggattaaagcctgtggtttccacagaagcaccacctatcatatttgccacaccaactaaactgacctccgattccacagtgtatgattatgctgggaaaaacaaagttccagagctacaaaagtttttccagaaagctgatggtgtgcccgtctacctgaaacgaggcctgcctgaccaaatgctttaccggaccaccatggcgctgactgtgggagggaccatctactgcctgatcgccctctacatggcttcgcagcccaaaaacaaatgagttaggctgcagaggactggtttgttttttggcataaaccctttgaagttcctttttcattgttaaattaaaatttttttttttacttggatggcttaacatttttgcaagaaaaataggaagatatgaagatgatgttttggtttgtttatgaaatgcatatggcttgtcagagctcattcgacagttaaagccattgtttaaagaaatggtgctttgctctgtgtttgtgctcctgatttccctggaggttctggatgaaggctgaacacaggcttgttaatgtcagtctgtgctgaggacctcagggacttgaggttgcatttttgagcatggggtgcaggagcctttctggatttggatgtggctatggaaagaacacagaagccaaggtcatgtgcatgaaatgaggagtttgagttagtcacctcggggattttttccattttgcagtaaaatgttaaattaatgtagcctgcctctatttgttgggcaggtaatttcaaagggttatttgcctcatctcctatctttagtgaaatcttatgtgtaattattccaccgtgggaacagagaatacctgtttagtgttgcactttagactggtgtctgttttgttaatgcagctgtgccacaaattctcctttatcttttaaaaatgttatagctttaaattttgatttattttgactgtggaataaatacatgaatg

SEQ ID NO: 124304 - DNA, 3056 bp, Homo sapiens
  Payload ID: 4409
  Gene Symbol: COX7A2L
  Gene Name: cytochrome c oxidase subunit VIIa polypeptide 2 like
  Uniprot ID: O14548
  ENST ID: ENST00000378669
  CDS Start-End: 831-1175
agaatggtaaacacagcagcagagctaccacacacttcccttctgggagcggtggggaaagcagccagggaggtcgggagatggacggaaactgctggggatgtgagaagcctggggcactaactggagttgttattgacttggttgccaggggaagcttggccgacaagtctatactcctgggcagactgagcaacagcaggtggtggcttctggataagaggtgctctaggtcggaaggaaataaatgagactacgatcagttaaagttcggtaaagcaagagacgccttcaacccgacgaccagacggtggctccgcagcacagactctctcggatggtggaattcccaaccggcttcgatgtagccccgcccctacccagaccacgcccaccaatcaccgccctctcccccccaggccccgcctggagcccgcccctcctaaagcatgctccacctgactccgacactgccgggcttagtccgccgggcttagtccgtggagcgcttgcgcatttcttgagttgtcgtggcactgcccaaatctgaatgggggaaagagggaacttcatatttcctacagactccgccacagcgactttgcgtgctctcttagagctggttttgcctttcgtggtcctgagaaccctggcttttggttccccaatgcggcttaagtgtgcaggttttaagttaggcgatcttcgggcagccctagtcccagcaccgggtccttgcgctgagtctcgggaccacagccggggaggcggggtccttctctggggcggtcgcgttggcagcggatgcgggaagccggactctgggcgtcatgtactacaagtttagtggcttcacgcagaagttggcaggagcatgggcttcggaggcctatagcccgcagggattaaagcctgtggtttccacagaagcaccacctatcatatttgccacaccaactaaactgacctccgattccacagtgtatgattatgctgggaaaaacaaagttccagagctacaaaagtttttccagaaagctgatggtgtgcccgtctacctgaaacgaggcctgcctgaccaaatgctttaccggaccaccatggcgctgactgtgggagggaccatctactgcctgatcgccctctacatggcttcgcagcccaaaaacaaatgagttaggctgcagaggactggtttgttttttggcataaaccctttgaagttcctttttcattgttaaattaaaatttttttttttacttggatggcttaacatttttgcaagaaaaataggaagatatgaagatgatgttttggtttgtttatgaaatgcatatggcttgtcagagctcattcgacagttaaagccattgtttaaagaaatggtgctttgctctgtgtttgtgctcctgatttccctggaggttctggatgaaggctgaacacaggcttgttaatgtcagtctgtgctgaggacctcagggacttgaggttgcatttttgagcatggggtgcaggagcctttctggatttggatgtggctatggaaagaacacagaagccaaggtcatgtgcatgaaatgaggagtttgagttagtcacctcggggattttttccattttgcagtaaaatgttaaattaatgtagcctgcctctatttgttgggcaggtaatttcaaagggttatttgcctcatctcctatctttagtgaaatcttatgtgtaattattccaccgtgggaacagagaatacctgtttagtgttgcactttagactggtgtctgttttgttaatgcagctgtgccacaaattctcctttatcttttaaaaatgttatagctttaaattttgatttattttgactgtggaataaatacatgaatgaaaaattttaagtttgaagttctttgaatgacctttcagagtaatttcagaacaccagcagcatcttaaacctgagtctaatttctttcttgttaattaggcaccagataatctttataaaatggttcttaaaagtctagtaataggagtcttaatggcatattgatgattaccacatggttttttataaaaacctgcctgccccttagtgaaaggtacctgtaactcacagttcatttagacactaatttcctttgctgtcatgattggtagacttcacttaccctatattaattttgaaaaaaggtggaattttattatatatgaaggaatagtttgtatcttaccatagcacagaacagtgacctcttgctcaggataagatgtggtgatttgaaaatactcaatagtagccttgcagtgatatctctctctctctctctctgcaaatctaaattttattctctggtatttcctccaagtttttattttgaaaattttcagactacagaaggactaagcatagtacaatatacacctgtatatccttcacttagatcaccagttatcaatatattggcacctttgctttttcttgttctctcacacaggcacacacaatgcatatatgcacacacacatagatctgttttttgttgagtcatttaagattgttagggaattatgataaatcagccatagtactttagcaggtatcttctgagtaaggacatgtgttcctttataaccataatgcagttgtcagactcaataaagttaacatttataacaatactaccatctaatacatagtttactttcagatttccccaggtgttctaataatgagttcttcatagttgtgtttttaaaaaataacagctttattgggatataatttacatactgtacagttcacctcaagtgtacaattcattggtttttactgtatttggagttgtacagccaccatgagaatcaattttagaacacttatatcaccctaaaaagaaaccccatacccattagcaatcacttgccttccctcccaccatcccaactcccacctcctagcccaaagcaagcactcatctactttcagtctctatggatttgtctttcctggacatttcatataaatataatcatatgatgtgtgatgtacgtga

SEQ ID NO: 124305 - DNA, 895 bp, Homo sapiens
  Payload ID: 4409
  Gene Symbol: COX7A2L
  Gene Name: cytochrome c oxidase subunit VIIa polypeptide 2 like
  ENST ID: ENST00000464443
  CDS Start-End: 32-151
agcggatgcgggaagccggactctgggcgtcatgtactacaagtttagtggcttcacgcagaagttggcaggagcatgggcttcggaggcctatagcccgcaggtacgagtggcgcctggccagctcggacatgagaagtggcggccctagcctcggcgacaggcagtcgcggcgttggagccaggggaggcttctgcccgcggtcgagttcgtctctgttctccttgcacctcccggggcctctccacaccagcggattaaagcctgtggtttccacagaagcaccacctatcatatttgccacaccaactaaactgacctccgattccacagtgtatgattatgctgggaaaaacaaagttccagagctacaaaagtttttccagaaagctgatggtgtgcccgtctacctgaaacgaggcctgcctgaccaaatgctttaccggaccaccatggcgctgactgtgggagggaccatctactgcctgatcgccctctacatggcttcgcagcccaaaaacaaatgagttaggctgcagaggactggtttgttttttggcataaaccctttgaagttcctttttcattgttaaattaaaatttttttttttacttggatggcttaacatttttgcaagaaaaataggaagatatgaagatgatgttttggtttgtttatgaaatgcatatggcttgtcagagctcattcgacagttaaagccattgtttaaagaaatggtgctttgctctgtgtttgtgctcctgatttccctggaggttctggatgaaggctgaacacaggcttgttaatgtcagtctgtgctgaggacctcagggacttgaggttgcatttttgagcatggggtgcaggagcctttctggatttggatgtgg

SEQ ID NO: 124306 - DNA, 516 bp, Homo sapiens
  Payload ID: 4409
  Gene Symbol: COX7A2L
  Gene Name: cytochrome c oxidase subunit VIIa polypeptide 2 like
  ENST ID: ENST00000468711
  CDS Start-End: 1-288
tttagtggcttcacgcagaagttggcaggagcatgggcttcggaggcctatagcccgcagggattaaagcctgtggtttccacagaagcaccacctatcatatttgccacaccaactaaactgacctccgattccacagtgtatgattatgctgggaaaaacaaagttccagagctacaaaagtttttccaggaaacatacctacagaccattctgtttctgtggctgctggagactccagtcgtgggcatcttggacaaagggacttttccagcagggcttcagtgatggtgatacagatgtgcggcactgctgtgtcgtggactcacctcgtcccagactgaggaccaagactgacacagactctcttctgtttcccttatctcctttccaaagtaagtctgtgaatctaccctggtcctttccttctatgtctaatgaatgtctttctcctagtgtagtggaggaagtacaaattttgaagttctagaacataaagtctcagcatggccatga

SEQ ID NO: 124307 - DNA, 540 bp, Homo sapiens
  Payload ID: 4409
  Gene Symbol: COX7A2L
  Gene Name: cytochrome c oxidase subunit VIIa polypeptide 2 like
  ENST ID: ENST00000463055
  CDS Start-End: 12-251
ctctgggcgtcatgtactacaagtttagtggcttcacgcagaagttggcaggagcatgggcttcggaggcctatagcccgcagggattaaagcctgtggtttccacagaagcaccacctatcatatttgccacaccaactaaactgacctccgattccacagtgtatgattatgctgggaaaaacaaagttccagagctacaaaagtttttccaggtgagggaagatactctacaacagaaaagcctgtgaaataaataggcttaaaaaatcccttatgaaactaaatcttaatctagtttactacccaccctccttctttttctttaagtagtattctcttgattttagtttgagccataaacgaatagaactttatataggtagatactgataaaagaggggagggtggttaatttcctcattagtatttaagggtgtgagggttttgaaatggcatgaatagctcttgatcatttattgcatggaagaagcaatagcctcaataactgagtagcctgtataactgaatgacccaata

SEQ ID NO: 124308 - DNA, 2471 bp, Homo sapiens
  Payload ID: 4410
  Gene Symbol: COX7B
  Gene Name: cytochrome c oxidase subunit VIIb
  Uniprot ID: P24311
  ENST ID: ENST00000481445
  CDS Start-End: 117-359
tcattacggatcccggctgaaagccattttgtttttcagctcacttcaagggtacctgaagcgaattggcaccaaagcagcagctgtattgccgcagttctagcttcaccttcacgatgtttcccttggtcaaaagcgcactaaatcgtctccaagttcgaagcattcagcaaacaatggcaaggcagagccaccagaaacgtacacctgattttcatgacaaatacggtaatgctgtattagctagtggagccactttctgtattgttacatggacatatgtagcaacacaagtcggaatagaatggaacctgtcccctgttggcagagttaccccaaaggaatggaggaatcagtaatcatcccagctggtgtaataatgaattgtttaaaaaacagctcataattgatgccaaattaaagcactgtgtacccattaagatatggcattattgaagaaataaagtacatttgaaaccttcattgtaggttttgtttctttgtaaatgaaactaagcttgatcactttagcctttatgttaatattaaagtcaaatgctgtgcagcttcttaaataggtttttttttttttttttttttttttttgggacgaagtctcactttgtcccccaggctggagtgcagtggcaccatctcagctcactgcgacctctgcctcctgagttcaagtgattctcctgtctcagcctcccgagtagccagaactacaggcacatgccatgacgcccagctaattttttttttttttgagacggagtctcactctgttgcccaggctggaatgcaatggcgtgatctcggctcctgcaacctccgcctcccgggttcaagcgattctcctgtctcagccttccaagtagctgggattacaggtgcacgccaccaggcccggctaatttttgtatttttagtagagacggggtttcaccatgttggtcaggctggtctcgagctcctgatctcgtgatccacccaccttggtctcccaaagtgctgggattacaggtgtgagccaccgtgcccggcaatttttgtatttttagtagagacagggtttcaccatattggtcaggctggtttcaaactcacgacctcaggtgatccgcctgccttggcctcccaaagtggtaggattacaggcgtgagccacggcacccagcccttaaatggcttttatgaggtaatgtgaaaggaaaatttgcctttgacctggaagtcaactttatagtaagctgaaattataaataactgatcatggaactattgcagatcacctttgagccaaaaatttggcctggattttggttatgcctactactatgtgcctctcatttgtatttatacctggaattggcattattaactccttttcactcctgcctagaaaacttaaagtgtcaccagacccaagggcggagtggtcctataaaacaaactcgtagcctgtctgaagactagctactagctccttggctgttttggcatattcatcttgattatagctcttggtctttcatcatattagggatgtttatgatgttattaaagaaaatcttgtcaaatgcagtctgttcctagttatctactatcagtcacctgttgtataattataacaatgtttggatttgtggattattattttagtatataacattggattttatgtatgttacctgaagaagagcaatatctgtaccacatatttctttgtttttcttttttgagatgaagtctcactctgttgcccaggctggagtgcagtggtgtgatcttgacacactgcaacctttgcctcccggattcaagtgattctcctgtctcagcctccctagtaactggaattacaggcgcctgccaccatgcctggctaatttttgtatttttagtagagatggggtttcaccatgttggccaacctggtcttgaactcctgacctcaggcgatccacccacctcagcctcccaaagtgctaggcttacaggcatgagacaccgcgcccggcttatatatcattactttcttggctgagagctgtagtctgtggtagttgttttgttttgttttttgttttttttttgtagttttcttgatcgtgatcaattaagcagaaagtagaatttcagtcaggtaacctgtctatattagctaaattatcttttgcttattacatagagtgctagaagtatgctgtcatggcatatgtcctagtttctcatcaaatggaccaaagtcagtgattttatttgaagaggaaaaattgaacgtcattgtaaattaagttgcaagtttagtaaccatattgtaccactgtttgataaatttgaacgctttatggtatttcatatttagaatgttcaaaatagtactgaagtattcaaatacatacaaccctgagcgatattgaagtaaaataaacatgtatttaaggaagtgtcaaccttcaattata

SEQ ID NO: 124309 - DNA, 542 bp, Homo sapiens
  Payload ID: 4411
  Gene Symbol: COX7B2
  Gene Name: cytochrome c oxidase subunit VIIb2
  Uniprot ID: Q8TF08
  ENST ID: ENST00000355591
  CDS Start-End: 177-422
ggctgtaaaacggaaaggttcggaatttgcctctgcgccgtctttttttgcctgttacctgtgacgtccttggaagcagaatctgaaactttctgaggagagcatttgagcttcagatttctaacagcctctttgcaacaaaatagaccagtagctgaaggcaactgcaatccttcatgatgtttcccttggccagaaatgcactaagcagtctcaagattcaaagcattctgcaaagcatggcaagacatagccatgtaaaacactcaccagattttcatgataaatatggtaatgctgtgctagccagtggaactgctttctgtgttgctacatgggtgtttacagccactcagattggaatagaatggaacctatcccctgttggcagagttaccccaaaagagtggaaacatcagtaaccatcacagttgctgtaatgacagaattgtttaaaaaaccaacttgtcatgtaagcactctactgcttattaaaatatagcacaattgaaaaaataaaatgtgttttaaatctttaaaaa

SEQ ID NO: 124310 - DNA, 617 bp, Homo sapiens
  Payload ID: 4411
  Gene Symbol: COX7B2
  Gene Name: cytochrome c oxidase subunit VIIb2
  Uniprot ID: Q8TF08
  ENST ID: ENST00000396533
  CDS Start-End: 252-497
atttgcctctgcgccgtctttttttgcctgttacctgtgacgtccttgaaaatgaaaagctttcttaagacaataggacgggccgggcgcggtggctcatgcctgtaatcctaacactctgggaggccgaggttggcggatcacgaggaagcagaatctgaaactttctgaggagagcatttgagcttcagatttctaacagcctctttgcaacaaaatagaccagtagctgaaggcaactgcaatccttcatgatgtttcccttggccagaaatgcactaagcagtctcaagattcaaagcattctgcaaagcatggcaagacatagccatgtaaaacactcaccagattttcatgataaatatggtaatgctgtgctagccagtggaactgctttctgtgttgctacatgggtgtttacagccactcagattggaatagaatggaacctatcccctgttggcagagttaccccaaaagagtggaaacatcagtaaccatcacagttgctgtaatgacagaattgtttaaaaaaccaacttgtcatgtaagcactctactgcttattaaaatatagcacaattgaaaaaataaaatgtgttttaaatctttaaaaa

SEQ ID NO: 124311 - DNA, 417 bp, Homo sapiens
  Payload ID: 4411
  Gene Symbol: COX7B2
  Gene Name: cytochrome c oxidase subunit VIIb2
  ENST ID: ENST00000505102
  CDS Start-End: 320-417
tccaggctgtaaaacggaaaggttcggaatttgcctctgcgccgtctttttttgcctgttacctgtgacgtccttgatgattattcttttggctctttacaatgtagctaggaaaaatttgtctttgatgtgatataatatctgaatccctggaggaactacagtcatgcatcgctgaacagcaaggatatatgttctgaaaaatgcatcattaggaagcagaatctgaaactttctgaggagagcatttgagcttcagatttctaacagcctctttgcaacaaaatagaccagtagctgaaggcaactgcaatccttcatgatgtttcccttggccagaaatgcactaagcagtctcaagattcaaagcattctgcaaagcatggcaagacatagccatgtaaaacactcaccaga

SEQ ID NO: 124312 - DNA, 587 bp, Homo sapiens
  Payload ID: 4411
  Gene Symbol: COX7B2
  Gene Name: cytochrome c oxidase subunit VIIb2
  ENST ID: ENST00000543208
  CDS Start-End: 230-472
ctttttttctattcttgttttagaaaatgaaaagctttcttaagacaataggacgggccgggcgcggtggctcatgcctgtaatcctaacactctgggaggccgaggttggcggatcacgaggaagcagaatctgaaactttctgaggagagcatttgagcttcagatttctaacagcctctttgcaacaaaatagaccagtagctgaaggcaactgcaatccttcatgatgtttcccttggccagaaatgcactaagcagtctcaagattcaaagcattctgcaaagcatggcaagacatagccatgtaaaacactcaccagattttcatgataaatatggtaatgctgtgctagccagtggaactgctttctgtgttgctacatgggtgtttacagccactcagattggaatagaatggaacctatcccctgttggcagagttaccccaaaagagtggaaacatcagtaaccatcacagttgctgtaatgacagaattgtttaaaaaaccaacttgtcatgtaagcactctactgcttattaaaatatagcacaattgaaaaaataaaatgtgttttaaatcttt

SEQ ID NO: 124313 - DNA, 666 bp, Homo sapiens
  Payload ID: 4412
  Gene Symbol: COX7C
  Gene Name: cytochrome c oxidase subunit VIIc
  Uniprot ID: P15954
  ENST ID: ENST00000247655
  CDS Start-End: 153-344
cgcgtttcctcaaggctccgccccatttcccatctttcttttcagtccttgcgcaccggggaacaaggtcgtgaaaaaaaaggtcttggtgaggtgccgccatttcatctgtcctcattctctgcgcctttcgcagagcttccagcagcggtatgttgggccagagcatccggaggttcacaacctctgtggtccgtaggagccactatgaggagggccctgggaagaatttgccattttcagtggaaaacaagtggtcgttactagctaagatgtgtttgtactttggatctgcatttgctacacccttccttgtagtaagacaccaactgcttaaaacataaggatgtttcagttcctccatttaacagatatgaagagcattttaagaggtgcagcctctggaagtggatcaaactagaactcatatgccatactagatatgtttgtcaataaacttatgacgtgaatgcttaatgcctcttttttgaaatagggaatgtaataattggccatttgcctactttattatttgggtaacattccagtattactctctgtgatttagcttatttaatggtgttaaactgaggttatattaaatttttgattcccaggtcaggattttgttggtaatttatataataaaagggaaatacaaatcga

SEQ ID NO: 124314 - DNA, 347 bp, Homo sapiens
  Payload ID: 4412
  Gene Symbol: COX7C
  Gene Name: cytochrome c oxidase subunit VIIc
  ENST ID: ENST00000515763
  CDS Start-End: 84-254
cgtgaaaaaaaaggtcttggtgaggtgccgccatttcatctgtcctcattctctgcgcctttcgcagagcttccagcagcggtatgttgggccagagcatccggaggttcacaacctctgtggtccgtaggagccactatgaggagggccctgggaagaatttgccattttcagtggaaaacaagtggtcgttactagctaagatgtgtttgtactttggatctgcatttgctacacccttccttgtaatatgaagagcattttaagaggtgcagcctctggaagtggatcaaactagaactcatatgccatactagatatgtttgtcaataaacttatgacgtgaa

SEQ ID NO: 124315 - DNA, 1584 bp, Homo sapiens
  Payload ID: 4412
  Gene Symbol: COX7C
  Gene Name: cytochrome c oxidase subunit VIIc
  Uniprot ID: P15954
  ENST ID: ENST00000509578
  CDS Start-End: 101-292
gcaccggggaacaaggtcgtgaaaaaaaaggtcttggtgaggtgccgccatttcatctgtcctcattctctgcgcctttcgcagagcttccagcagcggtatgttgggccagagcatccggaggttcacaacctctgtggtccgtaggagccactatgaggagggccctgggaagaatttgccattttcagtggaaaacaagtggtcgttactagctaagatgtgtttgtactttggatctgcatttgctacacccttccttgtagtaagacaccaactgcttaaaacataaggatgtttcagttcctccatttaacaggtagttagtggatttctaatcatgttaaagcaggcctttttattaagtagcctcttccccatcacccagaacacacacacaaatacattgttgtgtagggctgattcctgaggttatgtgtagatgtggcattggtggagactagttgtaaacctatataaaaatatttcaataatggccagtgtttattgaatactactgcttatcaggtacactttacatcgatatctcatgttctctagcaagcttgtgaggcggatgatagtaaccccatctgagacacagagatgttaagttgttcaacatctcataactagtataatggtggaccaggactcttgcccaggcagtttcttgttgcagaactcacacttttaaccaggtaaaactgataaactgattaatgttactctatcttgaacactgttactagaacagtagctgagaatgtgtcttttaaaacactataaacatttccatttcttttagaaagtggtcactgtgctcctagtttttaaattggcttacaatacttgtttaagttgtgaaaaatccctgaagataaaacccttctagtgctccttgatacataagtcccagataattatgcaattgtaaatctgtgcctcaccaactcagccatgttgggaaactcaaacttttaaatatactttcctcattaaggcagtggttcttaaatgaggatgattttacaacacaatggggcatttggcaatgtgagacatttttgatcgttccaacttgggggcaaaattaccagtggtgctgaggttgagaagccttgtgtcaaggggatatgttaatatatgctcaaaggagtcgttcatattggaaggttagcagatttgctgtgtgtggataaaatatttagcttaattgtcatcagagtttctcagagtaatactatagaacactaggatgattggaaagagtgtcatagtttagagggggaataacttatccaagctactaatgcggaaaggttgcggtgcatgtgatgaagcaaatcagtatgaatgaattcatgatactgtaaacgctttctgatgtactactcaaactgatagaaaatattttcatgaaactacatgatttctgttaaatgaatgggatttttaaaatgccattaatttctgtttttattttgcagatatgaagagcattttaagaggtgcagcctctggaagtggatcaaactagaactcatatgccatactagatatgtttgtcaataaacttatgac

SEQ ID NO: 124316 - DNA, 507 bp, Homo sapiens
  Payload ID: 4413
  Gene Symbol: COX8A
  Gene Name: cytochrome c oxidase subunit VIIIA (ubiquitous)
  Uniprot ID: P10176
  ENST ID: ENST00000314133
  CDS Start-End: 75-284
ggccagcgcagccattttggcttcctgaccttgggctacggctgaccgttttttgtggtgtactccgtgccatcatgtccgtcctgacgccgctgctgctgcggggcttgacaggctcggcccggcggctcccagtgccgcgcgccaagatccattcgttgccgccggaggggaagcttgggatcatggaattggccgttgggcttacctcctgcttcgtgaccttcctcctgccagcgggctggatcctgtcacacctggagacctacaggaggccagagtgaaggggtccgttctgtccctcacactgtgacctgaccagccccaccggcccatcctggtcatgttactgcatttgtggccggcctcccctggatcatgtcattcaattccagtcacctcttctgcaatcatgacctcttgatgtctccatggtgacctccttgggggtcactgaccctgcttggtggggtcccccttgtaacaataaaatctatttaaacttta

SEQ ID NO: 124317 - DNA, 533 bp, Homo sapiens
  Payload ID: 4414
  Gene Symbol: COX8C
  Gene Name: cytochrome c oxidase subunit VIIIC
  Uniprot ID: Q7Z4L0
  ENST ID: ENST00000342144
  CDS Start-End: 79-297
acgagcactggagcttgcgttacttggcctcacctcacctgtgctgtccacgcctggctttgtctcacctgacgcgatatgcctctcctgcgtgggcgctgtcctgcccgccgccactaccgccgcttggccctgctcggcctgcagcccgctccccgcttcgcccactcggggcccccgcgccagcggcccctgtctgccgcggaaatggctgttggacttgtggtgttttttacgaccttcttaacaccagctgcatatgtgctaggcaacctgaagcagttcagaaggaattagatggaagatgatgttgaacagctgttaacgtccaaaaaactttcagaaaaagctgtgtttttgttaacgagcaaaattgcctagttgagttgatgcaaccattgtggtattcactttcctcatgtttatgatgaatattttgcacttttttagtactgtgcattatatagatgtatagtcaaaaatgttctgcttaagtgttaaataaaacggaaacacttattcgtgcttggtaa

SEQ ID NO: 124318 - DNA, 533 bp, Homo sapiens; identical to SEQ ID NO: 124317
  Payload ID: 4414
  Gene Symbol: COX8C
  Gene Name: cytochrome c oxidase subunit VIIIC
  Uniprot ID: Q7Z4L0
  ENST ID: ENST00000620478
  CDS Start-End: 79-297

SEQ ID NO: 124319 - DNA, 4098 bp, Homo sapiens
  Payload ID: 4415
  Gene Symbol: CYCS
  Gene Name: cytochrome c, somatic
  Uniprot ID: P99999
  ENST ID: ENST00000305786
  CDS Start-End: 171-488
gtagccgccagctcggccgcacgtcagggcgcgggagcgcggagcgagtttggttgcacttacaccggtacttaagcgcggaccggcgtgtccttggacttagagagtggggacgtccggcttcggagcgggagtgttcgttgtgccagcgactaaaaagagaattaaatatgggtgatgttgagaaaggcaagaagatttttattatgaagtgttcccagtgccacaccgttgaaaagggaggcaagcacaagactgggccaaatctccatggtctctttgggcggaagacaggtcaggcccctggatactcttacacagccgccaataagaacaaaggcatcatctggggagaggatacactgatggagtatttggagaatcccaagaagtacatccctggaacaaaaatgatctttgtcggcattaagaagaaggaagaaagggcagacttaatagcttatctcaaaaaagctactaatgagtaataattggccactgccttatttattacaaaacagaaatgtctcatgacttttttatgtgtaccatcctttaatagatctcatacaccagaattcagatcatgaatgactgacagaatattttgttgggcagtcctgatttaaaactaagactggcttgtggttaaatgaatatgttcagtttttgaattttaatagtaactccaattcagtaaatggtatcactgtttaccccttttaaagatatgattagacttcgttagtaatgttcaacttttcacaaagatggtgagtgccatcttaaaacttactggagattggttttatatttagatttatataactggttatgtgaatatatttaaatactggggaaattgcttcactgtcttagaaccaagcaagattcacctgtgttttgtgttcatgttcatttgcctcttaaaggcaagggttgaagataaataaggtagcaatgtctatagttttggccttaactatgccaatctaattataattccctgtatttaaaatggtttcttttacttattgaaaggcattttagtgtggtttatgtgtaatattaaagattattcaacacctctcacatcttacagatctataaggtcacatgcttttaaaatagtagcaagttaaacttcactcttgaattctttacaatctaagtcaaactaagttataatttaggattgtctttaaacagccattcagaaacaaaactgtagaactgtgtatttgattgggaatggtgcttttgccaacttaaaaggattaaagtaacggagatatacacaaattttaaaattatgtgtgatcacaagactaaagataattaaaaagaaaaccacagatcatgactttttgactgtgcttgatttcatgactgatgcacaaattttaatgattaaaaagtgcaggagccctaaatgtcagtgcagcagccctaaatgtcagtgcagcagtgttaaccagtcatggtgctagattgtttacttggttttctaggactgcctcaactagaataacacttcactaattgactcttagtttctttgctcagattgagaactgcagcatttatgccagacatggacagaggaatgcctgtggtcatagttttgtgatgtgtaacagtgtataattacatactgaattatttcatgcatagtctgtgccatacacatttagagtagtccttggagattttatggagatggtgagcacaaggtaagtcataaagaataatgagaaaataaatctatgctggtgcagctgagaactgtatctttgtgggacagtgagaagactgagaagatgtgaatccatggtctcaaaggtgatagggacgattagataggtgttttaaggcctgaaagcaatttataacatatgagtcttatttttatttatagaaatgtggaaagcttgctgtaattcatatttgaagtcctagtctgagttctggtggggaatttaaaaatgcatcctggaaatcctttaaagatttcagactttgaaaggccttgtagcagaggacttggtgactgtataaagttagtggtattcagggacagtgtagcaagtagcttacaaggggacaattctggactaatgagaaagacctgaagtgaaggctagagagttgattttttttttttttggcatcctggaaatgatacaggaaacatattaagatagatacagaaatgtgttcaaccttccatcttggctagttgtggcgtttagtttgttttttgagacatggtcacgctgtgtcgccaaggctggagtgcagtggtgcgatctcggctggctgcaacctctatttcccaggctcaagcgattctctcacttcagcttcccaagtagctgggactacaggtgttcgccaccatgcccagctaatttttttgtagagatggagttttgccatgtggtcccaggctggtctcaaactcctgagctcaagcaatccgtccacttgccttggctccccaaagtgctgggattacaggcgtgagccaccaggccctgcctggttttcaaattcagaaatcttattatttaacccagaagtaatcagcccagtagtaacttaggtttaattttttttcaggtttaaaatttttctcatttattttttctgagacggagtttcgcccttttcgcccaggctgagtacagtggtgcaatctcactgcaacctccgccttccagttgcaagtgattctcctgcctcagcctcctgagtagctgggattacaggcacccgccaccacgcctggctaatttttgtatttttagtggagatggtgtttcaccatgttggccagactggtcttggactcctgacctcgtgatccacccaccttggcctcccaaagttctaggattacaggtgtgagccaccacgtccggccaatttttctcatttctatgcctcctatattaaggtctgtgttggcacagatgagtaactgccatgttctaggtcagttatacccaagcacttctggtggtttaaaatgtgattctgtaacttttttatttttatttttttgagataatttcactcttgttgcccaggctggagtgcaatggcgtgatcgctgctcaccgcaacctccgccttccaggttcaagcgattctcctgactcagcctctcaagtagctgggattacaagcatgcgccaccatgcccagcttattttgtgtttttagtagagacagggtttctccatgctggacaggctggtcttgaactcccgacgtcaggtgatctacctgcctcggcctcccaaagtgctgggattacaggcgtgagccaccacgcctggccaattatgtaattttttaaaaaggacatttctatcagggatatataccttcagaaataaggaaataggggaaaaaaagagcactataaaccacatgttttcatttctagtgcttcgctgtaagtggctaggttggtagaatcaaaaacaagggccagatgtatttaaggggtattcagatgccacctacatgcttattttgtctagaacagtgctgtctaatagaactttctgtgacgatggatattttgtagacttttgctgtccagtgtggtagccactaaccacatgtggctgttaagcccttgaaatatagctagtgtgactagaaagtattttattttaaatttacataggcacaagtggctagtggctactgtattgacattctgggtctaggactagaaccagtggtctgtaacaaaagtactttctctttactctattaaatctagaattagccgggcatggtcgctcatgcctgtaatcccagcactttgggaggccaaggcaggcagatcacttgaggtcaggcgtttgagaccagcctggtcaacatggcgaaaccctgtctctacaaaaaacataaaaattagccaggtgtggtggtgggcacctgtaatctcagctacttgggaggctgaggcacaagaatcacttgaacttgggaggtggaggttgcagtgagccaagattgtgccactgcactcaagcctgggtgacgagtgaaactgtctccaaaaaaaaaaaaaaa

SEQ ID NO: 124320 - DNA, 974 bp, Homo sapiens
  Payload ID: 4415
  Gene Symbol: CYCS
  Gene Name: cytochrome c, somatic
  Uniprot ID: P99999
  ENST ID: ENST00000409409
  CDS Start-End: 263-580
acgtccggcttcggagcgggagtgttcgttgtgccagcgactaaaaagaggtgagagcgggtcgcggaggccgcacctggttagaggcagagctgtgggaggcgcgcacttgcgagcgaccgaaacccaagcggggagcattcgagtggagcccgcgctgggtgggagggcggggagtgaagaccctggactgtggtcagaccgagctgggcgagtaacggcttgaggtgcggcggagccctaactagggacagaattaaatatgggtgatgttgagaaaggcaagaagatttttattatgaagtgttcccagtgccacaccgttgaaaagggaggcaagcacaagactgggccaaatctccatggtctctttgggcggaagacaggtcaggcccctggatactcttacacagccgccaataagaacaaaggcatcatctggggagaggatacactgatggagtatttggagaatcccaagaagtacatccctggaacaaaaatgatctttgtcggcattaagaagaaggaagaaagggcagacttaatagcttatctcaaaaaagctactaatgagtaataattggccactgccttatttattacaaaacagaaatgtctcatgacttttttatgtgtaccatcctttaatagatctcatacaccagaattcagatcatgaatgactgacagaatattttgttgggcagtcctgatttaaaactaagactggcttgtggttaaatgaatatgttcagtttttgaattttaatagtaactccaattcagtaaatggtatcactgtttaccccttttaaagatatgattagacttcgttagtaatgttcaacttttcacaaagatggtgagtgccatcttaaaacttactggagattggttttatatttagatttatataactggttatgtgaatatatttaaatactggggaaattgcttcactgtcttagaac

SEQ ID NO: 124321 - DNA, 799 bp, Homo sapiens
  Payload ID: 4415
  Gene Symbol: CYCS
  Gene Name: cytochrome c, somatic
  Uniprot ID: P99999
  ENST ID: ENST00000409764
  CDS Start-End: 225-542
agagagtggggacgtccggcttcggagcgggagtgttcgttgtgccagcgactaaaaagagagggcaaaagctgttgctcttctaataaggggccagttcttttcgtgggcacatgtttcttccgtcagtcgttctgacatcctagaaggagtttcatcaatcaccttgaaaccgacctggacgggtgacctcgtggtcgccccaggagatcacagaattaaatatgggtgatgttgagaaaggcaagaagatttttattatgaagtgttcccagtgccacaccgttgaaaagggaggcaagcacaagactgggccaaatctccatggtctctttgggcggaagacaggtcaggcccctggatactcttacacagccgccaataagaacaaaggcatcatctggggagaggatacactgatggagtatttggagaatcccaagaagtacatccctggaacaaaaatgatctttgtcggcattaagaagaaggaagaaagggcagacttaatagcttatctcaaaaaagctactaatgagtaataattggccactgccttatttattacaaaacagaaatgtctcatgacttttttatgtgtaccatcctttaatagatctcatacaccagaattcagatcatgaatgactgacagaatattttgttgggcagtcctgatttaaaactaagactggcttgtggttaaatgaatatgttcagtttttgaattttaatagtaactccaattcagtaaatggtatcactgtttaccccttttaaagatatgattagacttcgt

SEQ ID NO: 124322 - DNA, 498 bp, Homo sapiens
  Payload ID: 4415
  Gene Symbol: CYCS
  Gene Name: cytochrome c, somatic
  ENST ID: ENST00000413447
  CDS Start-End: 196-498
agagagtggggacgtccggcttcggagcgggagtgttcgttgtgccagcgactaaaaagaggggccagttcttttcgtgggcacatgtttcttccgtcagtcgttctgacatcctagaaggagtttcatcaatcaccttgaaaccgacctggacgggtgacctcgtggtcgccccaggagatcacagaattaaatatgggtgatgttgagaaaggcaagaagatttttattatgaagtgttcccagtgccacaccgttgaaaagggaggcaagcacaagactgggccaaatctccatggtctctttgggcggaagacaggtcaggcccctggatactcttacacagccgccaataagaacaaaggcatcatctggggagaggatacactgatggagtatttggagaatcccaagaagtacatccctggaacaaaaatgatctttgtcggcattaagaagaaggaagaaagggcagacttaatagcttatctcaaaaaa

SEQ ID NO: 124323 - DNA, 1240 bp, Homo sapiens
  Payload ID: 4416
  Gene Symbol: CYC1
  Gene Name: cytochrome c-1
  Uniprot ID: P08574
  ENST ID: ENST00000318911
  CDS Start-End: 74-1051
gctttcgcgaggttttgactctcgtggcgccccaggggccgacgggagtggcggccgcgcggaggaggccaagatggcggcagctgcggcttcgcttcgcggggtagtgttgggcccgcggggcgcggggctcccgggcgcgcgtgcccggggtctgctgtgcagcgcgcgtcccgggcagctcccgctacggacacctcaggcagtggccttgtcgtcgaagtctggcctttcccgaggccggaaagtgatgctgtcagcgctgggcatgctggcggcagggggtgcggggctggccatggctctgcattcggctgtgagtgccagtgacctggagctgcacccccccagctatccgtggtctcaccgtggcctcctctcttccttggaccacaccagcatccggaggggtttccaggtatataagcaggtgtgcgcctcctgccacagcatggacttcgtggcctaccgccacctggtgggcgtgtgctacacggaggatgaagctaaggagctggctgcggaggtggaggttcaagacggccccaatgaagatggggagatgttcatgcggccagggaagctgttcgactatttcccaaaaccataccccaacagtgaggctgctcgagctgccaacaacggagcattgccccctgacctcagctacatcgtgcgagctaggcatggtggtgaggactacgtcttctccctgctcacgggctactgcgagccacccaccggggtgtcactgcgggaaggtctctacttcaacccctactttcctggccaggccattgccatggcccctcccatctacacagatgtcttagagtttgacgatggcaccccagctaccatgtcccagatagccaaggatgtgtgcaccttcctgcgctgggcatctgagccagagcacgaccatcgaaaacgcatggggctcaagatgttgatgatgatggctctgctggtgcccctggtctacaccataaagcggcacaagtggtcagtcctgaagagtcggaagctggcatatcggccgcccaagtgaccctgtccagtgtctgcttgccatcctgccagaacaggccctcaagcccaagagccatcccaggcctgttcaggcctcagctaagcctctcttcatctggaagaagaggcaagggggcaggagaccaggctctagctctgggccctccttcagcccccatcatgggaataaattaattttctcaatgta

SEQ ID NO: 124324 - DNA, 2685 bp, Homo sapiens
  Payload ID: 4417
  Gene Symbol: CYP1A1
  Gene Name: cytochrome P450, family 1, subfamily A, polypeptide 1
  Uniprot ID: P04798
  ENST ID: ENST00000379727
  CDS Start-End: 200-1738
atctcagctcgctccagggaaggaggcgtggccacacgtacaagcccgcctataaaggtggcagtgccttcaccctcaccctgaaggtgacagttccttggaaccttccctgatccttgtgatcccaggctccaagagtccacccttcccagctcagctcagtacctcagcagccacctccaagatccctacactgatcatgcttttcccaatctccatgtcggccacggagtttcttctggcctctgtcatcttctgtctggtattctgggtaatcagggcctcaagacctcaggtccccaaaggcctgaagaatccaccagggccatggggctggcctctgattgggcacatgctgaccctgggaaagaacccgcacctggcactgtcaaggatgagccagcagtatggggacgtgctgcagatccgaattggctccacacccgtggtggtgctgagcggcctggacaccatccggcaggccctggtgcggcagggcgatgatttcaagggccggcccgacctctacaccttcaccctcatcagtaatggtcagagcatgtccttcagcccagactctggaccagtgtgggctgcccgccggcgcctggcccagaatggcctgaaaagtttctccattgcctctgacccagcctcctcaacctcctgctacctggaagagcatgtgagcaaggaggctgaggtcctgataagcacgttgcaggagctgatggcagggcctgggcactttaacccctacaggtatgtggtggtatcagtgaccaatgtcatctgtgccatttgctttggccggcgctatgaccacaaccaccaagaactgcttagcctagtcaacctgaataataatttcggggaggtggttggctctggaaacccagctgacttcatccctattcttcgctacctacccaacccttccctgaatgccttcaaggacctgaatgagaagttctacagcttcatgcagaagatggtcaaggagcactacaaaacctttgagaagggccacatccgggacatcacagacagcctgattgagcactgtcaggagaagcagctggatgagaacgccaatgtccagctgtcagatgagaagatcattaacatcgtcttggacctctttggagctgggtttgacacagtcacaactgctatctcctggagcctcatgtatttggtgatgaaccccagggtacagagaaagatccaagaggagctagacacagtgattggcaggtcacggcggccccggctctctgacagatcccatctgccctatatggaggccttcatcctggagaccttccgacactcttccttcgtccccttcaccatcccccacagcacaacaagagacacaagtttgaaaggcttttacatccccaaggggcgttgtgtctttgtaaaccagtggcagatcaaccatgaccagaagctatgggtcaacccatctgagttcctacctgaacggtttctcacccctgatggtgctatcgacaaggtgttaagtgagaaggtgattatctttggcatgggcaagcggaagtgtatcggtgagaccattgcccgctgggaggtctttctcttcctggctatcctgctgcaacgggtggaattcagcgtgccactgggcgtgaaggtggacatgacccccatctatgggctaaccatgaagcatgcctgctgtgagcacttccaaatgcagctgcgctcttaggtgcttgagagccctgaggcctagactctgtctacctggtctggttgggcagccagaccagcaggctggcctatgtggtctaaggttcagcctgaaactcatagacactgatctggctgcagttttgctatctgggctgtgggcaagcctaagggatcctgcctgcccctaccctggacttgcctctgcacaccctccagagacaacaggtaaaacagggccacatagatgctgatggagccttcccaagttgtgcttgagccaggaggcctgctagggttaggaggtccttaggcctctgagaagctctgaagaactctctggaagcccctgggcccagtacctagctggctctgtgagggtgctgactggcttcagcaagttagaactagccaaaccaggaccctgtccaatctttgacaattgggagctgccaagagtgaagggaagagacagcccaggatactggcacagaggtagtctcactgcttgaactaggctgagcaatctgaccctatgggtctaggacacagttcctgggaacatcacattcctctgcccttcctgcaggcaggaacaaacagggctgccttctggccttgtaagacccttattgctgtcctggaggggctggggacttgtgtctgcggggatcagagcgcacagggagtgcacatatccaggcaccaggactagggctggagtgaggggggggtatttcaattaccttctattggtctcccttctctacactcttgtaataaaatgtctatttttaatgtttgtacacaacaatccttctattctagcctgcattgagcttgcatgcttgcataagagcttaagaaccattgatttaatgtaatagggaaaattctaacccaggtatccaaaaatgtgtaagaacaactacctgagctaaataaagatattgttcagaaatccta

SEQ ID NO: 124325 - DNA, 2608 bp, Homo sapiens
  Payload ID: 4417
  Gene Symbol: CYP1A1
  Gene Name: cytochrome P450, family 1, subfamily A, polypeptide 1
  Uniprot ID: P04798
  ENST ID: ENST00000395048
  CDS Start-End: 123-1661
ctcaccctgaaggtgacagttccttggaaccttccctgatccttgtgatcccaggctccaagagtccacccttcccagctcagctcagtacctcagccacctccaagatccctacactgatcatgcttttcccaatctccatgtcggccacggagtttcttctggcctctgtcatcttctgtctggtattctgggtaatcagggcctcaagacctcaggtccccaaaggcctgaagaatccaccagggccatggggctggcctctgattgggcacatgctgaccctgggaaagaacccgcacctggcactgtcaaggatgagccagcagtatggggacgtgctgcagatccgaattggctccacacccgtggtggtgctgagcggcctggacaccatccggcaggccctggtgcggcagggcgatgatttcaagggccggcccgacctctacaccttcaccctcatcagtaatggtcagagcatgtccttcagcccagactctggaccagtgtgggctgcccgccggcgcctggcccagaatggcctgaaaagtttctccattgcctctgacccagcctcctcaacctcctgctacctggaagagcatgtgagcaaggaggctgaggtcctgataagcacgttgcaggagctgatggcagggcctgggcactttaacccctacaggtatgtggtggtatcagtgaccaatgtcatctgtgccatttgctttggccggcgctatgaccacaaccaccaagaactgcttagcctagtcaacctgaataataatttcggggaggtggttggctctggaaacccagctgacttcatccctattcttcgctacctacccaacccttccctgaatgccttcaaggacctgaatgagaagttctacagcttcatgcagaagatggtcaaggagcactacaaaacctttgagaagggccacatccgggacatcacagacagcctgattgagcactgtcaggagaagcagctggatgagaacgccaatgtccagctgtcagatgagaagatcattaacatcgtcttggacctctttggagctgggtttgacacagtcacaactgctatctcctggagcctcatgtatttggtgatgaaccccagggtacagagaaagatccaagaggagctagacacagtgattggcaggtcacggcggccccggctctctgacagatcccatctgccctatatggaggccttcatcctggagaccttccgacactcttccttcgtccccttcaccatcccccacagcacaacaagagacacaagtttgaaaggcttttacatccccaaggggcgttgtgtctttgtaaaccagtggcagatcaaccatgaccagaagctatgggtcaacccatctgagttcctacctgaacggtttctcacccctgatggtgctatcgacaaggtgttaagtgagaaggtgattatctttggcatgggcaagcggaagtgtatcggtgagaccattgcccgctgggaggtctttctcttcctggctatcctgctgcaacgggtggaattcagcgtgccactgggcgtgaaggtggacatgacccccatctatgggctaaccatgaagcatgcctgctgtgagcacttccaaatgcagctgcgctcttaggtgcttgagagccctgaggcctagactctgtctacctggtctggttgggcagccagaccagcaggctggcctatgtggtctaaggttcagcctgaaactcatagacactgatctggctgcagttttgctatctgggctgtgggcaagcctaagggatcctgcctgcccctaccctggacttgcctctgcacaccctccagagacaacaggtaaaacagggccacatagatgctgatggagccttcccaagttgtgcttgagccaggaggcctgctagggttaggaggtccttaggcctctgagaagctctgaagaactctctggaagcccctgggcccagtacctagctggctctgtgagggtgctgactggcttcagcaagttagaactagccaaaccaggaccctgtccaatctttgacaattgggagctgccaagagtgaagggaagagacagcccaggatactggcacagaggtagtctcactgcttgaactaggctgagcaatctgaccctatgggtctaggacacagttcctgggaacatcacattcctctgcccttcctgcaggcaggaacaaacagggctgccttctggccttgtaagacccttattgctgtcctggaggggctggggacttgtgtctgcggggatcagagcgcacagggagtgcacatatccaggcaccaggactagggctggagtgaggggggggtatttcaattaccttctattggtctcccttctctacactcttgtaataaaatgtctatttttaatgtttgtacacaacaatccttctattctagcctgcattgagcttgcatgcttgcataagagcttaagaaccattgatttaatgtaatagggaaaattctaacccaggtatccaaaaatgtgtaagaacaactacctgagctaaataaagatattgttcagaaatccta

SEQ ID NO: 124326 - DNA, 1594 bp, Homo sapiens
  Payload ID: 4417
  Gene Symbol: CYP1A1
  Gene Name: cytochrome P450, family 1, subfamily A, polypeptide 1
  ENST ID: ENST00000395049
  CDS Start-End: 84-1535
ttgtgatcccaggctccaagagtccacccttcccagctcagctcagtacctcagcagccacctccaagatccctacactgatcatgcttttcccaatctccatgtcggccacggagtttcttctggcctctgtcatcttctgtctggtattctgggtaatcagggcctcaagacctcaggtccccaaaggcctgaagaatccaccagggccatggggctggcctctgattgggcacatgctgaccctgggaaagaacccgcacctggcactgtcaaggatgagccagcagtatggggacgtgctgcagatccgaattggctccacacccgtggtggtgctgagcggcctggacaccatccggcaggccctggtgcggcagggcgatgatttcaagggccggcccgacctctacaccttcaccctcatcagtaatggtcagagcatgtccttcagcccagactctggaccagtgtgggctgcccgccggcgcctggcccagaatggcctgaaaagtttctccattgcctctgacccagcctcctcaacctcctgctacctggaagagcatgtgagcaaggaggctgaggtcctgataagcacgttgcaggagctgatggcagggcctgggcactttaacccctacaggtatgtggtggtatcagtgaccaatgtcatctgtgccatttgctttggccggcgctatgaccacaaccaccaagaactgcttagcctagtcaacctgaataataatttcggggaggtggttggctctggaaacccagctgacttcatccctattcttcgctacctacccaacccttccctgaatgccttcaaggacctgaatgagaagttctacagcttcatgcagaagatggtcaaggagcactacaaaacctttgagaagggccacatccgggacatcacagacagcctgattgagcactgtcaggagaagcagctggatgagaacgccaatgtccagctgtcagatgagaagatcattaacatcgtcttggacctctttggagctgggtttgacacagtcacaactgctatctcctggagcctcatgtatttggtgatgaaccccagggtacagagaaagatccaagaggagctagacacagtgattggcaggtcacggcggccccggctctctgacagatcccatctgccctatatggaggccttcatcctggagaccttccgacactcttccttcgtccccttcaccatcccccacaggaagctatgggtcaacccatctgagttcctacctgaacggtttctcacccctgatggtgctatcgacaaggtgttaagtgagaaggtgattatctttggcatgggcaagcggaagtgtatcggtgagaccattgcccgctgggaggtctttctcttcctggctatcctgctgcaacgggtggaattcagcgtgccactgggcgtgaaggtggacatgacccccatctatgggctaaccatgaagcatgcctgctgtgagcacttccaaatgcagctgcgctcttaggtgcttgagagccctgaggcctagactctgtctacctggtctggttgggcagccagacc

SEQ ID NO: 124327 - DNA, 1544 bp, Homo sapiens
  Payload ID: 4417
  Gene Symbol: CYP1A1
  Gene Name: cytochrome P450, family 1, subfamily A, polypeptide 1
  Uniprot ID: P04798
  ENST ID: ENST00000569630
  CDS Start-End: 78-647
tgatcccaggctccaagagtccacccttcccagctcagctcagtacctcagccacctccaagatccctacactgatcatgcttttcccaatctccatgtcggccacggagtttcttctggcctctgtcatcttctgtctggtattctgggtaatcagggcctcaagacctcaggtccccaaaggcctgaagaatccaccagggccatggggctggcctctgattgggcacatgctgaccctgggaaagaacccgcacctggcactgtcaaggatgagccagcagtatggggacgtgctgcagatccgaattggctccacacccgtggtggtgctgagcggcctggacaccatccggcaggccctggtgcggcagggcgatgatttcaagggccggcccgacctctacaccttcaccctcatcagtaatggtcagagcatgtccttcagcccagactctggaccagtgtgggctgcccgccggcgcctggcccagaatggcctgaaaagtttctccattgcctctgacccagcctcctcaacctcctgctacctggaagagcatgtgagcaaggaggctgaggtcctgataagcacgttgcaggagctgatggcagggcctgggcactttaacccctacaggacctgaatgagaagttctacagcttcatgcagaagatggtcaaggagcactacaaaacctttgagaagacagcaatagccactgaagagtcattacatgcaggaccctggggcagttgctgagggagccaggaagagttaaagagttcatctcctggcctcataatagaaagaagataaagagcacatccagatgataacagtacaagacgctgtgtgtcaaatgtcccatgagttggggctagcagcattctaaggtagtaggagagagccttgcagaggcagagagaagctgggacaacagcctcagggggcatcacctccagaacaaatgtgctaggaatagtgaaggaccagacctggatggagaggtagctctgggtttgagatcttgctcacctgtggactttccctacctaagggccacatccgggacatcacagacagcctgattgagcactgtcaggagaagcagctggatgagaacgccaatgtccagctgtcagatgagaagatcattaacatcgtcttggacctctttggagctgggtttgacacagtcacaactgctatctcctggagcctcatgtatttggtgatgaaccccagggtacagagaaagatccaagaggagctagacacagtgattggcaggtcacggcggccccggctctctgacagatcccatctgccctatatggaggccttcatcctggagaccttccgacactcttccttcgtccccttcaccatcccccacagcacaacaagagacacaagtttgaaaggcttttacatccccaaggggcgttgtgtctttgtaaaccagtggcagatcaaccatgaccagaagctatgggtcaacccatctgagttcctacctgaacggtttctcacccctgat

SEQ ID NO: 124328 - DNA, 1192 bp, Homo sapiens
  Payload ID: 4417
  Gene Symbol: CYP1A1
  Gene Name: cytochrome P450, family 1, subfamily A, polypeptide 1
  Uniprot ID: P04798
  ENST ID: ENST00000562201
  CDS Start-End: 78-647
tgatcccaggctccaagagtccacccttcccagctcagctcagtacctcagccacctccaagatccctacactgatcatgcttttcccaatctccatgtcggccacggagtttcttctggcctctgtcatcttctgtctggtattctgggtaatcagggcctcaagacctcaggtccccaaaggcctgaagaatccaccagggccatggggctggcctctgattgggcacatgctgaccctgggaaagaacccgcacctggcactgtcaaggatgagccagcagtatggggacgtgctgcagatccgaattggctccacacccgtggtggtgctgagcggcctggacaccatccggcaggccctggtgcggcagggcgatgatttcaagggccggcccgacctctacaccttcaccctcatcagtaatggtcagagcatgtccttcagcccagactctggaccagtgtgggctgcccgccggcgcctggcccagaatggcctgaaaagtttctccattgcctctgacccagcctcctcaacctcctgctacctggaagagcatgtgagcaaggaggctgaggtcctgataagcacgttgcaggagctgatggcagggcctgggcactttaacccctacaggacctgaatgagaagttctacagcttcatgcagaagatggtcaaggagcactacaaaacctttgagaagggccacatccgggacatcacagacagcctgattgagcactgtcaggagaagcagctggatgagaacgccaatgtccagctgtcagatgagaagatcattaacatcgtcttggacctctttggagctgggtttgacacagtcacaactgctatctcctggagcctcatgtatttggtgatgaaccccagggtacagagaaagatccaagaggagctagacacagtgattggcaggtcacggcggccccggctctctgacagatcccatctgccctatatggaggccttcatcctggagaccttccgacactcttccttcgtccccttcaccatcccccacagcacaacaagagacacaagtttgaaaggcttttacatccccaaggggcgttgtgtctttgtaaaccagtggcagatcaaccatgaccagaagctatgggtcaacccatctgagttcctacctgaacggtttctcacccctgat

SEQ ID NO: 124329 - DNA, 796 bp, Homo sapiens
  Payload ID: 4417
  Gene Symbol: CYP1A1
  Gene Name: cytochrome P450, family 1, subfamily A, polypeptide 1
  ENST ID: ENST00000566503
  CDS Start-End: 272-796
tgatcccaggctccaagagtccacccttcccagctcagctcagtacctcaggtatgtggtggtatcagtgaccaatgtcatctgtgccatttgctttggccggcgctatgaccacaaccaccaagaactgcttagcctagtcaacctgaataataatttcggggaggtggttggctctggaaacccagctgacttcatccctattcttcgctacctacccaacccttccctgaatgccttcaaggacctgaatgagaagttctacagcttcatgcagaagatggtcaaggagcactacaaaacctttgagaagggccacatccgggacatcacagacagcctgattgagcactgtcaggagaagcagctggatgagaacgccaatgtccagctgtcagatgagaagatcattaacatcgtcttggacctctttggagctgggtttgacacagtcacaactgctatctcctggagcctcatgtatttggtgatgaaccccagggtacagagaaagatccaagaggagctagacacagtgattggcaggtcacggcggccccggctctctgacagatcccatctgccctatatggaggccttcatcctggagaccttccgacactcttccttcgtccccttcaccatcccccacagcacaacaagagacacaagtttgaaaggcttttacatccccaaggggcgttgtgtctttgtaaaccagtggcagatcaaccatgaccagaagctatgggtcaacccatctgagttcctacctgaacggtttctcacccctgat

SEQ ID NO: 124330 - DNA, 2107 bp, Homo sapiens
  Payload ID: 4417
  Gene Symbol: CYP1A1
  Gene Name: cytochrome P450, family 1, subfamily A, polypeptide 1
  Uniprot ID: P04798
  ENST ID: ENST00000567032
  CDS Start-End: 236-1774
cttcttaggtagctacctgtctagcacctccaaaaagggaggctcagagtgtttttagtgaccaggcagtctagccccctagtggggaaactgaggccaggggaagaggaggacttgcccatggtcccacagctggtaccagacctctagatacagatggcatctcattcaggacttcaggacccaggctccagctccatcccctacagccacctccaagatccctacactgatcatgcttttcccaatctccatgtcggccacggagtttcttctggcctctgtcatcttctgtctggtattctgggtaatcagggcctcaagacctcaggtccccaaaggcctgaagaatccaccagggccatggggctggcctctgattgggcacatgctgaccctgggaaagaacccgcacctggcactgtcaaggatgagccagcagtatggggacgtgctgcagatccgaattggctccacacccgtggtggtgctgagcggcctggacaccatccggcaggccctggtgcggcagggcgatgatttcaagggccggcccgacctctacaccttcaccctcatcagtaatggtcagagcatgtccttcagcccagactctggaccagtgtgggctgcccgccggcgcctggcccagaatggcctgaaaagtttctccattgcctctgacccagcctcctcaacctcctgctacctggaagagcatgtgagcaaggaggctgaggtcctgataagcacgttgcaggagctgatggcagggcctgggcactttaacccctacaggtatgtggtggtatcagtgaccaatgtcatctgtgccatttgctttggccggcgctatgaccacaaccaccaagaactgcttagcctagtcaacctgaataataatttcggggaggtggttggctctggaaacccagctgacttcatccctattcttcgctacctacccaacccttccctgaatgccttcaaggacctgaatgagaagttctacagcttcatgcagaagatggtcaaggagcactacaaaacctttgagaagggccacatccgggacatcacagacagcctgattgagcactgtcaggagaagcagctggatgagaacgccaatgtccagctgtcagatgagaagatcattaacatcgtcttggacctctttggagctgggtttgacacagtcacaactgctatctcctggagcctcatgtatttggtgatgaaccccagggtacagagaaagatccaagaggagctagacacagtgattggcaggtcacggcggccccggctctctgacagatcccatctgccctatatggaggccttcatcctggagaccttccgacactcttccttcgtccccttcaccatcccccacagcacaacaagagacacaagtttgaaaggcttttacatccccaaggggcgttgtgtctttgtaaaccagtggcagatcaaccatgaccagaagctatgggtcaacccatctgagttcctacctgaacggtttctcacccctgatggtgctatcgacaaggtgttaagtgagaaggtgattatctttggcatgggcaagcggaagtgtatcggtgagaccattgcccgctgggaggtctttctcttcctggctatcctgctgcaacgggtggaattcagcgtgccactgggcgtgaaggtggacatgacccccatctatgggctaaccatgaagcatgcctgctgtgagcacttccaaatgcagctgcgctcttaggtgcttgagagccctgaggcctagactctgtctacctggtctggttgggcagccagaccagcaggctggcctatgtggtctaaggttcagcctgaaactcatagacactgatctggctgcagttttgctatctgggctgtgggcaagcctaagggatcctgcctgcccctaccctggacttgcctctgcacaccctccagagacaacaggtaaaacagggccacatagatgctgatggagccttcccaagttgtgcttgagccaggaggcctgctagggttaggaggtccttaggcctctgagaagctctgaagaactctctggaagcccctg

SEQ ID NO: 124331 - DNA, 988 bp, Homo sapiens
  Payload ID: 4417
  Gene Symbol: CYP1A1
  Gene Name: cytochrome P450, family 1, subfamily A, polypeptide 1
  Uniprot ID: P04798
  ENST ID: ENST00000564596
  CDS Start-End: 272-745
tgatcccaggctccaagagtccacccttcccagctcagctcagtacctcaggtatgtggtggtatcagtgaccaatgtcatctgtgccatttgctttggccggcgctatgaccacaaccaccaagaactgcttagcctagtcaacctgaataataatttcggggaggtggttggctctggaaacccagctgacttcatccctattcttcgctacctacccaacccttccctgaatgccttcaaggacctgaatgagaagttctacagcttcatgcagaagatggtcaaggagcactacaaaacctttgagaagggccacatccgggacatcacagacagcctgattgagcactgtcaggagaagcagctggatgagaacgccaatgtccagctgtcagatgagaagatcattaacatcgtcttggacctctttggagctgggtttgacacagtcacaactgctatctcctggagcctcatgtatttggtgatgaaccccagggtacagagaaagatccaagaggagctagacacagtgattggcaggtcacggcggccccggctctctgacagatcccatctgccctatatggaggccttcatcctggagaccttccgacactcttccttcgtccccttcaccatcccccacagcacaacaagagacacaagtttgaaaggcttttacatccccaaggggcgttgtgtctttgtaaaccagtggcagatcaaccatgaccagtaagttcagagatgcagaggaaaggctgggtccaccctcttaagctcttatatatgattaatacaatcattgcattgatcctcctgtccatgggctgcttgcctgtcctctatcctttggggctggagctccactcacttgacacttctgagccctgaactgccacttcagctgtctccctctggttacaggaagctatgggtcaacccatctgagttcctacctgaacggtttctcacccctgat

SEQ ID NO: 124332 - DNA, 2402 bp, Homo sapiens
  Payload ID: 4417
  Gene Symbol: CYP1A1
  Gene Name: cytochrome P450, family 1, subfamily A, polypeptide 1
  ENST ID: ENST00000612821
  CDS Start-End: 1-1455
atgcttttcccaatctccatgtcggccacggagtttcttctggcctctgtcatcttctgtctggtattctgggtaatcagggcctcaagacctcaggtccccaaaggcctgaagaatccaccagggccatggggctggcctctgattgggcacatgctgaccctgggaaagaacccgcacctggcactgtcaaggatgagccagcagtatggggacgtgctgcagatccgaattggctccacacccgtggtggtgctgagcggcctggacaccatccggcaggccctggtgcggcagggcgatgatttcaagggccggcccgacctctacaccttcaccctcatcagtaatggtcagagcatgtccttcagcccagactctggaccagtgtgggctgcccgccggcgcctggcccagaatggcctgaaaagtttctccattgcctctgacccagcctcctcaacctcctgctacctggaagagcatgtgagcaaggaggctgaggtcctgataagcacgttgcaggagctgatggcagggcctgggcactttaacccctacaggtatgtggtggtatcagtgaccaatgtcatctgtgccatttgctttggccggcgctatgaccacaaccaccaagaactgcttagcctagtcaacctgaatgccttcaaggacctgaatgagaagttctacagcttcatgcagaagatggtcaaggagcactacaaaacctttgagaagggccacatccgggacatcacagacagcctgattgagcactgtcaggagaagcagctggatgagaacgccaatgtccagctgtcagatgagaagatcattaacatcgtcttggacctctttggagctgggtttgacacagtcacaactgctatctcctggagcctcatgtatttggtgatgaaccccagggtacagagaaagatccaagaggagctagacacagtgattggcaggtcacggcggccccggctctctgacagatcccatctgccctatatggaggccttcatcctggagaccttccgacactcttccttcgtccccttcaccatcccccacagcacaacaagagacacaagtttgaaaggcttttacatccccaaggggcgttgtgtctttgtaaaccagtggcagatcaaccatgaccagaagctatgggtcaacccatctgagttcctacctgaacggtttctcacccctgatggtgctatcgacaaggtgttaagtgagaaggtgattatctttggcatgggcaagcggaagtgtatcggtgagaccattgcccgctgggaggtctttctcttcctggctatcctgctgcaacgggtggaattcagcgtgccactgggcgtgaaggtggacatgacccccatctatgggctaaccatgaagcatgcctgctgtgagcacttccaaatgcagctgcgctcttaggtgcttgagagccctgaggcctagactctgtctacctggtctggttgggcagccagaccagcaggctggcctatgtggtctaaggttcagcctgaaactcatagacactgatctggctgcagttttgctatctgggctgtgggcaagcctaagggatcctgcctgcccctaccctggacttgcctctgcacaccctccagagacaacaggtaaaacagggccacatagatgctgatggagccttcccaagttgtgcttgagccaggaggcctgctagggttaggaggtccttaggcctctgagaagctctgaagaactctctggaagcccctgggcccagtacctagctggctctgtgagggtgctgactggcttcagcaagttagaactagccaaaccaggaccctgtccaatctttgacaattgggagctgccaagagtgaagggaagagacagcccaggatactggcacagaggtagtctcactgcttgaactaggctgagcaatctgaccctatgggtctaggacacagttcctgggaacatcacattcctctgcccttcctgcaggcaggaacaaacagggctgccttctggccttgtaagacccttattgctgtcctggaggggctggggacttgtgtctgcggggatcagagcgcacagggagtgcacatatccaggcaccaggactagggctggagtgaggggggggtatttcaattaccttctattggtctcccttctctacactcttgtaataaaatgtctatttttaatgtttgtacacaacaatccttctattctagcctgcattgagcttgcatgcttgcataagagcttaagaaccattgatttaatgtaatagggaaaattctaacccaggtatccaaaaatgtgtaagaacaactacctgagctaaataaagatattgttcagaaatccta

SEQ ID NO: 124333 - DNA, 2521 bp, Homo sapiens
  Payload ID: 4417
  Gene Symbol: CYP1A1
  Gene Name: cytochrome P450, family 1, subfamily A, polypeptide 1
  ENST ID: ENST00000617691
  CDS Start-End: 123-1574
ctcaccctgaaggtgacagttccttggaaccttccctgatccttgtgatcccaggctccaagagtccacccttcccagctcagctcagtacctcagccacctccaagatccctacactgatcatgcttttcccaatctccatgtcggccacggagtttcttctggcctctgtcatcttctgtctggtattctgggtaatcagggcctcaagacctcaggtccccaaaggcctgaagaatccaccagggccatggggctggcctctgattgggcacatgctgaccctgggaaagaacccgcacctggcactgtcaaggatgagccagcagtatggggacgtgctgcagatccgaattggctccacacccgtggtggtgctgagcggcctggacaccatccggcaggccctggtgcggcagggcgatgatttcaagggccggcccgacctctacaccttcaccctcatcagtaatggtcagagcatgtccttcagcccagactctggaccagtgtgggctgcccgccggcgcctggcccagaatggcctgaaaagtttctccattgcctctgacccagcctcctcaacctcctgctacctggaagagcatgtgagcaaggaggctgaggtcctgataagcacgttgcaggagctgatggcagggcctgggcactttaacccctacaggtatgtggtggtatcagtgaccaatgtcatctgtgccatttgctttggccggcgctatgaccacaaccaccaagaactgcttagcctagtcaacctgaataataatttcggggaggtggttggctctggaaacccagctgacttcatccctattcttcgctacctacccaacccttccctgaatgccttcaaggacctgaatgagaagttctacagcttcatgcagaagatggtcaaggagcactacaaaacctttgagaagggccacatccgggacatcacagacagcctgattgagcactgtcaggagaagcagctggatgagaacgccaatgtccagctgtcagatgagaagatcattaacatcgtcttggacctctttggagctgggtttgacacagtcacaactgctatctcctggagcctcatgtatttggtgatgaaccccagggtacagagaaagatccaagaggagctagacacagtgattggcaggtcacggcggccccggctctctgacagatcccatctgccctatatggaggccttcatcctggagaccttccgacactcttccttcgtccccttcaccatcccccacaggaagctatgggtcaacccatctgagttcctacctgaacggtttctcacccctgatggtgctatcgacaaggtgttaagtgagaaggtgattatctttggcatgggcaagcggaagtgtatcggtgagaccattgcccgctgggaggtctttctcttcctggctatcctgctgcaacgggtggaattcagcgtgccactgggcgtgaaggtggacatgacccccatctatgggctaaccatgaagcatgcctgctgtgagcacttccaaatgcagctgcgctcttaggtgcttgagagccctgaggcctagactctgtctacctggtctggttgggcagccagaccagcaggctggcctatgtggtctaaggttcagcctgaaactcatagacactgatctggctgcagttttgctatctgggctgtgggcaagcctaagggatcctgcctgcccctaccctggacttgcctctgcacaccctccagagacaacaggtaaaacagggccacatagatgctgatggagccttcccaagttgtgcttgagccaggaggcctgctagggttaggaggtccttaggcctctgagaagctctgaagaactctctggaagcccctgggcccagtacctagctggctctgtgagggtgctgactggcttcagcaagttagaactagccaaaccaggaccctgtccaatctttgacaattgggagctgccaagagtgaagggaagagacagcccaggatactggcacagaggtagtctcactgcttgaactaggctgagcaatctgaccctatgggtctaggacacagttcctgggaacatcacattcctctgcccttcctgcaggcaggaacaaacagggctgccttctggccttgtaagacccttattgctgtcctggaggggctggggacttgtgtctgcggggatcagagcgcacagggagtgcacatatccaggcaccaggactagggctggagtgaggggggggtatttcaattaccttctattggtctcccttctctacactcttgtaataaaatgtctatttttaatgtttgtacacaacaatccttctattctagcctgcattgagcttgcatgcttgcataagagcttaagaaccattgatttaatgtaatagggaaaattctaacccaggtatccaaaaatgtgtaagaacaactacctgagctaaataaagatattgttcagaaatccta

SEQ ID NO: 124334 - DNA, 2728 bp, Homo sapiens
  Payload ID: 4418
  Gene Symbol: CYP1A2
  Gene Name: cytochrome P450, family 1, subfamily A, polypeptide 2
  Uniprot ID: P05177
  ENST ID: ENST00000343932
  CDS Start-End: 64-1614
aagctccacaccagccattacaaccctgccaatctcaagcacctgcctctacagttggtacagatggcattgtcccagtctgttcccttctcggccacagagcttctcctggcctctgccatcttctgcctggtattctgggtgctcaagggtttgaggcctcgggtccccaaaggcctgaaaagtccaccagagccatggggctggcccttgctcgggcatgtgctgaccctggggaagaacccgcacctggcactgtcaaggatgagccagcgctacggggacgtcctgcagatccgcattggctccacgcccgtgctggtgctgagccgcctggacaccatccggcaggccctggtgcggcagggcgacgatttcaagggccggcctgacctctacacctccaccctcatcactgatggccagagcttgaccttcagcacagactctggaccggtgtgggctgcccgccggcgcctggcccagaatgccctcaacaccttctccatcgcctctgacccagcttcctcatcctcctgctacctggaggagcatgtgagcaaggaggctaaggccctgatcagcaggttgcaggagctgatggcagggcctgggcacttcgacccttacaatcaggtggtggtgtcagtggccaacgtcattggtgccatgtgcttcggacagcacttccctgagagtagcgatgagatgctcagcctcgtgaagaacactcatgagttcgtggagactgcctcctccgggaaccccctggacttcttccccatccttcgctacctgcctaaccctgccctgcagaggttcaaggccttcaaccagaggttcctgtggttcctgcagaaaacagtccaggagcactatcaggactttgacaagaacagtgtccgggacatcacgggtgccctgttcaagcacagcaagaaggggcctagagccagcggcaacctcatcccacaggagaagattgtcaaccttgtcaatgacatctttggagcaggatttgacacagtcaccacagccatctcctggagcctcatgtaccttgtgaccaagcctgagatacagaggaagatccagaaggagctggacactgtgattggcagggagcggcggccccggctctctgacagaccccagctgccctacttggaggccttcatcctggagaccttccgacactcctccttcttgcccttcaccatcccccacagcacaacaagggacacaacgctgaatggcttctacatccccaagaaatgctgtgtcttcgtaaaccagtggcaggtcaaccatgacccagagctgtgggaggacccctctgagttccggcctgagcggttcctcaccgccgatggcactgccattaacaagcccttgagtgagaagatgatgctgtttggcatgggcaagcgccggtgtatcggggaagtcctggccaagtgggagatcttcctcttcctggccatcctgctacagcaactggagttcagcgtgccgccgggcgtgaaagtcgacctgacccccatctacgggctgaccatgaagcacgcccgctgtgaacatgtccaggcgcggctgcgcttctccatcaattgaagaagacaccaccattctgaggccagggagcgagtgggggccagccacggggactcagcccttgtttctcttcctttctttttttaaaaaatagcagctttagccaagtgcagggcctgtaatcccagcattttaggaggccaaggttggaggatcatttgagcccaggaattggaaagcagcctggccaacatagtgggaccctgtctctacaaaaaaaaaatttgccaagagcctgagtgacagagcaagaccccatctcaaaaaaaaaaacaaacaaacaaaaaaaaaaccatatatatacatatatatatagcagctttatggagatataattcttatgccatataattcaccttctttttttttttttgtctgagacagaatctcagtctgtcacccaggttggagtgcagtggcgtgatctcagctcactgcaacctccacctcgcaggttcaagcaatcctcccacttcagcctcccaagcacctgggattacaagcatgagtcactacgcctggctgatttttgtagttttagtggagatggggtttcaccatgttggccaggcttgtctcgaactcctgaccccaagttatccacctgccttggcttcccaaagtcctgggattacaggtgtgagccaccacatccagcctaacttacattcttaaagtgtcgaatgacttctagtgtagaattgtgcaaccatcaccagaattaattttattattcttattatttttgagacagagtcttactctgttgccaggctggagtgcagtggcgcgatctcagctcactacaacctccgcctcccatgttcaagcgattctcctgcctcagcctcccgagtagctgggactataggcatgcgccaccatggccagctaatttttgtatttttagtagagacgaggtttcactgtgttggccaggatggtctccatctcttgacctcgtgatccacccgcctcagcctcccaaagtgctgggattaacaggtatgaaccaccgcgcccagcctttttgttttttttttttttgagacagagtcttcctctgtctcctaagctggagtgcagtggcatcatctcagctcactgcaacctc

SEQ ID NO: 124335 - DNA, 5250 bp, Homo sapiens
  Payload ID: 4419
  Gene Symbol: CYP1B1
  Gene Name: cytochrome P450, family 1, subfamily B, polypeptide 1
  Uniprot ID: Q16678
  ENST ID: ENST00000610745
  CDS Start-End: 404-2035
aaaacccggaggagcgggatggcgcgctttgactctggagtgggagtgggagcgagcgcttctgcgactccagttgtgagagccgcaagggcatgggaattgacgccactcaccgacccccagtctcaatctcaacgctgtgaggaaacctcgactttgccaggtccccaagggcagcggggctcggcgagcgaggcacccttctccgtccccatcccaatccaagcgctcctggcactgacgacgccaagagactcgagtgggagttaaagcttccagtgagggcagcaggtgtccaggccgggcctgcgggttcctgttgacgtcttgccctaggcaaaggtcccagttccttctcggagccggctgtcccgcgccactggaaaccgcacctccccgcagcatgggcaccagcctcagcccgaacgacccttggccgctaaacccgctgtccatccagcagaccacgctcctgctactcctgtcggtgctggccactgtgcatgtgggccagcggctgctgaggcaacggaggcggcagctccggtccgcgcccccgggcccgtttgcgtggccactgatcggaaacgcggcggcggtgggccaggcggctcacctctcgttcgctcgcctggcgcggcgctacggcgacgttttccagatccgcctgggcagctgccccatagtggtgctgaatggcgagcgcgccatccaccaggccctggtgcagcagggctcggccttcgccgaccggccggccttcgcctccttccgtgtggtgtccggcggccgcagcatggctttcggccactactcggagcactggaaggtgcagcggcgcgcagcccacagcatgatgcgcaacttcttcacgcgccagccgcgcagccgccaagtcctcgagggccacgtgctgagcgaggcgcgcgagctggtggcgctgctggtgcgcggcagcgcggacggcgccttcctcgacccgaggccgctgaccgtcgtggccgtggccaacgtcatgagtgccgtgtgtttcggctgccgctacagccacgacgaccccgagttccgtgagctgctcagccacaacgaagagttcgggcgcacggtgggcgcgggcagcctggtggacgtgatgccctggctgcagtacttccccaacccggtgcgcaccgttttccgcgaattcgagcagctcaaccgcaacttcagcaacttcatcctggacaagttcttgaggcactgcgaaagccttcggcccggggccgccccccgcgacatgatggacgcctttatcctctctgcggaaaagaaggcggccggggactcgcacggtggtggcgcgcggctggatttggagaacgtaccggccactatcactgacatcttcggcgccagccaggacaccctgtccaccgcgctgcagtggctgctcctcctcttcaccaggtatcctgatgtgcagactcgagtgcaggcagaattggatcaggtcgtggggagggaccgtctgccttgtatgggtgaccagcccaacctgccctatgtcctggccttcctttatgaagccatgcgcttctccagctttgtgcctgtcactattcctcatgccaccactgccaacacctctgtcttgggctaccacattcccaaggacactgtggtttttgtcaaccagtggtctgtgaatcatgacccactgaagtggcctaacccggagaactttgatccagctcgattcttggacaaggatggcctcatcaacaaggacctgaccagcagagtgatgattttttcagtgggcaaaaggcggtgcattggcgaagaactttctaagatgcagctttttctcttcatctccatcctggctcaccagtgcgatttcagggccaacccaaatgagcctgcgaaaatgaatttcagttatggtctaaccattaaacccaagtcatttaaagtcaatgtcactctcagagagtccatggagctccttgatagtgctgtccaaaatttacaagccaaggaaacttgccaataagaagcaagaggcaagctgaaattttagaaatattcacatcttcggagatgaggagtaaaattcagtttttttccagttcctcttttgtgctgcttctcaattagcgtttaaggtgagcataaatcaactgtccatcaggtgaggtgtgctccatacccagcggttcttcatgagtagtgggctatgcaggagcttctgggagatttttttgagtcaaagacttaaagggcccaatgaattattatatacatactgcatcttggttatttctgaaggtagcattctttggagttaaaatgcacatatagacacatacacccaaacacttacaccaaactactgaatgaagcagtattttggtaaccaggccatttttggtgggaatccaagattggtctcccatatgcagaaatagacaaaaagtatattaaacaaagtttcagagtatattgttgaagagacagagacaagtaatttcagtgtaaagtgtgtgattgaaggtgataagggaaaagataaagaccagaaattcccttttcaccttttcaggaaaataacttagactctagtatttatgggtggatttatccttttgccttctggtatacttccttacttttaaggataaatcataaagtcagttgctcaaaaagaaatcaatagttgaattagtgagtatagtggggttccatgagttatcatgaattttaaagtatgcattattaaattgtaaaactccaaggtgatgttgtacctcttttgcttgccaaagtacagaatttgaattatcagcaaagaaaaaaaaaaaagccagccaagctttaaattatgtgaccataatgtactgatttcagtaagtctcataggttaaaaaaaaaagtcaccaaatagtgtgaaatatattacttaactgtccgtaagcagtatattagtattatcttgttcaggaaaaggttgaataatatatgccttgtataatattgaaaattgaaaagtacaactaacgcaaccaagtgtgctaaaaatgagcttgattaaatcaaccacctatttttgacatggaaatgaagcagggtttcttttcttcactcaaattttggcgaatctcaaaattagatcctaagatgtgttcttatttttataacatctttattgaaattctatttataatacagaatcttgttttgaaaataacctaattaatatattaaaattccaaattcatggcatgcttaaattttaactaaattttaaagccattctgattattgagttccagttgaagttagtggaaatctgaacattctcctgtggaaggcagagaaatctaagctgtgtctgcccaatgaataatggaaaatgccatgaattacctggatgttctttttacgaggtgacaagagttggggacagaactcccattacaactgaccaagtttctcttctagatgattttttgaaagttaacattaatgcctgctttttggaaagtcagaatcagaagatagtcttggaagctgtttggaaaagacagtggagatgaggtcagttgtgttttttaagatggcaattactttggtagctgggaaagcataaagctcaaatgaaatgtatgcattcacatttagaaaagtgaattgaagtttcaagttttaaagttcattgcaattaaacttccaaagaaagttctacagtgtcctaagtgctaagtgcttattacattttattaagctttttggaatctttgtaccaaaattttaaaaaagggagtttttgatagttgtgtgtatgtgtgtgtggggtggggggatggtaagagaaaagagagaaacactgaaaagaaggaaagatggttaaacattttcccactcattctgaattaattaatttggagcacaaaattcaaagcatggacatttagaagaaagatgtttggcgtagcagagttaaatctcaaataggctattaaaaaagtctacaacatagcagatctgttttgtggtttggaatattaaaaaacttcatgtaattttattttaaaatttcatagctgtacttcttgaatataaaaaatcatgccagtatttttaaaggcattagagtcaactacacaaagcaggcttgcccagtacatttaaattttttggcacttgccattccaaaatattatgccccaccaaggctgagacagtgaatttgggctgctgtagcctatttttttagattgagaaatgtgtagctgcaaaaataatcatgaaccaatctggatgcctcattatgtcaaccaggtccagatgtgctataatctgtttttacgtatgtaggcccagtcgtcatcagatgcttgcggcaaaaggaaagctgtgtttatatggaagaaagtaaggtgcttggagtttacctggcttatttaatatgcttataacctagttaaagaaaggaaaagaaaacaaaaaacgaatgaaaataactgaatttggaggctggagtaatcagattactgctttaatcagaaaccctcattgtgtttctaccggagagagaatgtatttgctgacaaccattaaagtcagaagttttactccaggttattgcaataaagtataatgtttattaaatgcttcatttgtatgtcaaagctttgactctataagcaaattgcttttttccaaaacaaaaagatgtctcaggtttgttttgtgaattttctaaaagctttcatgtcccagaacttagcctttacctgtgaagtgttactacagccttaatattttcctagtagatctatattagatcaaatagttgcatagcagtatatgttaatttgtgtgtttttagctgtgacacaactgtgtgattaaaaggtatactttagtagacatttataactcaaggataccttcttatttaatcttttcttatttttgtactttatcatgaatgcttttagtgtgtgcataatagctacagtgcatagttgtagacaaagtacattctggggaaacaacatttatatgtagcctttactgtttgatataccaaattaaaaaaaaattgtatctcattacttatactgggacaccattaccaaaataataaaaatcactttcataatcttgttatgaagttttatgttgtagcaaatatagtctaatgtatcactttatttcaactattactatggattattcaattaaaatattgcactgtaaaca

SEQ ID NO: 124336 - DNA, 567 bp, Homo sapiens
  Payload ID: 4419
  Gene Symbol: CYP1B1
  Gene Name: cytochrome P450, family 1, subfamily B, polypeptide 1
  ENST ID: ENST00000490576
  CDS Start-End: 138-567
tttgactctggagtgggagtgggagcgagcgcttctgcgactccagttgtgagagccgcaagggcatgggaattgacgccactcaccgacccccagtctcaatctcaacgctgtgaggaaacctcgactttgccagcatgggcaccagcctcagcccgaacgacccttggccgctaaacccgctgtccatccagcagaccacgctcctgctactcctgtcggtgctggccactgtgcatgtgggccagcggctgctgaggcaacggaggcggcagctccggtccgcgcccccgggcccgtttgcgtggccactgatcggaaacgcggcggcggtgggccaggcggctcacctctcgttcgctcgcctggcgcggcgctacggcgacgttttccagatccgcctgggcagctgccccatagtggtgctgaatggcgagcgcgccatccaccaggccctggtgcagcagggctcggccttcgccgaccggccggccttcgcctccttccgtgtggtgtccggcggccgcagcatggctttcggccactactcggagcactggaaggtgc

SEQ ID NO: 124337 - DNA, 1479 bp, Homo sapiens
  Payload ID: 4419
  Gene Symbol: CYP1B1
  Gene Name: cytochrome P450, family 1, subfamily B, polypeptide 1
  ENST ID: ENST00000494864
  CDS Start-End: 305-823
ggcttttacaaagagatcaacaatagaacaggagaaattctaccagatgcaaaaagaaaagggcaagggagaatataaacgtttgcctaattcactgatctgcttaaactgccttttaatgcttagaaaatagaaaggatggcacgatcctttgatgaaaggaggctgtttatgtcagaagaagtccagacctctcacagtgacgaggggagaataaaaaagctgcaacatcaggtatcctgatgtgcagactcgagtgcaggcagaattggatcaggtcgtggggagggaccgtctgccttgtatgggtgaccagcccaacctgccctatgtcctggccttcctttatgaagccatgcgcttctccagctttgtgcctgtcactattcctcatgccaccactgccaacacctctgtcttgggctaccacattcccaaggacactgtggtttttgtcaaccagtggtctgtgaatcatgacccactgaagtggcctaacccggagaactttgatccagctcgattcttggacaaggatggcctcatcaacaaggacctgaccagcagagtgatgattttttcagtgggcaaaaggcggtgcattggcgaagaactttctaagatgcagctttttctcttcatctccatcctggctcaccagtgcgatttcagggccaacccaaatgagcctgcgaaaatgaatttcagttatggtctaaccattaaacccaagtcatttaaagtcaatgtcactctcagagagtccatggagctccttgatagtgctgtccaaaatttacaagccaaggaaacttgccaataagaagcaagaggcaagctgaaattttagaaatattcacatcttcggagatgaggagtaaaattcagtttttttccagttcctcttttgtgctgcttctcaattagcgtttaaggtgagcataaatcaactgtccatcaggtgaggtgtgctccatacccagcggttcttcatgagtagtgggctatgcaggagcttctgggagatttttttgagtcaaagacttaaagggcccaatgaattattatatacatactgcatcttggttatttctgaaggtagcattctttggagttaaaatgcacatatagacacatacacccaaacacttacaccaaactactgaatgaagcagtattttggtaaccaggccatttttggtgggaatccaagattggtctcccatatgcagaaatagacaaaaagtatattaaacaaagtttcagagtatattgttgaagagacagagacaagtaatttcagtgtaaagtgtgtgattgaaggtgataagggaaaagataaagaccagaaattcccttttcaccttttcaggaaaataacttagactctagtatttatgggtggatttatccttttgccttctggtatacttccttacttttaaggataaatcataaagtcagttgctcaaaaagaaa

SEQ ID NO: 124338 - DNA, 2174 bp, Homo sapiens
  Payload ID: 4419
  Gene Symbol: CYP1B1
  Gene Name: cytochrome P450, family 1, subfamily B, polypeptide 1
  Uniprot ID: Q16678
  ENST ID: ENST00000614273
  CDS Start-End: 303-1934
ccactcaccgacccccagtctcaatctcaacgctgtgaggaaacctcgactttgccaggtccccaagggcagcggggctcggcgagcgaggcacccttctccgtccccatcccaatccaagcgctcctggcactgacgacgccaagagactcgagtgggagttaaagcttccagtgagggcagcaggtgtccaggccgggcctgcgggttcctgttgacgtcttgccctaggcaaaggtcccagttccttctcggagccggctgtcccgcgccactggaaaccgcacctccccgcaggtcacatgggcaccagcctcagcccgaacgacccttggccgctaaacccgctgtccatccagcagaccacgctcctgctactcctgtcggtgctggccactgtgcatgtgggccagcggctgctgaggcaacggaggcggcagctccggtccgcgcccccgggcccgtttgcgtggccactgatcggaaacgcggcggcggtgggccaggcggctcacctctcgttcgctcgcctggcgcggcgctacggcgacgttttccagatccgcctgggcagctgccccatagtggtgctgaatggcgagcgcgccatccaccaggccctggtgcagcagggctcggccttcgccgaccggccggccttcgcctccttccgtgtggtgtccggcggccgcagcatggctttcggccactactcggagcactggaaggtgcagcggcgcgcagcccacagcatgatgcgcaacttcttcacgcgccagccgcgcagccgccaagtcctcgagggccacgtgctgagcgaggcgcgcgagctggtggcgctgctggtgcgcggcagcgcggacggcgccttcctcgacccgaggccgctgaccgtcgtggccgtggccaacgtcatgagtgccgtgtgtttcggctgccgctacagccacgacgaccccgagttccgtgagctgctcagccacaacgaagagttcgggcgcacggtgggcgcgggcagcctggtggacgtgatgccctggctgcagtacttccccaacccggtgcgcaccgttttccgcgaattcgagcagctcaaccgcaacttcagcaacttcatcctggacaagttcttgaggcactgcgaaagccttcggcccggggccgccccccgcgacatgatggacgcctttatcctctctgcggaaaagaaggcggccggggactcgcacggtggtggcgcgcggctggatttggagaacgtaccggccactatcactgacatcttcggcgccagccaggacaccctgtccaccgcgctgcagtggctgctcctcctcttcaccaggtatcctgatgtgcagactcgagtgcaggcagaattggatcaggtcgtggggagggaccgtctgccttgtatgggtgaccagcccaacctgccctatgtcctggccttcctttatgaagccatgcgcttctccagctttgtgcctgtcactattcctcatgccaccactgccaacacctctgtcttgggctaccacattcccaaggacactgtggtttttgtcaaccagtggtctgtgaatcatgacccactgaagtggcctaacccggagaactttgatccagctcgattcttggacaaggatggcctcatcaacaaggacctgaccagcagagtgatgattttttcagtgggcaaaaggcggtgcattggcgaagaactttctaagatgcagctttttctcttcatctccatcctggctcaccagtgcgatttcagggccaacccaaatgagcctgcgaaaatgaatttcagttatggtctaaccattaaacccaagtcatttaaagtcaatgtcactctcagagagtccatggagctccttgatagtgctgtccaaaatttacaagccaaggaaacttgccaataagaagcaagaggcaagctgaaattttagaaatattcacatcttcggagatgaggagtaaaattcagtttttttccagttcctcttttgtgctgcttctcaattagcgtttaaggtgagcataaatcaactgtccatcaggtgaggtgtgctccatacccagcggttcttcatgagtagtgggctatgcaggagcttctgggagatttttttgagtcaaagacttaaagggcccaatgaatt

SEQ ID NO: 124339 - DNA, 1934 bp, Homo sapiens
  Payload ID: 4420
  Gene Symbol: CYP11A1
  Gene Name: cytochrome P450, family 11, subfamily A, polypeptide 1
  Uniprot ID: P05108
  ENST ID: ENST00000268053
  CDS Start-End: 156-1721
agcctgcagcaggaggaaggacgtgaacattttatcagcttctggtatggccttgagctggtagttataatcttggccctggtggcccagggctacagtcatcctagcagtccccgctgaagtggagcaggtacagtcacagctgtggggacagcatgctggccaagggtcttcccccacgctcagtcctggtcaaaggctgccagacctttctgagtgcccccagggaggggctggggcgtctcagggtgcccactggcgagggagctggcatctccacccgcagtcctcgccccttcaatgagatcccctctcctggtgacaatggctggctaaacctgtaccatttctggagggagacgggcacacacaaagtccaccttcaccatgtccagaatttccagaagtatggcccgatttacagggagaagctcggcaacgtggagtcggtttatgtcatcgaccctgaagatgtggcccttctctttaagtccgagggccccaacccagaacgattcctcatcccgccctgggtcgcctatcaccagtattaccagagacccataggagtcctgttgaagaagtcggcagcctggaagaaagaccgggtggccctgaaccaggaggtgatggctccagaggccaccaagaactttttgcccctgttggatgcagtgtctcgggacttcgtcagtgtcctgcacaggcgcatcaagaaggcgggctccggaaattactcgggggacatcagtgatgacctgttccgctttgcctttgagtccatcactaacgtcatttttggggagcgccaggggatgctggaggaagtagtgaaccccgaggcccagcgattcattgatgccatctaccagatgttccacaccagcgtccccatgctcaaccttcccccagacctgttccgtctgttcaggaccaagacctggaaggaccatgtggctgcatgggacgtgattttcagtaaagctgacatatacacccagaacttctactgggaattgagacagaaaggaagtgttcaccacgattaccgtggcatcctctacagactcctgggagacagcaagatgtccttcgaggacatcaaggccaacgtcacagagatgctggcaggaggggtggacacgacgtccatgaccctgcagtggcacttgtatgagatggcacgcaacctgaaggtgcaggatatgctgcgggcagaggtcttggctgcgcggcaccaggcccagggagacatggccacgatgctacagctggtccccctcctcaaagccagcatcaaggagacactaagacttcaccccatctccgtgaccctgcagagatatcttgtaaatgacttggttcttcgagattacatgattcctgccaagacactggtgcaagtggccatctatgctctgggccgagagcccaccttcttcttcgacccggaaaattttgacccaacccgatggctgagcaaagacaagaacatcacctacttccggaacttgggctttggctggggtgtgcggcagtgtctgggacggcggatcgctgagctagagatgaccatcttcctcatcaatatgctggagaacttcagagttgaaatccaacacctcagcgatgtgggcaccacattcaacctcattctgatgcctgaaaagcccatctccttcaccttctggccctttaaccaggaagcaacccagcagtgatcagagaggatggcctgcagccacatgggaggaaggcccaggggtggggcccatggggtctctgcatcttcagtcgtctgtcccaagtcctgctcctttctgcccagcctgctcagcaggttgaatgggttctcagtggtcaccttcctcagctcagctgggccactcctcttcacccaccccatggagacaataaacagctgaaccatgtgg

SEQ ID NO: 124340 - DNA, 2001 bp, Homo sapiens
  Payload ID: 4420
  Gene Symbol: CYP11A1
  Gene Name: cytochrome P450, family 11, subfamily A, polypeptide 1
  Uniprot ID: P05108
  ENST ID: ENST00000358632
  CDS Start-End: 697-1788
gacagacccagcattcctcccagcgcacgccgccgcccgggccgcgctattccgaaattgggtccgccctagcgtggcccccggcctgctcctgcgctcttcgcgggtcgctcacctccgcctcccctcgacacagcccgagcccatccgccccccgggtcgacccgcgtttacctcagggcgaggtccaggcgctcggccccgcggaggcggcggcggccccaccgcaggtcctaggtcccagtcactctgccgccaagttccccaacacggactccgtgcgctttgaggtgttacgggggcgctggagcactggcttcgctggccctgccaggaggcggcggcgaagcagggagcgacccggtatgcgtttctctgcccggcctgcggccctgcagcatccactcctcgcctctgctggcctctgccctcgctcgctgcgttcacccgagctcacccgagcccaccggagccgacagtggcgcgctaagggagaagctcggcaacgtggagtcggtttatgtcatcgaccctgaagatgtggcccttctctttaagtccgagggccccaacccagaacgattcctcatcccgccctgggtcgcctatcaccagtattaccagagacccataggagtcctgttgaagaagtcggcagcctggaagaaagaccgggtggccctgaaccaggaggtgatggctccagaggccaccaagaactttttgcccctgttggatgcagtgtctcgggacttcgtcagtgtcctgcacaggcgcatcaagaaggcgggctccggaaattactcgggggacatcagtgatgacctgttccgctttgcctttgagtccatcactaacgtcatttttggggagcgccaggggatgctggaggaagtagtgaaccccgaggcccagcgattcattgatgccatctaccagatgttccacaccagcgtccccatgctcaaccttcccccagacctgttccgtctgttcaggaccaagacctggaaggaccatgtggctgcatgggacgtgattttcagtaaagctgacatatacacccagaacttctactgggaattgagacagaaaggaagtgttcaccacgattaccgtggcatcctctacagactcctgggagacagcaagatgtccttcgaggacatcaaggccaacgtcacagagatgctggcaggaggggtggacacgacgtccatgaccctgcagtggcacttgtatgagatggcacgcaacctgaaggtgcaggatatgctgcgggcagaggtcttggctgcgcggcaccaggcccagggagacatggccacgatgctacagctggtccccctcctcaaagccagcatcaaggagacactaagacttcaccccatctccgtgaccctgcagagatatcttgtaaatgacttggttcttcgagattacatgattcctgccaagacactggtgcaagtggccatctatgctctgggccgagagcccaccttcttcttcgacccggaaaattttgacccaacccgatggctgagcaaagacaagaacatcacctacttccggaacttgggctttggctggggtgtgcggcagtgtctgggacggcggatcgctgagctagagatgaccatcttcctcatcaatatgctggagaacttcagagttgaaatccaacacctcagcgatgtgggcaccacattcaacctcattctgatgcctgaaaagcccatctccttcaccttctggccctttaaccaggaagcaacccagcagtgatcagagaggatggcctgcagccacatgggaggaaggcccaggggtggggcccatggggtctctgcatcttcagtcgtctgtcccaagtcctgctcctttctgcccagcctgctcagcaggttgaatgggttctcagtggtcaccttcctcagctcagctgggccactcctcttcacccaccccatggagacaataaacagctgaaccatgtgg

SEQ ID NO: 124341 - DNA, 566 bp, Homo sapiens
  Payload ID: 4420
  Gene Symbol: CYP11A1
  Gene Name: cytochrome P450, family 11, subfamily A, polypeptide 1
  ENST ID: ENST00000416978
  CDS Start-End: 62-566
acagtcatcctagcagtccccgctgaagtggagcaggtacagtcacagctgtggggacagcatgctggccaagggtcttcccccacgctcagtcctggtcaaaggctgccagacctttctgagtgcccccagggaggggctggggcgtctcagggtgcccactggcgagggagctggcatctccacccgcagtcctcgccccttcaatgagatcccctctcctggtgacaatggctggctaaacctgtaccatttctggagggagacgggcacacacaaagtccaccttcaccatgtccagaatttccagaagtatggcccgatttacagggagaagctcggcaacgtggagtcggtttatgtcatcgaccctgaagatgtggcccttctctttaagtccgagggccccaacccagaacgattcctcatcccgccctgggtcgcctatcaccagtattaccagagacccataggagtcctgttgaagcctggggtctgtgaccatgagggcttgtgggcccatgttttctcaggaagtcggcagcctggaagaaagaccgggtggc

SEQ ID NO: 124342 - DNA, 1629 bp, Homo sapiens
  Payload ID: 4420
  Gene Symbol: CYP11A1
  Gene Name: cytochrome P450, family 11, subfamily A, polypeptide 1
  ENST ID: ENST00000435365
  CDS Start-End: 43-1287
ccgctgaagtggagcaggtacagtcacagctgtggggacagcatgctggccaagggtcttcccccacgctcagtcctggtcaaaggctgccagacctttctgagtgcccccagggaggggctggggcgtctcagggtgcccactggcgagggagctggcatctccacccgcagtcctcgccccttcaatgagatcccctctcctggtgacaatggctggctaaacctgtaccatttctggagggagacgggcacacacaaagtccaccttcaccatgtccagaatttccagaagtatggcccgatttacagggagaagctcggcaacgtggagtcggtttatgtcatcgaccctgaagatgtggcccttctctttaagtccgagggccccaacccagaacgattcctcatcccgccctgggtcgcctatcaccagtattaccagagacccataggagtcctgttgaagaagtcggcagcctggaagaaagaccgggtggccctgaaccaggaggtgatggctccagaggccaccaagaactttttgcccctgttggatgcagtgtctcgggacttcgtcagtgtcctgcacaggcgcatcaagaaggcgggctccggaaattactcgggggacatcagtgatgacctgttccgctttgcctttgagtccatcactaacgtcatttttggggagcgccaggggatgctggaggaagtagtgaaccccgaggcccagcgattcattgatgccatctaccagatgttccacaccagcgtccccatgctcaaccttcccccagacctgttccgtctgttcaggaccaagacctggaaggaccatgtggctgcatgggacgtgattttcagtaaagctgacatatacacccagaacttctactgggaattgagacagaaaggaagtgttcaccacgattaccgtggcatcctctacagactcctgggagacagcaagatgtccttcgaggacatcaaggccaacgtcacagagatgctggcaggaggggtggacacgacgtccatgaccctgcagtggcacttgtatgagatggcacgcaacctgaaggtgcaggatatgctgcgggcagaggtcttggctgcgcggcaccaggcccagggagacatggccacgatgctacagctggtccccctcctcaaagccagcatcaaggagacactaagacactggtgcaagtggccatctatgctctgggccgagagcccaccttcttcttcgacccggaaaattttgacccaacccgatggctgagcaaagacaagaacatcacctacttccggaacttgggctttggctggggtgtgcggcagtgtctgggacggcggatcgctgagctagagatgaccatcttcctcatcaatatgctggagaacttcagagttgaaatccaacacctcagcgatgtgggcaccacattcaacctcattctgatgcctgaaaagcccatctccttcaccttctggccctttaaccaggaagcaacccagcagtgatcagagaggatggcctgcagccacatgggaggaaggcccaggggtggggcccatggggtctctgcatcttcagtcgtctgtcccaagtcctgctcctttc

SEQ ID NO: 124343 - DNA, 1045 bp, Homo sapiens
  Payload ID: 4420
  Gene Symbol: CYP11A1
  Gene Name: cytochrome P450, family 11, subfamily A, polypeptide 1
  ENST ID: ENST00000450547
  CDS Start-End: 758-1045
gccgccgcccgggccgcgctattccgaaattgggtccgccctagcgtggcccccggcctgctcctgcgctcttcgcgggtcgctcacctccgcctcccctcgacacagcccgagcccatccgccccccgggtcgacccgcgtttacctcagggcgaggtccaggcgctcggccccgcggaggcggcggcggccccaccgcaggtcctaggtcccagtcactctgccgccaagttccccaacacggactccgtgcgctttgaggtgttacgggggcgctggagcactggcttcgctggccctgccaggaggcggcggcgaagcagggagcgacccggtatgcgtttctctgcccggcctgcggccctgcagcatccactcctcgcctctgctggcctctgccctcgctcgctgcgttcacccgagctcacccgagcccaccggagccgacagtggcgcgctaagagcaatttagaaaatacagagaaacacaaatgaaaaattgaagtcagatacaatcaattccaattgatttaacatttaagtatcatgagggagaagctcggcaacgtggagtcggtttatgtcatcgaccctgaagatgtggcccttctctttaagtccgagggccccaacccagaacgattcctcatcccgccctgggtcgcctatcaccagtattaccagagacccataggagtcctgttgaagaagtcggcagcctggaagaaagaccgggtggccctgaaccaggaggtgatggctccagaggccaccaagaactttttgcccctgttggatgcagtgtctcgggacttcgtcagtgtcctgcacaggcgcatcaagaaggcgggctccggaaattactcgggggacatcagtgatgacctgttccgctttgcctttgagtccatcactaacgtcatttttggggagcgccaggggatgctggaggaagtagtgaaccccgaggcccagcgattcattgatgccatctaccagatgttccacaccagcgtccccatgctcaaccttcccccagacctg

SEQ ID NO: 124344 - DNA, 572 bp, Homo sapiens
  Payload ID: 4420
  Gene Symbol: CYP11A1
  Gene Name: cytochrome P450, family 11, subfamily A, polypeptide 1
  ENST ID: ENST00000569662
  CDS Start-End: 493-572
attccgaaattgggtccgccctagcgtggcccccggcctgctcctgcgctcttcgcgggtcgctcacctccgcctcccctcgacacagcccgagcccatccgccccccgggtcgacccgcgtttacctcagggcgaggtccaggcgctcggccccgcggaggcggcggcggccccaccgcaggtcctaggtcccagtcactctgccgccaagttccccaacacggactccgtgcgctttgaggtgttacgggggcgctggagcactggcttcgctggccctgccaggaggcggcggcgaagcagggagcgacccggtatgcgtttctctgcccggcctgcggccctgcagcatccactcctcgcctctgctggcctctgccctcgctcgctgcgttcacccgagctcacccgagcccaccggagccgacagtggcgcgctaaggaagtcggcagcctggaagaaagaccgggtggccctgaaccaggaggtgatggctccagaggccaccaagaactttttgcccctgttggatgcagtgtctcgggacttcgtcagtgtcctgcacaggcg

SEQ ID NO: 124345 - DNA, 969 bp, Homo sapiens
  Payload ID: 4420
  Gene Symbol: CYP11A1
  Gene Name: cytochrome P450, family 11, subfamily A, polypeptide 1
  ENST ID: ENST00000566674
  CDS Start-End: 287-969
ggcaggcacgggcaggggacacaaggtgctcagtgggggagcttttgagccaggatgagccaggagaaggaatttcacaagggagaagctcggcaacgtggagtcggtttatgtcatcgaccctgaagatgtggcccttctctttaagtccgagggccccaacccagaacgattcctcatcccgccctgggtcgcctatcaccagtattaccagagacccataggagtcctgttgaagaagtcggcagcctggaagaaagaccgggtggccctgaaccaggaggtgatggctccagaggccaccaagaactttttgcccctgttggatgcagtgtctcgggacttcgtcagtgtcctgcacaggcgcatcaagaaggcgggctccggaaattactcgggggacatcagtgatgacctgttccgctttgcctttgagtccatcactaacgtcatttttggggagcgccaggggatgctggaggaagtagtgaaccccgaggcccagcgattcattgatgccatctaccagatgttccacaccagcgtccccatgctcaaccttcccccagacctgttccgtctgttcaggaccaagacctggaaggaccatgtggctgcatgggacgtgattttcagtaaagctgacatatacacccagaacttctactgggaattgagacagaaaggaagtgttcaccacgattaccgtggcatcctctacagactcctgggagacagcaagatgtccttcgaggacatcaaggccaacgtcacagagatgctggcaggaggggtggacacgacgtccatgaccctgcagtggcacttgtatgagatggcacgcaacctgaaggtgcaggatatgctgcgggcagaggtcttggctgcgcggcaccaggcccagggagacatggccacgatgctacagctggtccccctcctcaaagccagcatcaaggagacactaag

SEQ ID NO: 124346 - DNA, 2664 bp, Homo sapiens
  Payload ID: 4421
  Gene Symbol: CYP11B1
  Gene Name: cytochrome P450, family 11, subfamily B, polypeptide 1
  Uniprot ID: P15538
  ENST ID: ENST00000292427
  CDS Start-End: 34-1545
attgcagctgaacagggtggagggagcattggaatggcactcagggcaaaggcagaggtgtgcatggcagtgccctggctgtccctgcaaagggcacaggcactgggcacgagagccgcccgggtccccaggacagtgctgccctttgaagccatgccccggcgtccaggcaacaggtggctgaggctgctgcagatctggagggagcagggttatgaggacctgcacctggaagtacaccagaccttccaggaactagggcccattttcaggtacgacttgggaggagcaggcatggtgtgtgtgatgctgccggaggacgtggagaagctgcaacaggtggacagcctgcatccccacaggatgagcctggagccctgggtggcctacagacaacatcgtgggcacaaatgtggcgtgttcttgctgaatgggcctgaatggcgcttcaaccgattgcggctgaatccagaagtgctgtcgcccaacgctgtgcagaggttcctcccgatggtggatgcagtggccagggacttctcccaggccctgaagaagaaggtgctgcagaacgcccgggggagcctgaccctggacgtccagcccagcatcttccactacaccatagaagccagcaacttggctctttttggagagcggctgggcctggttggccacagccccagttctgccagcctgaacttcctccatgccctggaggtcatgttcaaatccaccgtccagctcatgttcatgcccaggagcctgtctcgctggaccagccccaaggtgtggaaggagcactttgaggcctgggactgcatcttccagtacggcgacaactgtatccagaaaatctatcaggaactggccttcagccgccctcaacagtacaccagcatcgtggcggagctcctgttgaatgcggaactgtcgccagatgccatcaaggccaactctatggaactcactgcagggagcgtggacacgacggtgtttcccttgctgatgacgctctttgagctggctcggaaccccaacgtgcagcaggccctgcgccaggagagcctggccgccgcagccagcatcagtgaacatccccagaaggcaaccaccgagctgcccttgctgcgtgcggccctcaaggagaccttgcggctctaccctgtgggtctgtttctggagcgagtggcgagctcagacttggtgcttcagaactaccacatcccagctgggacattggtgcgcgtgttcctctactctctgggtcgcaaccccgccttgttcccgaggcctgagcgctataacccccagcgctggctagacatcaggggctccggcaggaacttctaccacgtgccctttggctttggcatgcgccagtgccttgggcggcgcctggcagaggcagagatgctgctgctgctgcaccatgtgctgaaacacctccaggtggagacactaacccaagaggacataaagatggtctacagcttcatattgaggcccagcatgttccccctcctcaccttcagagccatcaactaatcacgtctctgcacccagggtcccagcctggccaccagcctccctttctgcctgaccccaggccacccctcttctctcccacatgcacagcttcctgagtcacccctctgtctaaccagccccagcacaaatggaactcccgagggcctctaggaccagggtttgccaggctaagcagcaatgccagggcacagctggggaagatcttgctgaccttgtccccagccccacctggccctttctccagcaagcactgtcctctgggcagtttgcccccatccctcccagtgctggctccaggctcctcgtgtggccatacaagggtgctgtggttttgtcccttgccttcctgcctagtctcacatgtccctgttcctcttcccctggccagggcccctgcgcagactgtcagagtcattaagcgggatcccagcatctcagagtccagtcaagttccctcctgcagcctgacccctaggcagctcgagcatgccctgagctctctgaaagttgtcaccctggaatagggtcctgcagggtagaataaaaaggcccctgtggtcacttgtcctgacatccccattttcaagtgatacaactgagtctcgagggacgtgtgttccccagctgatcgtgtcagcctcatgccccaggcctcatctttcatggaccaggccttgttccaggagtgggtgttgggtcctctgcttcctgtgctgtcccctggggaaggtcccgaggatgctgtcaggagatggaagagtcatgtggggtgggaacctggggtgtggttccagaaatgtttttggcaacaggagagacaggattgggccaacaaggactcagacgagttttattgactcatttctctggttgatacggagccatgtcatgtgccacgacctggggtgggcacagggaggctgcagtttcctgcgtgaacctgccttgggcctcatctgctcctagcccagcagagagagttgacccctcctgaactggccactccccagtgctcccgtgcagggagaggaagcacccagtttgagagtgtacccagccagactgtctttatctccatggattttcatcagggcaaagatcacagcagccagctcc

SEQ ID NO: 124347 - DNA, 2280 bp, Homo sapiens
  Payload ID: 4421
  Gene Symbol: CYP11B1
  Gene Name: cytochrome P450, family 11, subfamily B, polypeptide 1
  ENST ID: ENST00000377675
  CDS Start-End: 8-1732
cattggaatggcactcagggcaaaggcagaggtgtgcatggcagtgccctggctgtccctgcaaagggcacaggcactgggcacgagagccgcccgggtccccaggacagtgctgccctttgaagccatgccccggcgtccaggcaacaggtggctgaggctgctgcagatctggagggagcagggttatgaggacctgcacctggaagtacaccagaccttccaggaactagggcccattttcaggtcccggcactctgcatcctttggaagatggggaaggagtgcagcacgtgctggtctgtggcgctgccagggcaggggatggtgcagagcaaatcccagctcgctgcagagagggcaggactcagaggcactgaagtacgacttgggaggagcaggcatggtgtgtgtgatgctgccggaggacgtggagaagctgcaacaggtggacagcctgcatccccacaggatgagcctggagccctgggtggcctacagacaacatcgtgggcacaaatgtggcgtgttcttgctaaatgtggctgacaggggaaattcctccccaccattccctgggggcatccatggagcccccacgcactctggctgtaggaatgggcctgaatggcgcttcaaccgattgcggctgaatccagaagtgctgtcgcccaacgctgtgcagaggttcctcccgatggtggatgcagtggccagggacttctcccaggccctgaagaagaaggtgctgcagaacgcccgggggagcctgaccctggacgtccagcccagcatcttccactacaccatagaagccagcaacttggctctttttggagagcggctgggcctggttggccacagccccagttctgccagcctgaacttcctccatgccctggaggtcatgttcaaatccaccgtccagctcatgttcatgcccaggagcctgtctcgctggaccagccccaaggtgtggaaggagcactttgaggcctgggactgcatcttccagtacggcgacaactgtatccagaaaatctatcaggaactggccttcagccgccctcaacagtacaccagcatcgtggcggagctcctgttgaatgcggaactgtcgccagatgccatcaaggccaactctatggaactcactgcagggagcgtggacacgacggtgtttcccttgctgatgacgctctttgagctggctcggaaccccaacgtgcagcaggccctgcgccaggagagcctggccgccgcagccagcatcagtgaacatccccagaaggcaaccaccgagctgcccttgctgcgtgcggccctcaaggagaccttgcggctctaccctgtgggtctgtttctggagcgagtggcgagctcagacttggtgcttcagaactaccacatcccagctgggacattggtgcgcgtgttcctctactctctgggtcgcaaccccgccttgttcccgaggcctgagcgctataacccccagcgctggctagacatcaggggctccggcaggaacttctaccacgtgccctttggctttggcatgcgccagtgccttgggcggcgcctggcagaggcagagatgctgctgctgctgcaccatgtgctgaaacacctccaggtggagacactaacccaagaggacataaagatggtctacagcttcatattgaggcccagcatgttccccctcctcaccttcagagccatcaactaatcacgtctctgcacccagggtcccagcctggccaccagcctccctttctgcctgaccccaggccacccctcttctctcccacatgcacagcttcctgagtcacccctctgtctaaccagccccagcacaaatggaactcccgagggcctctaggaccagggtttgccaggctaagcagcaatgccagggcacagctggggaagatcttgctgaccttgtccccagccccacctggccctttctccagcaagcactgtcctctgggcagtttgcccccatccctcccagtgctggctccaggctcctcgtgtggccatacaagggtgctgtggttttgtcccttgccttcctgcctagtctcacatgtccctgttcctcttcccctggccagggcccctgcgcagactgtcagagtcattaagcgggatcccagcatctcagagtccagtcaagttccctcctgcagcctgacccctaggcagctcgagcatgccctgagctctctgaaagttgtcaccctggaatagggtcctgcagggtagaataaa

SEQ ID NO: 124348 - DNA, 1874 bp, Homo sapiens
  Payload ID: 4421
  Gene Symbol: CYP11B1
  Gene Name: cytochrome P450, family 11, subfamily B, polypeptide 1
  Uniprot ID: P15538
  ENST ID: ENST00000517471
  CDS Start-End: 12-1325
ggagcattggaatggcactcagggcaaaggcagaggtgtgcatggcagtgccctggctgtccctgcaaagggcacaggcactgggcacgagagccgcccgggtccccaggacagtgctgccctttgaagccatgccccggcgtccaggcaacaggtggctgaggctgctgcagatctggagggagcagggttatgaggacctgcacctggaagtacaccagaccttccaggaactagggcccattttcaggtacgacttgggaggagcaggcatggtgtgtgtgatgctgccggaggacgtggagaagctgcaacaggtggacagcctgcatccccacaggatgagcctggagccctgggtggcctacagacaacatcgtgggcacaaatgtggcgtgttcttgctgaatgggcctgaatggcgcttcaaccgattgcggctgaatccagaagtgctgtcgcccaacgctgtgcagaggttcctcccgatggtggatgcagtggccagggacttctcccaggccctgaagaagaaggtgctgcagaacgcccgggggagcctgaccctggacgtccagcccagcatcttccactacaccatagaagccagcaacttggctctttttggagagcggctgggcctggttggccacagccccagttctgccagcctgaacttcctccatgccctggaggtcatgttcaaatccaccgtccagctcatgttcatgcccaggagcctgtctcgctggaccagccccaaggtgtggaaggagcactttgaggcctgggactgcatcttccagtacggcgacaactgtatccagaaaatctatcaggaactggccttcagccgccctcaacagtacaccagcatcgtggcggagctcctgttgaatgcggaactgtcgccagatgccatcaaggccaactctatggaactcactgcagggagcgtggacacgacggtgtttcccttgctgatgacgctctttgagctggctcggaaccccaacgtgcagcaggccctgcgccaggagagcctggccgccgcagccagcatcagtgaacatccccagaaggcaaccaccgagctgcccttgctgcgtgcggccctcaaggagaccttgcggctctaccctgtgggtctgtttctggagcgagtggcgagctcagacttggtgcttcagaactaccacatcccagctggggtgctgaaacacctccaggtggagacactaacccaagaggacataaagatggtctacagcttcatattgaggcccagcatgttccccctcctcaccttcagagccatcaactaatcacgtctctgcacccagggtcccagcctggccaccagcctccctttctgcctgaccccaggccacccctcttctctcccacatgcacagcttcctgagtcacccctctgtctaaccagccccagcacaaatggaactcccgagggcctctaggaccagggtttgccaggctaagcagcaatgccagggcacagctggggaagatcttgctgaccttgtccccagccccacctggccctttctccagcaagcactgtcctctgggcagtttgcccccatccctcccagtgctggctccaggctcctcgtgtggccatacaagggtgctgtggttttgtcccttgccttcctgcctagtctcacatgtccctgttcctcttcccctggccagggcccctgcgcagactgtcagagtcattaagcgggatcccagcatctcagagtccagtcaagttccctcctgcagcctgacccctaggcagctcgagcatgccctgagctctctgaaagttgtcaccctggaatagggtcctgcagggtagaataaaa

SEQ ID NO: 124349 - DNA, 2562 bp, Homo sapiens
  Payload ID: 4421
  Gene Symbol: CYP11B1
  Gene Name: cytochrome P450, family 11, subfamily B, polypeptide 1
  ENST ID: ENST00000519285
  CDS Start-End: 1-546
gccgccgcagccagcatcagtgaacatccccagaaggcaaccaccgagctgcccttgctgcgtgcggccctcaaggagaccttgcggaagggtgcagagagcacaggaagccccatccagctgaggaccctttctatggatgcccccacctccaggctctaccctgtgggtctgtttctggagcgagtggcgagctcagacttggtgcttcagaactaccacatcccagctgggacattggtgcgcgtgttcctctactctctgggtcgcaaccccgccttgttcccgaggcctgagcgctataacccccagcgctggctagacatcaggggctccggcaggaacttctaccacgtgccctttggctttggcatgcgccagtgccttgggcggcgcctggcagaggcagagatgctgctgctgctgcaccatgtgctgaaacacctccaggtggagacactaacccaagaggacataaagatggtctacagcttcatattgaggcccagcatgttccccctcctcaccttcagagccatcaactaatcacgtctctgcacccagggtcccagcctggccaccagcctccctttctgcctgaccccaggccacccctcttctctcccacatgcacagcttcctgagtcacccctctgtctaaccagccccagcacaaatggaactcccgagggcctctaggaccagggtttgccaggctaagcagcaatgccagggcacagctggggaagatcttgctgaccttgtccccagccccacctggccctttctccagcaagcactgtcctctgggcagtttgcccccatccctcccagtgctggctccaggctcctcgtgtggccatacaagggtgctgtggttttgtcccttgccttcctgcctagtctcacatgtccctgttcctcttcccctggccagggcccctgcgcagactgtcagagtcattaagcgggatcccagcatctcagagtccagtcaagttccctcctgcagcctgacccctaggcagctcgagcatgccctgagctctctgaaagttgtcaccctggaatagggtcctgcagggtagaataaaaaggcccctgtggtcacttgtcctgacatccccattttcaagtgatacaactgagtctcgagggacgtgtgttccccagctgatcgtgtcagcctcatgccccaggcctcatctttcatggaccaggccttgttccaggagtgggtgttgggtcctctgcttcctgtgctgtcccctggggaaggtcccgaggatgctgtcaggagatggaagagtcatgtggggtgggaacctggggtgtggttccagaaatgtttttggcaacaggagagacaggattgggccaacaaggactcagacgagttttattgactcatttctctggttgatacggagccatgtcatgtgccacgacctggggtgggcacagggaggctgcagtttcctgcgtgaacctgccttgggcctcatctgctcctagcccagcagagagagttgacccctcctgaactggccactccccagtgctcccgtgcagggagaggaagcacccagtttgagagtgtacccagccagactgtctttatctccatggattttcatcagggcaaagatcacagcagccagctcctggtggctgatgaggatcagagcatttgttcccccatgaaaggggaaatccctatggcatcattccagtggtggtcagtagatccaggacgccctgcaggactcagcctgtacagggagatgaagtgccccaggttgggagcacacctagctagagttatttgtgttaatctattcaggatgctctaagaaaacgccatagactgggttgctgacaaacatcagaattctatttctcatggttctgaaggcttagaaggctaagatcaaggtgtcagcaggttctgtgtctggtgaggacccacctcttgtttcatagataaaaccttcttgctgtgtcctcacatggtggaaaagggcaagacagctcacagagacctcttttataaggacgccagttccattcaagagggcactgcctgcattcccttcccccctcaaaggcccggccctgctattatcgtcaccttggtgactagatttcagcctatgaattctggaggcggacacaaaaattcagattaaactactctgcttctgtttctctaaaatctacatccttctcatatacaaaatacatgcatttctccccagtagccccaaatatcaactcattttagcatcaactttaaaattgtagtccaaagtgtgatttaaatgttatctgagtcaaacatgggtaagactcaaggtacaatttatcctgagtccaactgttcttgctgcgaacctatgaaatcaaacatgttatgtgcttccaaaatacagtggttggagaggcataggataaacattcccattccagaaaggagaaacaggaaagaagaaaggagtaacaagtttcaagcaactccaaaattgaatgtgacaaacagtattaaaccttaagcctcaagaa

SEQ ID NO: 124350 - DNA, 2936 bp, Homo sapiens
  Payload ID: 4422
  Gene Symbol: CYP11B2
  Gene Name: cytochrome P450, family 11, subfamily B, polypeptide 2
  Uniprot ID: P19099
  ENST ID: ENST00000323110
  CDS Start-End: 4-1515
ggaatggcactcagggcaaaggcagaggtgtgcgtggcagcgccctggctgtccctgcaaagggcacgggcactgggcactagagccgctcgggcccctaggacggtgctgccgtttgaagccatgccccagcatccaggcaacaggtggctgaggctgctgcagatctggagggagcagggttatgagcacctgcacctggagatgcaccagaccttccaggagctggggcccattttcaggtacaacttgggaggaccacgcatggtgtgtgtgatgctgccggaggatgtggagaagctgcaacaggtggacagcctgcatccctgcaggatgatcctggagccctgggtggcctacagacaacatcgtgggcacaaatgtggcgtgttcttgttgaatgggcctgaatggcgcttcaaccgattgcggctgaacccagatgtgctgtcgcccaaggccgtgcagaggttcctcccgatggtggatgcagtggccagggacttctcccaggccctgaagaagaaggtgctgcagaacgcccgggggagcctgaccctggacgtccagcccagcatcttccactacaccatagaagccagcaacttagctctttttggagagcggctgggcctggttggccacagccccagttctgccagcctgaacttcctccatgccctggaggtcatgttcaaatccaccgtccagctcatgttcatgcccaggagcctgtctcgctggatcagccccaaggtgtggaaggagcactttgaggcctgggactgcatcttccagtacggtgacaactgtatccagaaaatctaccaggaactggccttcaaccgccctcaacactacacaggcatcgtggcggagctcctgttgaaggcggaactgtcactagaagccatcaaggccaactctatggaactcactgcagggagcgtggacacgacagcgtttcccttgctgatgacgctctttgagctggctcggaaccccgacgtgcagcagatcctgcgccaggagagcctggccgccgcagccagcatcagtgaacatccccagaaggcaaccaccgagctgcccttgctgcgggcggccctcaaggagaccttgcggctctaccctgtgggtctgtttttggagcgagtggtgagctcagacttggtgcttcagaactaccacatcccagctgggacattggtacaggttttcctctactcgctgggtcgcaatgccgccttgttcccgaggcctgagcggtataatccccagcgctggctagacatcaggggctccggcaggaacttccaccacgtgccctttggctttggcatgcgccagtgcctcgggcggcgcctggcagaggcagagatgctgctgctgctgcaccacgtgctgaagcacttcctggtggagacactaactcaagaggacataaagatggtctacagcttcatattgaggcctggcacgtcccccctcctcactttcagagcgattaactagtcttgcatctgcacccagggtcccagcctggccaccagcttccctctgcctgaccccaggccacctgtcttctctcccacgtgcacagcttcctgagtcacccctctgtccagccagctcctgcacaaatggaactccccagggcctccaggactggggcttgccaggcttgtcaaatagcaaggccagggcacagctggagacgatcttgctggcagggcctggccttgtccccagctccacctggccccttctccagcaagcagtgccctctggacagcttgactctactcccagcgctggctccaggctcctcatgaggccatgcaagggtgctgtgattttgtcccttgccttcctgcctagtctcacatgtccctgtccctctcgccctggccagggcctctgtgcagacagtgtcagagtcattaagcgggatcccagcatctcagagtccagtcaagttccctcctgcagcctgaccccaggcagctcgagcatgccctgagctctctgaaagttgtcaccctggaatacgatcctgcagggtagactaaaaaggcccctgtggtcacttatcctgacacattttcaagtgatacaactgagtctcgaggggcgtgtgttccccagctgatcatgtcagcctcatgccccaggcctcgtctttcatggaccaggtcttgttcaagcagcgagtgttgggtcctctgcttcctgagctgtcccctggagaaggtcccgaggatgctgtcaggagatggaagagtcatgtggggtgggaacctggggtgtggttccagaaatgtttttggcaacaggagagacaggattgggccaacaaggactcagatgagttttattgactcattcctctggttgatacggagccatgtcatgtgccacgacctggggtgggcacagggaggctgcagttccctacgtgaacctgccttgggcctcatctgctcctagcccagcagagagagttgacccctcctgaactggccactccccagtgctcctgtgcagggataggaagtgccccagggtgagaacgtgcccagccacatcatctttatctcctgggattttcattagggcaaagatctcagcagccagctcctggtagctgatgaggatcagagcgtttgttcccccatgaaaggggaaatacttaggtaatcattccaggtgtgttcagtagttccaggactcagggactcaggccagtcaccctgtgaccgcaggttgctttcccaccctgggcaatgcagtgcagcatgggaaaggaataagggggcaacaaggtgcacagacctcagagatggcttccttgtttatggggctctcacagatacccatccaactcctctagtcagcactagatcatgggatcctaaaataaaccttggaaaaat

SEQ ID NO: 124351 - DNA, 1870 bp, Homo sapiens
  Payload ID: 4423
  Gene Symbol: CYP17A1
  Gene Name: cytochrome P450, family 17, subfamily A, polypeptide 1
  Uniprot ID: P05093
  ENST ID: ENST00000369887
  CDS Start-End: 173-1699
atatgagctcaggcctggctgggctccaggagaatctttccacaaggcaagagataacacaaagtcaaggtgaagatcagggtagccctttaaaaggcctccttgtgccctagagttgccacagctcttctactccactgctgtctatcttgcctgccggcacccagccaccatgtgggagctcgtggctctcttgctgcttaccctagcttatttgttttggcccaagagaaggtgccctggtgccaagtaccccaagagcctcctgtccctgcccctggtgggcagcctgccattcctccccagacacggccatatgcataacaacttcttcaagctgcagaaaaaatatggccccatctattcggttcgtatgggcaccaagactacagtgattgtcggccaccaccagctggccaaggaggtgcttattaagaagggcaaggacttctctgggcggcctcaaatggcaactctagacatcgcgtccaacaaccgtaagggtatcgccttcgctgactctggcgcacactggcagctgcatcgaaggctggcgatggccacctttgccctgttcaaggatggcgatcagaagctggagaagatcatttgtcaggaaatcagtacattgtgtgatatgctggccacccacaacggacagtccatagacatctcctttcctgtcttcgtggcggtaaccaatgtcatctccttgatctgcttcaatacctcctacaagaatggggaccctgagttgaatgtcatacagaattacaatgaaggcatcatagacaacctgagcaaagacagcctggtggacctagtcccctggttgaagattttccccaacaaaaccctggaaaaattaaagagccatgttaaaatacgaaatgatctgctgaataaaatacttgaaaattacaaggagaaattccggagtgactctatcaccaacatgctggacacactgatgcaagccaagatgaactcagataatggcaatgctggcccagatcaagactcagagctgctttcagataaccacattctcaccaccataggggacatctttggggctggcgtggagaccaccacctctgtggttaaatggaccctggccttcctgctgcacaatcctcaggtgaagaagaagctctacgaggagattgaccagaatgtgggtttcagccgcacaccaactatcagtgaccgtaaccgtctcctcctgctggaggccaccatccgagaggtgcttcgcctcaggcccgtggcccctatgctcatcccccacaaggccaacgttgactccagcatcggtgagtttgctgtggacaagggcacagaagttatcatcaatctgtgggcgctgcatcacaatgagaaggagtggcaccagccggatcagttcatgcctgagcgtttcttgaatccagcggggacccagctcatctcaccgtcagtaagctatttgcccttcggagcaggacctcgctcctgtataggtgagatcctggcccgccaggagctcttcctcatcatggcctggctgctgcagaggttcgacctggaggtgccagatgatgggcagctgccctccctggaaggcatccccaaggtggtctttctgatcgactctttcaaagtgaagatcaaggtgcgccaggcctggagggaagcccaggctgagggtagcacctaaaggctgtaactcacagcccctgtccaccctatgtggccccacaacacagatttagagatacaaccccccacccttctccgccattcttccctactcccaacccactctgccttctttttcagcttgtggcaatgccagtgatgtgcataaacagtttttttttttccataa

SEQ ID NO: 124352 - DNA, 4409 bp, Homo sapiens
  Payload ID: 4424
  Gene Symbol: CYP19A1
  Gene Name: cytochrome P450, family 19, subfamily A, polypeptide 1
  Uniprot ID: P11511
  ENST ID: ENST00000260433
  CDS Start-End: 148-1659
gcggtgtcagaaaccctgtggtgaaattcagcctgtggattccagaaatttggagtgttcttggggggaaaaatccgcacacacaaagcaacatttggaaatccctgtggactctaaattgccccctctgaggtcaaggaacacaagatggttttggaaatgctgaacccgatacattataacatcaccagcatcgtgcctgaagccatgcctgctgccaccatgccagtcctgctcctcactggcctttttctcttggtgtggaattatgagggcacatcctcaataccaggtcctggctactgcatgggaattggacccctcatctcccacggcagattcctgtggatggggatcggcagtgcctgcaactactacaaccgggtatatggagaattcatgcgagtctggatctctggagaggaaacactcattatcagcaagtcctcaagtatgttccacataatgaagcacaatcattacagctctcgattcggcagcaaacttgggctgcagtgcatcggtatgcatgagaaaggcatcatatttaacaacaatccagagctctggaaaacaactcgacccttctttatgaaagctctgtcaggccccggccttgttcgtatggtcacagtctgtgctgaatccctcaaaacacatctggacaggttggaggaggtgaccaatgaatcgggctatgtggacgtgttgacccttctgcgtcgtgtcatgctggacacctctaacacgctcttcttgaggatccctttggacgaaagtgctatcgtggttaaaatccaaggttattttgatgcatggcaagctctcctcatcaaaccagacatcttctttaagatttcttggctatacaaaaagtatgagaagtctgtcaaggatttgaaagatgccatagaagttctgatagcagaaaaaagacgcaggatttccacagaagagaaactggaagaatgtatggactttgccactgagttgattttagcagagaaacgtggtgacctgacaagagagaatgtgaaccagtgcatattggaaatgctgatcgcagctcctgacaccatgtctgtctctttgttcttcatgctatttctcattgcaaagcaccctaatgttgaagaggcaataataaaggaaatccagactgttattggtgagagagacataaagattgatgatatacaaaaattaaaagtgatggaaaacttcatttatgagagcatgcggtaccagcctgtcgtggacttggtcatgcgcaaagccttagaagatgatgtaatcgatggctacccagtgaaaaaggggacaaacattatcctgaatattggaaggatgcacagactcgagtttttccccaaacccaatgaatttactcttgaaaattttgcaaagaatgttccttataggtactttcagccatttggctttgggccccgtggctgtgcaggaaagtacatcgccatggtgatgatgaaagccatcctcgttacacttctgagacgattccacgtgaagacattgcaaggacagtgtgttgagagcatacagaagatacacgacttgtccttgcacccagatgagactaaaaacatgctggaaatgatctttaccccaagaaactcagacaggtgtctggaacactagagaaggctggtcagtacccactctggagcatttctcatcagtagttcacatacaaatcatccatccttgccaatagtgtcatcctcacagtgaacactcagtggcccatggcattttataggcatacctcctatgggttgtcaccaagctaggtgctatttgtcatctgctcctgttcacaccagagaaccaggctacaagagaaaaagcagaggccaagagtttgagggagaaatagtcggtgaagaaaccgtatccataaagacccgattccaccaaatgtgctttgagaaggataggccttcattaacaaaatgtatgtctggttccccagtagagctctactgcctcaacccaaggggatttttatgtctggggcagaaacactcaagttgattagaaagaccaggccaatgtcagggtacctggggccaaacccacctgctagtgtgaattaaagtactttaattttgttttctgtggaggtggaaaagcaacattcatagtctttggagaaatgcttagaaattcagcatttgacccttgctgtgaattaagcccaattaattcctgtttgtctacatatgatctgtctgtggcaaaagtttaatcagaggaaattctttcccagtctgtcgatttatgcctcagccacttgcctgtgctacaattcattgtgttacctgtagattcaggtaatacaaactatatataatcatcaagtaatacaaactaatttagtaatagcctgggttaagtattattagggccctgtgtctgctgtagaaaaaaaaattcacatgatgcacttcaaattcaaataaaaatccttttggcatgttcccatttttgcttagctcaattagtgtggctaaccaagagataactgtaaatgtgacattgatttgctcttactacagcttcagtgattgggggaggaaaagtcccaacccaatgggctcaaacttctaaggggtactcctctcatccccttatccttctccctcgacattttctccctctttcttcccatgaccccaaagccaagggcaacagatcagtaaagaacgtggtcagagtagaacccctgaagtattttttaatcctacctcaaaatttaacagttacctgagagatttaacattatctagttcattgaatcattgtatgtggtcatggataaattgcacaccttggaattcgctttctaaaggaaatcaaatgaatggaggaactttccaaacaccactttacttgtgttatatagccaatataactatctctactgaatgtcattgaaaaactaaaaaattaaacttatttacaaataggtaaatatttgtcattgaatccattgccatcccatttgactgttcttttcatcctactgtctagtaataagctgagtataagatgacagtgtaatctccctgaaagcaggagctactttctttcttttgtaatctatttccatccccatttccctgtcctgtctccctgtattcactcccaagctcagttctgaatagacattcctgctcagagatactcccaactgatgcagaaaccaaataaagaggtaggtattccaagaattcaagaatggacattagtaaagaataaaacatttatttgagcttggaattatttggatcatctatatggcctaaaaatatatggactatgcctgtgtacctgaatacgtatgtagtcaggtcaagacaatcatccaaataacttagacccctaaaagcaaggccaggatttgcaatttaatgtgtcccaattaattcacttgaaaattagtaacactctgtttacgttgcctctggctggagctgcatggtggaagaagcccaactttggatccatgtacttcacccatccaatactcttgggacatttatgtgtattttatctgtatatatgaagccaatgtctatgtctacacagtcaaagtgaaatgcatgtttgatatagctgtacatagatatctattttgcaggtacaaaaatatcctgggggaaaactgggagtggaagggtggggggtgggagtgagggacatgggggagggacaggaagaggagaagtgttggtttgaacgatccaagcaaactctcccagaatcaaattacctgggtagttgttcaacttttcactctgcttagcctgtatagacaaaccccatatatttgtagaggcttggccttggaattctggaataccattggcttttcagtaggctgatgaacacattttgaaaattctattatcttcagaattttgccccattgttaagtgcttaaccgtcactcttgaatgtgcaatgtgctgtggattccattttcatcagttctgaaagaactgcaatgtgtaaattatcagtgaaatgcatgcatataagggctctatcattatcaaattgtaaggacaattgtacccttctatatctttgggcatgctagacacccccatgccttcattgagatcccattttccccctctcaagtggaaaataatcacatccagcaagctctctcattattgagaaataccatttggaaattgccactttttattcctaagcagcacctttcactgttcatgatgctaatgttccacaaaagcatgtgccattggcccactgaaggatagagggacccttttcaatctatatcagctgggctctgggactgaatctctcacctattcttgcagaaagacatactaattaaaccttgtcaaagt

SEQ ID NO: 124353 - DNA, 4417 bp, Homo sapiens
  Payload ID: 4424
  Gene Symbol: CYP19A1
  Gene Name: cytochrome P450, family 19, subfamily A, polypeptide 1
  Uniprot ID: P11511
  ENST ID: ENST00000396402
  CDS Start-End: 155-1666
ggacagggttcagggagtttctggagggctgaacacgtggaggcaaacaggaaggtgaagaagaacttatcctatcaggacggaaggtcctgtgctcgggatcttccagacgtcgcgactctaaattgccccctctgaggtcaaggaacacaagatggttttggaaatgctgaacccgatacattataacatcaccagcatcgtgcctgaagccatgcctgctgccaccatgccagtcctgctcctcactggcctttttctcttggtgtggaattatgagggcacatcctcaataccaggtcctggctactgcatgggaattggacccctcatctcccacggcagattcctgtggatggggatcggcagtgcctgcaactactacaaccgggtatatggagaattcatgcgagtctggatctctggagaggaaacactcattatcagcaagtcctcaagtatgttccacataatgaagcacaatcattacagctctcgattcggcagcaaacttgggctgcagtgcatcggtatgcatgagaaaggcatcatatttaacaacaatccagagctctggaaaacaactcgacccttctttatgaaagctctgtcaggccccggccttgttcgtatggtcacagtctgtgctgaatccctcaaaacacatctggacaggttggaggaggtgaccaatgaatcgggctatgtggacgtgttgacccttctgcgtcgtgtcatgctggacacctctaacacgctcttcttgaggatccctttggacgaaagtgctatcgtggttaaaatccaaggttattttgatgcatggcaagctctcctcatcaaaccagacatcttctttaagatttcttggctatacaaaaagtatgagaagtctgtcaaggatttgaaagatgccatagaagttctgatagcagaaaaaagacgcaggatttccacagaagagaaactggaagaatgtatggactttgccactgagttgattttagcagagaaacgtggtgacctgacaagagagaatgtgaaccagtgcatattggaaatgctgatcgcagctcctgacaccatgtctgtctctttgttcttcatgctatttctcattgcaaagcaccctaatgttgaagaggcaataataaaggaaatccagactgttattggtgagagagacataaagattgatgatatacaaaaattaaaagtgatggaaaacttcatttatgagagcatgcggtaccagcctgtcgtggacttggtcatgcgcaaagccttagaagatgatgtaatcgatggctacccagtgaaaaaggggacaaacattatcctgaatattggaaggatgcacagactcgagtttttccccaaacccaatgaatttactcttgaaaattttgcaaagaatgttccttataggtactttcagccatttggctttgggccccgtggctgtgcaggaaagtacatcgccatggtgatgatgaaagccatcctcgttacacttctgagacgattccacgtgaagacattgcaaggacagtgtgttgagagcatacagaagatacacgacttgtccttgcacccagatgagactaaaaacatgctggaaatgatctttaccccaagaaactcagacaggtgtctggaacactagagaaggctggtcagtacccactctggagcatttctcatcagtagttcacatacaaatcatccatccttgccaatagtgtcatcctcacagtgaacactcagtggcccatggcattttataggcatacctcctatgggttgtcaccaagctaggtgctatttgtcatctgctcctgttcacaccagagaaccaggctacaagagaaaaagcagaggccaagagtttgagggagaaatagtcggtgaagaaaccgtatccataaagacccgattccaccaaatgtgctttgagaaggataggccttcattaacaaaatgtatgtctggttccccagtagagctctactgcctcaacccaaggggatttttatgtctggggcagaaacactcaagttgattagaaagaccaggccaatgtcagggtacctggggccaaacccacctgctagtgtgaattaaagtactttaattttgttttctgtggaggtggaaaagcaacattcatagtctttggagaaatgcttagaaattcagcatttgacccttgctgtgaattaagcccaattaattcctgtttgtctacatatgatctgtctgtggcaaaagtttaatcagaggaaattctttcccagtctgtcgatttatgcctcagccacttgcctgtgctacaattcattgtgttacctgtagattcaggtaatacaaactatatataatcatcaagtaatacaaactaatttagtaatagcctgggttaagtattattagggccctgtgtctgctgtagaaaaaaaaattcacatgatgcacttcaaattcaaataaaaatccttttggcatgttcccatttttgcttagctcaattagtgtggctaaccaagagataactgtaaatgtgacattgatttgctcttactacagcttcagtgattgggggaggaaaagtcccaacccaatgggctcaaacttctaaggggtactcctctcatccccttatccttctccctcgacattttctccctctttcttcccatgaccccaaagccaagggcaacagatcagtaaagaacgtggtcagagtagaacccctgaagtattttttaatcctacctcaaaatttaacagttacctgagagatttaacattatctagttcattgaatcattgtatgtggtcatggataaattgcacaccttggaattcgctttctaaaggaaatcaaatgaatggaggaactttccaaacaccactttacttgtgttatatagccaatataactatctctactgaatgtcattgaaaaactaaaaaattaaacttatttacaaataggtaaatatttgtcattgaatccattgccatcccatttgactgttcttttcatcctactgtctagtaataagctgagtataagatgacagtgtaatctccctgaaagcaggagctactttctttcttttgtaatctatttccatccccatttccctgtcctgtctccctgtattcactcccaagctcagttctgaatagacattcctgctcagagatactcccaactgatgcagaaaccaaataaagaggtaggtattccaagaattcaagaatggacattagtaaagaataaaacatttatttgagcttggaattatttggatcatctatatggcctaaaaatatatggactatgcctgtgtacctgaatacgtatgtagtcaggtcaagacaatcatccaaataacttagacccctaaaagcaaggccaggatttgcaatttaatgtgtcccaattaattcacttgaaaattagtaacactctgtttacgttgcctctggctggagctgcatggtggaagaagcccaactttggatccatgtacttcacccatccaatactcttgggacatttatgtgtattttatctgtatatatgaagccaatgtctatgtctacacagtcaaagtgaaatgcatgtttgatatagctgtacatagatatctattttgcaggtacaaaaatatcctgggggaaaactgggagtggaagggtggggggtgggagtgagggacatgggggagggacaggaagaggagaagtgttggtttgaacgatccaagcaaactctcccagaatcaaattacctgggtagttgttcaacttttcactctgcttagcctgtatagacaaaccccatatatttgtagaggcttggccttggaattctggaataccattggcttttcagtaggctgatgaacacattttgaaaattctattatcttcagaattttgccccattgttaagtgcttaaccgtcactcttgaatgtgcaatgtgctgtggattccattttcatcagttctgaaagaactgcaatgtgtaaattatcagtgaaatgcatgcatataagggctctatcattatcaaattgtaaggacaattgtacccttctatatctttgggcatgctagacacccccatgccttcattgagatcccattttccccctctcaagtggaaaataatcacatccagcaagctctctcattattgagaaataccatttggaaattgccactttttattcctaagcagcacctttcactgttcatgatgctaatgttccacaaaagcatgtgccattggcccactgaaggatagagggacccttttcaatctatatcagctgggctctgggactgaatctctcacctattcttgcagaaagacatactaattaaaccttgtcaaagta

SEQ ID NO: 124354 - DNA, 2388 bp, Homo sapiens
  Payload ID: 4424
  Gene Symbol: CYP19A1
  Gene Name: cytochrome P450, family 19, subfamily A, polypeptide 1
  Uniprot ID: P11511
  ENST ID: ENST00000396404
  CDS Start-End: 250-1761
gagtttctggagggctgaacacgtggaggcaaacaggaaggtgaagaagaacttatcctatcaggacggaaggtcctgtgctcgggatcttccagacgtcgcgcggtgtcagaaaccctgtggtgaaattcagcctgtggattccagaaatttggagtgttcttggggggaaaaatccgcacacacaaagcaacatttggaaatccctgtggactctaaattgccccctctgaggtcaaggaacacaagatggttttggaaatgctgaacccgatacattataacatcaccagcatcgtgcctgaagccatgcctgctgccaccatgccagtcctgctcctcactggcctttttctcttggtgtggaattatgagggcacatcctcaataccaggtcctggctactgcatgggaattggacccctcatctcccacggcagattcctgtggatggggatcggcagtgcctgcaactactacaaccgggtatatggagaattcatgcgagtctggatctctggagaggaaacactcattatcagcaagtcctcaagtatgttccacataatgaagcacaatcattacagctctcgattcggcagcaaacttgggctgcagtgcatcggtatgcatgagaaaggcatcatatttaacaacaatccagagctctggaaaacaactcgacccttctttatgaaagctctgtcaggccccggccttgttcgtatggtcacagtctgtgctgaatccctcaaaacacatctggacaggttggaggaggtgaccaatgaatcgggctatgtggacgtgttgacccttctgcgtcgtgtcatgctggacacctctaacacgctcttcttgaggatccctttggacgaaagtgctatcgtggttaaaatccaaggttattttgatgcatggcaagctctcctcatcaaaccagacatcttctttaagatttcttggctatacaaaaagtatgagaagtctgtcaaggatttgaaagatgccatagaagttctgatagcagaaaaaagacgcaggatttccacagaagagaaactggaagaatgtatggactttgccactgagttgattttagcagagaaacgtggtgacctgacaagagagaatgtgaaccagtgcatattggaaatgctgatcgcagctcctgacaccatgtctgtctctttgttcttcatgctatttctcattgcaaagcaccctaatgttgaagaggcaataataaaggaaatccagactgttattggtgagagagacataaagattgatgatatacaaaaattaaaagtgatggaaaacttcatttatgagagcatgcggtaccagcctgtcgtggacttggtcatgcgcaaagccttagaagatgatgtaatcgatggctacccagtgaaaaaggggacaaacattatcctgaatattggaaggatgcacagactcgagtttttccccaaacccaatgaatttactcttgaaaattttgcaaagaatgttccttataggtactttcagccatttggctttgggccccgtggctgtgcaggaaagtacatcgccatggtgatgatgaaagccatcctcgttacacttctgagacgattccacgtgaagacattgcaaggacagtgtgttgagagcatacagaagatacacgacttgtccttgcacccagatgagactaaaaacatgctggaaatgatctttaccccaagaaactcagacaggtgtctggaacactagagaaggctggtcagtacccactctggagcatttctcatcagtagttcacatacaaatcatccatccttgccaatagtgtcatcctcacagtgaacactcagtggcccatggcattttataggcatacctcctatgggttgtcaccaagctaggtgctatttgtcatctgctcctgttcacaccagagaaccaggctacaagagaaaaagcagaggccaagagtttgagggagaaatagtcggtgaagaaaccgtatccataaagacccgattccaccaaatgtgctttgagaaggataggccttcattaacaaaatgtatgtctggttccccagtagagctctactgcctcaacccaaggggatttttatgtctggggcagaaacactcaagttgattagaaagaccaggccaatgtcagggtacctggggccaaacccacctgctagtgtgaattaaagtactttaattttgttttctgtggaggtggaaaagcaacattcatagtctttggagaaatgcttagaaattcagcatttgacccttgctgtgaattaagcccaattaattcctgtttgtctacatatgatctgtctgtggcaaaagtttaatcagaggaaattctttc

SEQ ID NO: 124355 - DNA, 1697 bp, Homo sapiens
  Payload ID: 4424
  Gene Symbol: CYP19A1
  Gene Name: cytochrome P450, family 19, subfamily A, polypeptide 1
  Uniprot ID: P11511
  ENST ID: ENST00000405913
  CDS Start-End: 100-756
ggagctatagatgaaccttttaggggattctgtaatttttctgtccctttgatttccacaggactctaaattgccccctctgaggtcaaggaacacaagatggttttggaaatgctgaacccgatacattataacatcaccagcatcgtgcctgaagccatgcctgctgccaccatgccagtcctgctcctcactggcctttttctcttggtgtggaattatgagggcacatcctcaataccaggtcctggctactgcatgggaattggacccctcatctcccacggcagattcctgtggatggggatcggcagtgcctgcaactactacaaccgggtatatggagaattcatgcgagtctggatctctggagaggaaacactcattatcagcaagtcctcaagtatgttccacataatgaagcacaatcattacagctctcgattcggcagcaaacttgggctgcagtgcatcggtatgcatgagaaaggcatcatatttaacaacaatccagagctctggaaaacaactcgacccttctttatgaaagctctgtcaggccccggccttgttcgtatggtcacagtctgtgctgaatccctcaaaacacatctggacaggttggaggaggtgaccaatgaatcgggctatgtggacgtgttgacccttctgcgtcgtgtcatgctggacacctctaacacgctcttcttgaggatccctttggacggtactgaaattttcactctcacatcttgaccatctgtcctttactgaacaaggagctaggagggataacagaccaaaggaatcacatgccattttctacattgctcttgtttaaacatttctaagtactcctcgtttttttccctagtgtttctgctttgttcacttataaaatataaatttccataaagtaggggccagcatctactagccttttgtatctttcctcattactctaggaaatagaattctacccacagttgaaacttaacaaatgtgattagttcgtttggttattaacatatcctaccaccaatcaactttatatatttaaccatttccagttgttcttttgggcatgatatatacatacatatatacatacatacccacacatatatacacacactcctccctcaaagctactaaacatgaaaacattgtgcctatatgataaaaatgtcaatattgctggtgatactgatgctgatggaaatgacgatattagctgccattaacgtagtatctaatgtgtgccaaacaatattaaaaattgctgtatatacatgtttgccatttattatttataaccttaacaagatgtctcactcataagactactttccgcactatgatacagaaatgaatattaaaacatgtgcatgctcatgtcaaactcatagaacttgattttattttggcaggattaaaccaatttgcaacttgagtacaaatgccaatatttcagctagttcttgaaaagttgtgccattgtgcaaaagtcattgaattatttgataactttttaacctaatgaccaaacacctgacaggaatggaattcactggacttgtatctaattgttttacactgttttctatgggttacattttttattgccattgtgacctttatccacacactaacctggaaagtataggaataaaagaattggcattctttctgataca

SEQ ID NO: 124356 - DNA, 794 bp, Homo sapiens
  Payload ID: 4424
  Gene Symbol: CYP19A1
  Gene Name: cytochrome P450, family 19, subfamily A, polypeptide 1
  ENST ID: ENST00000405011
  CDS Start-End: 297-794
ggagtttctggagggctgaacacgtggaggcaaacaggaaggtgaagaagaacttatcctatcaggacggaaggtcctgtgctcgggatcttccagacgtcgccaactgatctcttagcaacaagaagcacctttataaaagatggcacacgaagagtgattgccagaaaagccacctggttcttaaacagccgcgcatcattagcaaaactcaccatcttcaagagtccaaaaactagaagtgaccagcagacccaggactctaaattgccccctctgaggtcaaggaacacaagatggttttggaaatgctgaacccgatacattataacatcaccagcatcgtgcctgaagccatgcctgctgccaccatgccagtcctgctcctcactggcctttttctcttggtgtggaattatgagggcacatcctcaataccaggtcctggctactgcatgggaattggacccctcatctcccacggcagattcctgtggatggggatcggcagtgcctgcaactactacaaccgggtatatggagaattcatgcgagtctggatctctggagaggaaacactcattatcagcaagtcctcaagtatgttccacataatgaagcacaatcattacagctctcgattcggcagcaaacttgggctgcagtgcatcggtatgcatgagaaaggcatcatatttaacaacaatccagagctctggaaaacaactcgacccttctttatgaaagctctgtcaggccccggccttgttcgtatggtcacagtctgtgctgaa

SEQ ID NO: 124357 - DNA, 1442 bp, Homo sapiens
  Payload ID: 4424
  Gene Symbol: CYP19A1
  Gene Name: cytochrome P450, family 19, subfamily A, polypeptide 1
  ENST ID: ENST00000439712
  CDS Start-End: 387-1442
gggagtttctggagggctgaacacgtggaggcaaacaggaaggtgaagaagaacttatcctatcaggacggaaggtcctgtgctcgggatcttccagacgtcgccatgtggaaaagctccctgagttccccgcctgccccacctgctgatttctcaggaccgctgataacagctttcatgtggaacttgggattaatatcaagcaagccatggattttgtctccactgaacttgggcatcatggacagtttccattccagcagttaagggcttcctgactttcaacagtggtgctgatcccagttctgaagagtggaacatcagagagcctcccctcctcagccacttgactctaaattgccccctctgaggtcaaggaacacaagatggttttggaaatgctgaacccgatacattataacatcaccagcatcgtgcctgaagccatgcctgctgccaccatgccagtcctgctcctcactggcctttttctcttggtgtggaattatgagggcacatcctcaataccaggtcctggctactgcatgggaattggacccctcatctcccacggcagattcctgtggatggggatcggcagtgcctgcaactactacaaccgggtatatggagaattcatgcgagtctggatctctggagaggaaacactcattatcagcaagtcctcaagtatgttccacataatgaagcacaatcattacagctctcgattcggcagcaaacttgggctgcagtgcatcggtatgcatgagaaaggcatcatatttaacaacaatccagagctctggaaaacaactcgacccttctttatgaaagctctgtcaggccccggccttgttcgtatggtcacagtctgtgctgaatccctcaaaacacatctggacaggttggaggaggtgaccaatgaatcgggctatgtggacgtgttgacccttctgcgtcgtgtcatgctggacacctctaacacgctcttcttgaggatccctttggacgaaagtgctatcgtggttaaaatccaaggttattttgatgcatggcaagctctcctcatcaaaccagacatcttctttaagatttcttggctatacaaaaagtatgagaagtctgtcaaggatttgaaagatgccatagaagttctgatagcagaaaaaagacgcaggatttccacagaagagaaactggaagaatgtatggactttgccactgagttgattttagcagagaaacgtggtgacctgacaagagagaatgtgaaccagtgcatattggaaatgctgatcgcagctcctgacaccatgtctgtctctttgttcttcatgctatttctcattgcaaagcaccctaatgttgaagaggcaataataaaggaaatccagactgttattggtgagagagacataaagattgatgatatacaaaaa

SEQ ID NO: 124358 - DNA, 1062 bp, Homo sapiens
  Payload ID: 4424
  Gene Symbol: CYP19A1
  Gene Name: cytochrome P450, family 19, subfamily A, polypeptide 1
  ENST ID: ENST00000453807
  CDS Start-End: 337-1062
tcagggagtttctggagggctgaacacgtggaggcaaacaggaaggtgaagaagaacttatcctatcaggacggaaggtcctgtgctcgggatcttccagacgtcgcgaccgctgataacagctttcatgtggaacttgggattaatatcaagcaagccatggattttgtctccactgaacttgggcatcatggacagtttccattccagcagttaagggcttcctgactttcaacagtggtgctgatcccagttctgaagagtggaacatcagagagcctcccctcctcagccacttgactctaaattgccccctctgaggtcaaggaacacaagatggttttggaaatgctgaacccgatacattataacatcaccagcatcgtgcctgaagccatgcctgctgccaccatgccagtcctgctcctcactggcctttttctcttggtgtggaattatgagggcacatcctcaataccaggtcctggctactgcatgggaattggacccctcatctcccacggcagattcctgtggatggggatcggcagtgcctgcaactactacaaccgggtatatggagaattcatgcgagtctggatctctggagaggaaacactcattatcagcaagtcctcaagtatgttccacataatgaagcacaatcattacagctctcgattcggcagcaaacttgggctgcagtgcatcggtatgcatgagaaaggcatcatatttaacaacaatccagagctctggaaaacaactcgacccttctttatgaaagctctgtcaggccccggccttgttcgtatggtcacagtctgtgctgaatccctcaaaacacatctggacaggttggaggaggtgaccaatgaatcgggctatgtggacgtgttgacccttctgcgtcgtgtcatgctggacacctctaacacgctcttcttgaggatccctttggacgaaagtgctatcgtggttaaaatccaaggttattttgatgcatggcaagctctcctcatcaaaccagacatcttctttaagatttcttggctatacaaa

SEQ ID NO: 124359 - DNA, 832 bp, Homo sapiens
  Payload ID: 4424
  Gene Symbol: CYP19A1
  Gene Name: cytochrome P450, family 19, subfamily A, polypeptide 1
  Uniprot ID: P11511
  ENST ID: ENST00000557858
  CDS Start-End: 120-776
cgtggaggcaaacaggaaggtgaagaagaacttatcctatcaggacggaaggtcctgtgctcgggatcttccagacgtcgcgactctaaattgccccctctgaggtcaaggaacacaagatggttttggaaatgctgaacccgatacattataacatcaccagcatcgtgcctgaagccatgcctgctgccaccatgccagtcctgctcctcactggcctttttctcttggtgtggaattatgagggcacatcctcaataccaggtcctggctactgcatgggaattggacccctcatctcccacggcagattcctgtggatggggatcggcagtgcctgcaactactacaaccgggtatatggagaattcatgcgagtctggatctctggagaggaaacactcattatcagcaagtcctcaagtatgttccacataatgaagcacaatcattacagctctcgattcggcagcaaacttgggctgcagtgcatcggtatgcatgagaaaggcatcatatttaacaacaatccagagctctggaaaacaactcgacccttctttatgaaagctctgtcaggccccggccttgttcgtatggtcacagtctgtgctgaatccctcaaaacacatctggacaggttggaggaggtgaccaatgaatcgggctatgtggacgtgttgacccttctgcgtcgtgtcatgctggacacctctaacacgctcttcttgaggatccctttggacggtactgaaattttcactctcacatcttgaccatctgtcctttactgaacaaggagctaggagggataacagaccaaaggaatcac

SEQ ID NO: 124360 - DNA, 458 bp, Homo sapiens
  Payload ID: 4424
  Gene Symbol: CYP19A1
  Gene Name: cytochrome P450, family 19, subfamily A, polypeptide 1
  ENST ID: ENST00000559653
  CDS Start-End: 1-415
tgacctgacaagagagaatgtgaaccagtgcatattggaaatgctgatcgcagctcctgacaccatgtctgtctctttgttcttcatgctatttctcattgcaaagcaccctaatgttgaagaggcaataataaaggaaatccagactgttattggtgagagagacataaagattgatgatatacaaaaattaaaagtgatggaaaacttcatttatgagagcatgcggtaccagcctgtcgtggacttggtcatgcgcaaagccttagaagatgatgtaatcgatggctacccagtgaaaaaggggacaaacattatcctgaatattggaaggatgcacagactcgagtttttccccaaacccaatgaatttactcttgaaaattttgcaaagaatgtaagagcccttccttaaaactgagtgtgccactcttgaaaatgtcaactgttaaatcctc

SEQ ID NO: 124361 - DNA, 993 bp, Homo sapiens
  Payload ID: 4424
  Gene Symbol: CYP19A1
  Gene Name: cytochrome P450, family 19, subfamily A, polypeptide 1
  ENST ID: ENST00000559980
  CDS Start-End: 478-993
gggagtttctggagggctgaacacgtggaggcaaacaggaaggtgaagaagaacttatcctatcaggacggaaggtcctgtgctcgggatcttccagacgtcgcactccactgtcagatccctctccaactcttcctgtgtgggatgatggcatttttcacagaagaagggggacatgttgatatggcctacaagcatgtggaaaagctccctgagttccccgcctgccccacctgctgatttctcaggaccgctgataacagctttcatgtggaacttgggattaatatcaagcaagccatggattttgtctccactgaacttgggcatcatggacagtttccattccagcagttaagggcttcctgactttcaacagtggtgctgatcccagttctgaagagtggaacatcagagagcctcccctcctcagccacttgactctaaattgccccctctgaggtcaaggaacacaagatggttttggaaatgctgaacccgatacattataacatcaccagcatcgtgcctgaagccatgcctgctgccaccatgccagtcctgctcctcactggcctttttctcttggtgtggaattatgagggcacatcctcaataccaggtcctggctactgcatgggaattggacccctcatctcccacggcagattcctgtggatggggatcggcagtgcctgcaactactacaaccgggtatatggagaattcatgcgagtctggatctctggagaggaaacactcattatcagcaagtcctcaagtatgttccacataatgaagcacaatcattacagctctcgattcggcagcaaacttgggctgcagtgcatcggtatgcatgagaaaggcatcatatttaacaacaatccagagctctggaaaacaactcgacccttctttatgaaagctctgtcaggccccggccttgttcgtatggtcacagtctgtgctgaatccctcaaaacacatctg

SEQ ID NO: 124362 - DNA, 1958 bp, Homo sapiens
  Payload ID: 4424
  Gene Symbol: CYP19A1
  Gene Name: cytochrome P450, family 19, subfamily A, polypeptide 1
  Uniprot ID: P11511
  ENST ID: ENST00000559878
  CDS Start-End: 153-1664
acattataaaacagtaagtgaatctgtactgtacagcaccctctgaagcaacaggagctatagatgaaccttttaggggattctgtaatttttctgtccctttgatttccacaggactctaaattgccccctctgaggtcaaggaacacaagatggttttggaaatgctgaacccgatacattataacatcaccagcatcgtgcctgaagccatgcctgctgccaccatgccagtcctgctcctcactggcctttttctcttggtgtggaattatgagggcacatcctcaataccaggtcctggctactgcatgggaattggacccctcatctcccacggcagattcctgtggatggggatcggcagtgcctgcaactactacaaccgggtatatggagaattcatgcgagtctggatctctggagaggaaacactcattatcagcaagtcctcaagtatgttccacataatgaagcacaatcattacagctctcgattcggcagcaaacttgggctgcagtgcatcggtatgcatgagaaaggcatcatatttaacaacaatccagagctctggaaaacaactcgacccttctttatgaaagctctgtcaggccccggccttgttcgtatggtcacagtctgtgctgaatccctcaaaacacatctggacaggttggaggaggtgaccaatgaatcgggctatgtggacgtgttgacccttctgcgtcgtgtcatgctggacacctctaacacgctcttcttgaggatccctttggacgaaagtgctatcgtggttaaaatccaaggttattttgatgcatggcaagctctcctcatcaaaccagacatcttctttaagatttcttggctatacaaaaagtatgagaagtctgtcaaggatttgaaagatgccatagaagttctgatagcagaaaaaagacgcaggatttccacagaagagaaactggaagaatgtatggactttgccactgagttgattttagcagagaaacgtggtgacctgacaagagagaatgtgaaccagtgcatattggaaatgctgatcgcagctcctgacaccatgtctgtctctttgttcttcatgctatttctcattgcaaagcaccctaatgttgaagaggcaataataaaggaaatccagactgttattggtgagagagacataaagattgatgatatacaaaaattaaaagtgatggaaaacttcatttatgagagcatgcggtaccagcctgtcgtggacttggtcatgcgcaaagccttagaagatgatgtaatcgatggctacccagtgaaaaaggggacaaacattatcctgaatattggaaggatgcacagactcgagtttttccccaaacccaatgaatttactcttgaaaattttgcaaagaatgttccttataggtactttcagccatttggctttgggccccgtggctgtgcaggaaagtacatcgccatggtgatgatgaaagccatcctcgttacacttctgagacgattccacgtgaagacattgcaaggacagtgtgttgagagcatacagaagatacacgacttgtccttgcacccagatgagactaaaaacatgctggaaatgatctttaccccaagaaactcagacaggtgtctggaacactagagaaggctggtcagtacccactctggagcatttctcatcagtagttcacatacaaatcatccatccttgccaatagtgtcatcctcacagtgaacactcagtggcccatggcattttataggcatacctcctatgggttgtcaccaagctaggtgctatttgtcatctgctcctgttcacaccagagaaccaggctacaagagaaaaagcagaggccaagagtttgagggagaaatagtcggtgaagaaaccgtatccataaagacccgattccaccaaatgtgctttgagaag

SEQ ID NO: 124363 - DNA, 1032 bp, Homo sapiens
  Payload ID: 4424
  Gene Symbol: CYP19A1
  Gene Name: cytochrome P450, family 19, subfamily A, polypeptide 1
  ENST ID: ENST00000558328
  CDS Start-End: 183-1032
gaacacgtggaggcaaacaggaaggtgaagaagaacttatcctatcaggacggaaggtcctgtgctcgggatcttccagacgtcgcgtatgtatctcttaatctgactgagccctcaacctgtgggatcagacactctttccaggactctaaattgccccctctgaggtcaaggaacacaagatggttttggaaatgctgaacccgatacattataacatcaccagcatcgtgcctgaagccatgcctgctgccaccatgccagtcctgctcctcactggcctttttctcttggtgtggaattatgagggcacatcctcaataccaggtcctggctactgcatgggaattggacccctcatctcccacggcagattcctgtggatggggatcggcagtgcctgcaactactacaaccgggtatatggagaattcatgcgagtctggatctctggagaggaaacactcattatcagcaagtcctcaagtatgttccacataatgaagcacaatcattacagctctcgattcggcagcaaacttgggctgcagtgcatcggtatgcatgagaaaggcatcatatttaacaacaatccagagctctggaaaacaactcgacccttctttatgaaagctctgtcaggccccggccttgttcgtatggtcacagtctgtgctgaatccctcaaaacacatctggacaggttggaggaggtgaccaatgaatcgggctatgtggacgtgttgacccttctgcgtcgtgtcatgctggacacctctaacacgctcttcttgaggatccctttggacgaaagtgctatcgtggttaaaatccaaggttattttgatgcatggcaagctctcctcatcaaaccagacatcttctttaagatttcttggctatacaaaaagtatgagaagtctgtcaaggatttgaaagatgccatagaagttctgatagcagaaaaaagacgcaggatttccacagaagagaaactggaagaatgtatggactttgccactgagttgattt

SEQ ID NO: 124364 - DNA, 592 bp, Homo sapiens
  Payload ID: 4424
  Gene Symbol: CYP19A1
  Gene Name: cytochrome P450, family 19, subfamily A, polypeptide 1
  ENST ID: ENST00000559646
  CDS Start-End: 99-592
gaacgtgaccaactggagcctgacaggaggtccctggcactggtcagcccatcaaaccaggactctaaattgccccctctgaggtcaaggaacacaagatggttttggaaatgctgaacccgatacattataacatcaccagcatcgtgcctgaagccatgcctgctgccaccatgccagtcctgctcctcactggcctttttctcttggtgtggaattatgagggcacatcctcaataccaggtcctggctactgcatgggaattggacccctcatctcccacggcagattcctgtggatggggatcggcagtgcctgcaactactacaaccgggtatatggagaattcatgcgagtctggatctctggagaggaaacactcattatcagcaagtcctcaagtatgttccacataatgaagcacaatcattacagctctcgattcggcagcaaacttgggctgcagtgcatcggtatgcatgagaaaggcatcatatttaacaacaatccagagctctggaaaacaactcgacccttctttatgaaagctctgtcaggccccggccttgttcgtatggtcacagtctgtgc

SEQ ID NO: 124365 - DNA, 1196 bp, Homo sapiens
  Payload ID: 4424
  Gene Symbol: CYP19A1
  Gene Name: cytochrome P450, family 19, subfamily A, polypeptide 1
  ENST ID: ENST00000557934
  CDS Start-End: 141-1196
gagtttctggagggctgaacacgtggaggcaaacaggaaggtgaagaagaacttatcctatcaggacggaaggtcctgtgctcgggatcttccagacgtcgcgactctaaattgccccctctgaggtcaaggaacacaagatggttttggaaatgctgaacccgatacattataacatcaccagcatcgtgcctgaagccatgcctgctgccaccatgccagtcctgctcctcactggcctttttctcttggtgtggaattatgagggcacatcctcaataccaggtcctggctactgcatgggaattggacccctcatctcccacggcagattcctgtggatggggatcggcagtgcctgcaactactacaaccgggtatatggagaattcatgcgagtctggatctctggagaggaaacactcattatcagcaagtcctcaagtatgttccacataatgaagcacaatcattacagctctcgattcggcagcaaacttgggctgcagtgcatcggtatgcatgagaaaggcatcatatttaacaacaatccagagctctggaaaacaactcgacccttctttatgaaagctctgtcaggccccggccttgttcgtatggtcacagtctgtgctgaatccctcaaaacacatctggacaggttggaggaggtgaccaatgaatcgggctatgtggacgtgttgacccttctgcgtcgtgtcatgctggacacctctaacacgctcttcttgaggatccctttggacgaaagtgctatcgtggttaaaatccaaggttattttgatgcatggcaagctctcctcatcaaaccagacatcttctttaagatttcttggctatacaaaaagtatgagaagtctgtcaaggatttgaaagatgccatagaagttctgatagcagaaaaaagacgcaggatttccacagaagagaaactggaagaatgtatggactttgccactgagttgattttagcagagaaacgtggtgacctgacaagagagaatgtgaaccagtgcatattggaaatgctgatcgcagctcctgacaccatgtctgtctctttgttcttcatgctatttctcattgcaaagcaccctaatgttgaagaggcaataataaaggaaatccagactgttattggtgagagagacataaagattgatgatatacaaaaa

SEQ ID NO: 124366 - DNA, 872 bp, Homo sapiens
  Payload ID: 4424
  Gene Symbol: CYP19A1
  Gene Name: cytochrome P450, family 19, subfamily A, polypeptide 1
  ENST ID: ENST00000561075
  CDS Start-End: 141-872
gagtttctggagggctgaacacgtggaggcaaacaggaaggtgaagaagaacttatcctatcaggacggaaggtcctgtgctcgggatcttccagacgtcgcgactctaaattgccccctctgaggtcaaggaacacaagatggttttggaaatgctgaacccgatacattataacatcaccagcatcgtgcctgaagccatgcctgctgccaccatgccagtcctgctcctcactggcctttttctcttggtgtggaattatgagggcacatcctcaataccaggtcctggctactgcatgggaattggacccctcatctcccacggcagattcctgtggatggggatcggcagtgcctgcaactactacaaccgggtatatggagaattcatgcgagtctggatctctggagaggaaacactcattatcagcaagtcctcaagtatgttccacataatgaagcacaatcattacagctctcgattcggcagcaaacttgggctgcagtgcatcggtatgcatgagaaaggcatcatatttaacaacaatccagagctctggaaaacaactcgacccttctttatgaaagaaagtgctatcgtggttaaaatccaaggttattttgatgcatggcaagctctcctcatcaaaccagacatcttctttaagatttcttggctatacaaaaagtatgagaagtctgtcaaggatttgaaagatgccatagaagttctgatagcagaaaaaagacgcaggatttccacagaagagaaactggaagaatgtatggactttgccactgagttgattttagcagagaaacgtggtgacctgacaagagagaatgtgaaccagtgcatattggaaatg

SEQ ID NO: 124367 - DNA, 123 bp, Homo sapiens
  Payload ID: 4424
  Gene Symbol: CYP19A1
  Gene Name: cytochrome P450, family 19, subfamily A, polypeptide 1
  ENST ID: ENST00000613097
  CDS Start-End: 1-123
aagtctgtggtaatacaactttggaagatttatgagtacaattggattggtttttttcccttgtgtctttgctgtttttcttggcctctcagcaaggatttgaaagatgccatagaagttctg

SEQ ID NO: 124368 - DNA, 1739 bp, Homo sapiens
  Payload ID: 4425
  Gene Symbol: CYP2A13
  Gene Name: cytochrome P450, family 2, subfamily A, polypeptide 13
  Uniprot ID: Q16696
  ENST ID: ENST00000330436
  CDS Start-End: 1-1485
atgctggcctcagggctgcttctggtgaccttgctggcctgcctgactgtgatggtcttgatgtcagtctggcggcagaggaagagcagggggaagctgcctccgggacccaccccattgcccttcattggaaactacctgcagctgaacacagagcagatgtacaactccctcatgaagatcagtgagcgctatggccctgtgttcaccattcacttggggccccggcgggtcgtggtgctgtgcggacatgatgccgtcaaggaggctctggtggaccaggctgaggagttcagcgggcgaggcgagcaggccaccttcgactggctcttcaaaggctatggcgtggcgttcagcaacggggagcgcgccaagcagctccggcgcttctccatcgccaccctaaggggttttggcgtgggcaagcgcggcatcgaggaacgcatccaggaggaggcgggcttcctcatcgacgccctccggggcacgcacggcgccaatatcgatcccaccttcttcctgagccgcacagtctccaatgtcatcagctccattgtctttggggaccgctttgactatgaggacaaagagttcctgtcactgttgcgcatgatgctgggaagcttccagttcacggcaacctccacggggcagctctatgagatgttctcttcggtgatgaaacacctgccaggaccacagcaacaggcctttaaggagctgcaagggctggaggacttcatcgccaagaaggtggagcacaaccagcgcacgctggatcccaattccccacgggacttcatcgactcctttctcatccgcatgcaggaggaggagaagaaccccaacacagagttctacttgaagaacctggtgatgaccaccctgaacctcttctttgcgggcactgagaccgtgagcaccaccctgcgctacggtttcctgctgctcatgaagcacccagaggtggaggccaaggtccatgaggagattgacagagtgatcggcaagaaccggcagcccaagtttgaggaccgggccaagatgccctacacagaggcagtgatccacgagatccaaagatttggagacatgctccccatgggtttggcccacagggtcaacaaggacaccaagtttcgggatttcttcctccctaagggcactgaagtgttccctatgctgggctccgtgctgagagaccccaggttcttctccaacccccgggacttcaatccccagcacttcctggataagaaggggcagtttaagaagagtgatgcttttgtgcccttttccatcggaaagcggtactgttttggagaaggcctggccagaatggagctctttctcttcttcaccaccatcatgcagaactttcgcttcaagtcccctcagtcgcctaaggatatcgacgtgtcccccaaacacgtgggctttgccacgatcccacgaaactacaccatgagcttcctgccccgctgagcgagggctgtgctggtgcagggctggtgggcggggccagggaaacggccggggcaggggcggggcttgtgggaggggcggggctaagaatgggggcagtgggggaaggaaggggagaggtggttagagggaacagaagaaacagaaggggctcagttcaccttgatgatgtccttcagagctgtgatgagaggaagggaaaccttacagtatgctacaaagagtagtaataatagcagctcttatttcctgaa

SEQ ID NO: 124369 - DNA, 1764 bp, Homo sapiens
  Payload ID: 4426
  Gene Symbol: CYP2A6
  Gene Name: cytochrome P450, family 2, subfamily A, polypeptide 6
  Uniprot ID: P11509
  ENST ID: ENST00000301141
  CDS Start-End: 22-1506
atctatcatcccactaccaccatgctggcctcagggatgcttctggtggccttgctggtctgcctgactgtaatggtcttgatgtctgtttggcagcagaggaagagcaaggggaagctgcctccgggacccaccccattgcccttcattggaaactacctgcagctgaacacagagcagatgtacaactccctcatgaagatcagtgagcgctatggccccgtgttcaccattcacttggggccccggcgggtcgtggtgctgtgtggacatgatgccgtcagggaggctctggtggaccaggctgaggagttcagcgggcgaggcgagcaagccaccttcgactgggtcttcaaaggctatggcgtggtattcagcaacggggagcgcgccaagcagctccggcgcttctccatcgccaccctgcgggacttcggggtgggcaagcgaggcatcgaggagcgcatccaggaggaggcgggcttcctcatcgacgccctccggggcactggcggcgccaatatcgatcccaccttcttcctgagccgcacagtctccaatgtcatcagctccattgtctttggggaccgctttgactataaggacaaagagttcctgtcactgttgcgcatgatgctaggaatcttccagttcacgtcaacctccacggggcagctctatgagatgttctcttcggtgatgaaacacctgccaggaccacagcaacaggcctttcagttgctgcaagggctggaggacttcatagccaagaaggtggagcacaaccagcgcacgctggatcccaattccccacgggacttcattgactcctttctcatccgcatgcaggaggaggagaagaaccccaacacggagttctacttgaaaaacctggtgatgaccacgttgaacctcttcattgggggcaccgagaccgtcagcaccaccctgcgctatggcttcttgctgctcatgaagcacccagaggtggaggccaaggtccatgaggagattgacagagtgatcggcaagaaccggcagcccaagtttgaggaccgggccaagatgccctacatggaggcagtgatccacgagatccaaagatttggagacgtgatccccatgagtttggcccgcagagtcaaaaaggacaccaagtttcgggatttcttcctccctaagggcaccgaagtgtaccctatgctgggctctgtgctgagagaccccagtttcttctccaacccccaggacttcaatccccagcacttcctgaatgagaaggggcagtttaagaagagtgatgcttttgtgcccttttccatcggaaagcggaactgtttcggagaaggcctggccagaatggagctctttctcttcttcaccaccgtcatgcagaacttccgcctcaagtcctcccagtcacctaaggacattgacgtgtcccccaaacacgtgggctttgccacgatcccacgaaactacaccatgagcttcctgccccgctgagcgagggctgtgccggtgcaggtctggtgggcggggccagggaaagggcagggccaagaccgggcttgggagaggggcgcagctaagactgggggcaggatggcggaaaggaaggggcgtggtggctagagggaagagaagaaacagaagcggctcagttcaccttgataaggtgcttccgagctgggatgagaggaaggaaacccttacattatgctatgaagagtagtaataatagcagctcttatttcctgagca

SEQ ID NO: 124370 - DNA, 931 bp, Homo sapiens
  Payload ID: 4426
  Gene Symbol: CYP2A6
  Gene Name: cytochrome P450, family 2, subfamily A, polypeptide 6
  ENST ID: ENST00000600495
  CDS Start-End: 22-219
atctatcatcccactaccaccatgctggcctcagggatgcttctggtggccttgctggtctgcctgactgtaatggtcttgatgtctgtttggcagcagaggaagagcaaggggaagctgcctccgggacccaccccattgcccttcattggaaactacctgcagctgaacacagagcagatgtacaactccctcatgaaggtgtcccaagatcagtgagcgctatggccccgtgttcaccattcacttggggccccggcgggtcgtggtgctgtgtggacatgatgccgtcagggaggctctggtggaccaggctgaggagttcagcgggcgaggcgagcaagccaccttcgactgggtcttcaaaggctatggcgtggtattcagcaacggggagcgcgccaagcagctccggcgcttctccatcgccaccctgcgggacttcggggtgggcaagcgaggcatcgaggagcgcatccaggaggaggcgggcttcctcatcgacgccctccggggcactggcggcgccaatatcgatcccaccttcttcctgagccgcacagtctccaatgtcatcagctccattgtctttggggaccgctttgactataaggacaaagagttcctgtcactgttgcgcatgatgctaggaatcttccagttcacgtcaacctccacggggcagctctatgagatgttctcttcggtgatgaaacacctgccaggaccacagcaacaggcctttcagttgctgcaagggctggaggacttcatagccaagaaggtggagcacaaccagcgcacgctggatcccaattccccacgggacttcattgactcctttctcatccgcatgcaggaggaggagaagaaccccaacacggagttctacttgaaaaacctggtgatgaccacgttgaacctcttcatt

SEQ ID NO: 124371 - DNA, 1485 bp, Homo sapiens
  Payload ID: 4426
  Gene Symbol: CYP2A6
  Gene Name: cytochrome P450, family 2, subfamily A, polypeptide 6
  ENST ID: ENST00000610301
  CDS Start-End: 1-1485
atgctggcctcagggctgcttctggtggccttgctggcctgcctgactgtgatggtcttgatgtctgtctggcagcagaggaagagcagggggaagctgcctccgggacccaccccattgcccttcattggaaactacctgcagctgaacacagagcagatgtacaactccctcatgaagatcagtgagcgctatggccccgtgttcaccattcacttggggccccggcgggtcgtggtgctgtgtggacatgatgccgtcagggaggctctggtggaccaggctgaggagttcagcgggcgaggcgagcaagccaccttcgactgggtcttcaaaggctatggcgtggtattcagcaacggggagcgcgccaagcagctccggcgcttctccatcgccaccctgcgggacttcggggtgggcaagcgaggcatcgaggagcgcatccaggaggaggcgggcttcctcatcgacgccctccggggcactggcggcgccaatatcgatcccaccttcttcctgagccgcacagtctccaatgtcatcagctccattgtctttggggaccgctttgactataaggacaaagagttcctgtcactgttgcgcatgatgctaggaatcttccagttcacgtcaacctccacggggcagctctatgagatgttctcttcggtgatgaaacacctgccaggaccacagcaacaggcctttcagttgctgcaagggctggaggacttcatagccaagaaggtggagcacaaccagcgcacgctggatcccaattccccacgggacttcattgactcctttctcatccgcatgcaggaggaggagaagaaccccaacacggagttctacttgaaaaacctggtgatgaccacgttgaacctcttcattgggggcaccgagaccgtcagcaccaccctgcgctatggcttcttgctgctcatgaagcacccagaggtggaggccaaggtccatgaggagattgacagagtgatcggcaagaaccggcagcccaagtttgaggaccgggccaagatgccctacatggaggcagtgatccacgagatccaaagatttggagacgtgatccccatgagtttggcccgcagagtcaaaaaggacaccaagtttcgggatttcttcctccctaagggcaccgaagtgtaccctatgctgggctctgtgctgagagaccccagtttcttctccaacccccaggacttcaatccccagcacttcctgaatgagaaggggcagtttaagaagagtgatgcttttgtgcccttttccatcggaaagcggaactgtttcggagaaggcctggccagaatggagctctttctcttcttcaccaccgtcatgcagaacttccgcctcaagtcctcccagtcacctaaggacattgacgtgtcccccaaacacgtgggctttgccacgatcccacgaaactacaccatgagcttcctgccccgctga

SEQ ID NO: 124372 - DNA, 2128 bp, Homo sapiens
  Payload ID: 4427
  Gene Symbol: CYP2A7
  Gene Name: cytochrome P450, family 2, subfamily A, polypeptide 7
  ENST ID: ENST00000291764
  CDS Start-End: 543-1874
ccctgggtcttcctagccccgagactttcaagtccatatgcctggagtcccccctcctgagacccttaaccctgcatcctccgcaacagaagacctccagatgcacagccacacttccatctcaccctaataaaacccagacctttggattcctctcccttggaatgcccaaatccacaactttggggtgcattctcactctcagaccccaaatccaaagcccaagtgctcccctatgcaaatattccaaactcttcagttctacagtttatcggttgccccctcctaaatccacagccctgcggcacccctcctgaagtaccacagatttagtctggaggccccctctctgttcagctgccctggggtccccttatcctcccttgctggctgtgtcccaagctaggtggcattcatggtggggcgtgtagttgggaggtgaaataaggtgattatgtaattagccaaagtccatccctctttttcaggcagtataaaggcaaaccaccccacccatcaccatctgtcatctcactaccaccatgctggcctcagggctgcttctggtggccttgctggcctgcctgactgtgatggtcttgatgtctgtctggcagcagaggaagagcagggggaagctgcctccgggacccaccccactgcccttcattggaaactacctccagctgaacacagagcacatatgtgactccatcatgaaggtgtcccaaggcgtggcgttcagcaacggggagcgcgccaagcagctcctgcgctttgccatcgccaccctgagggacttcggggtgggcaagcgaggcatcgaggagcgcatccaggaggagtcgggcttcctcatcgaggccatccggagcacgcacggcgccaatatcgatcccaccttcttcctgagccgcacagtctccaatgtcatcagctccattgtctttggggaccgctttgactatgaggacaaagagttcctgtcactgctgagcatgatgctaggaatcttccagttcacgtcaacctccacggggcagctctatgagatgttctcttcggtgatgaaacacctgccaggaccacagcaacaggcctttaagttgctgcaagggctggaggacttcatagccaagaaggtggagcacaaccagcgcacgctggatcccaattccccacaggacttcatcgactcctttctcatccacatgcaggaggaggagaagaaccccaacacggagttctacttgaagaacctgatgatgagcacgttgaacctcttcattgcaggcaccgagacggtcagcaccaccctgcgctatggcttcttgctgctcatgaagcacccagaggtggaggccaaggtccatgaggagattgacagagtgatcggcaagaaccggcagcccaagtttgaggaccggaccaagatgccctacatggaggcagtgatccacgagatccaaagatttggagacgtgatccccatgagtttggcccgcagggttaaaaaggacaccaagtttcgggattttttcctccctaagggcaccgaagtgttccctatgctgggctccgtgctgagagaccccagcttcttctccaaccctcaggacttcaatccccagcatttcctggatgacaaggggcagtttaagaagagtgatgcttttgtgcccttttccatcggaaagcggaactgtttcggagaaggcctggccagaatggagctctttctcttcttcaccaccgtcatgcagaacttccgcctcaagtcctcccagtcacctaaggacattgacgtgtcccccaaacacgtggtctttgccacgatcccacgaaactacaccatgagcttcctgccccgctgagcgagggctgtgccggtgcaggtctggtgggcggggccagggaaaggcggggtcagggcggggttcgcggaagaggcgggtataagaatggggggaagatgcgggaaaggaaggggcgtggtggctagagggaagagaagaaacagaagcggctcagttcaccttgataaggtgcttccgagctgggatgagaggaagggaaaccttacattatgctatgaagagtagtaataatagcagctcttatttcctga

SEQ ID NO: 124373 - DNA, 2281 bp, Homo sapiens
  Payload ID: 4427
  Gene Symbol: CYP2A7
  Gene Name: cytochrome P450, family 2, subfamily A, polypeptide 7
  Uniprot ID: P20853
  ENST ID: ENST00000301146
  CDS Start-End: 543-2027
ccctgggtcttcctagccccgagactttcaagtccatatgcctggagtcccccctcctgagacccttaaccctgcatcctccgcaacagaagacctccagatgcacagccacacttccatctcaccctaataaaacccagacctttggattcctctcccttggaatgcccaaatccacaactttggggtgcattctcactctcagaccccaaatccaaagcccaagtgctcccctatgcaaatattccaaactcttcagttctacagtttatcggttgccccctcctaaatccacagccctgcggcacccctcctgaagtaccacagatttagtctggaggccccctctctgttcagctgccctggggtccccttatcctcccttgctggctgtgtcccaagctaggtggcattcatggtggggcgtgtagttgggaggtgaaataaggtgattatgtaattagccaaagtccatccctctttttcaggcagtataaaggcaaaccaccccacccatcaccatctgtcatctcactaccaccatgctggcctcagggctgcttctggtggccttgctggcctgcctgactgtgatggtcttgatgtctgtctggcagcagaggaagagcagggggaagctgcctccgggacccaccccactgcccttcattggaaactacctccagctgaacacagagcacatatgtgactccatcatgaagttcagtgagtgctatggccccgtgttcaccattcacttggggccccggcgggtcgtggtgctgtgtggacatgatgccgtcagggaggctctggtggaccaggctgaggagttcagcgggcgaggcgagcaagccaccttcgactgggtcttcaaaggctatggcgtggcgttcagcaacggggagcgcgccaagcagctcctgcgctttgccatcgccaccctgagggacttcggggtgggcaagcgaggcatcgaggagcgcatccaggaggagtcgggcttcctcatcgaggccatccggagcacgcacggcgccaatatcgatcccaccttcttcctgagccgcacagtctccaatgtcatcagctccattgtctttggggaccgctttgactatgaggacaaagagttcctgtcactgctgagcatgatgctaggaatcttccagttcacgtcaacctccacggggcagctctatgagatgttctcttcggtgatgaaacacctgccaggaccacagcaacaggcctttaagttgctgcaagggctggaggacttcatagccaagaaggtggagcacaaccagcgcacgctggatcccaattccccacaggacttcatcgactcctttctcatccacatgcaggaggaggagaagaaccccaacacggagttctacttgaagaacctgatgatgagcacgttgaacctcttcattgcaggcaccgagacggtcagcaccaccctgcgctatggcttcttgctgctcatgaagcacccagaggtggaggccaaggtccatgaggagattgacagagtgatcggcaagaaccggcagcccaagtttgaggaccggaccaagatgccctacatggaggcagtgatccacgagatccaaagatttggagacgtgatccccatgagtttggcccgcagggttaaaaaggacaccaagtttcgggattttttcctccctaagggcaccgaagtgttccctatgctgggctccgtgctgagagaccccagcttcttctccaaccctcaggacttcaatccccagcatttcctggatgacaaggggcagtttaagaagagtgatgcttttgtgcccttttccatcggaaagcggaactgtttcggagaaggcctggccagaatggagctctttctcttcttcaccaccgtcatgcagaacttccgcctcaagtcctcccagtcacctaaggacattgacgtgtcccccaaacacgtggtctttgccacgatcccacgaaactacaccatgagcttcctgccccgctgagcgagggctgtgccggtgcaggtctggtgggcggggccagggaaaggcggggtcagggcggggttcgcggaagaggcgggtataagaatggggggaagatgcgggaaaggaaggggcgtggtggctagagggaagagaagaaacagaagcggctcagttcaccttgataaggtgcttccgagctgggatgagaggaagggaaaccttacattatgctatgaagagtagtaataatagcagctcttatttcctga

SEQ ID NO: 124374 - DNA, 572 bp, Homo sapiens
  Payload ID: 4427
  Gene Symbol: CYP2A7
  Gene Name: cytochrome P450, family 2, subfamily A, polypeptide 7
  ENST ID: ENST00000594332
  CDS Start-End: 22-264
atctgtcatctcactaccaccatgctggcctcagggctgcttctggtggccttgctggcctgcctgactgtgatggtcttgatgtctgtctggcagcagaggaagagcagggggaagctgcctccgggacccaccccactgcccttcattggaaactacctccagctgaacacagagcacatatgtgactccatcatgaaggcgtggcgttcagcaacggggagcgcgccaagcagctcctgcgctttgccatcgccaccctgagggacttcggggtgggcaagcgaggcatcgaggagcgcatccaggaggagtcgggcttcctcatcgaggccatccggagcacgcacggcgccaatatcgatcccaccttcttcctgagccgcacagtctccaatgtcatcagctccattgtctttggggaccgctttgactatgaggacaaagagttcctgtcactgctgagcatgatgctaggaatcttccagttcacgtcaacctccacggggcagctctatgagatgttctcttcggtgatgaaacacctgccaggaccacagcaacaggccttt

SEQ ID NO: 124375 - DNA, 3054 bp, Homo sapiens
  Payload ID: 4428
  Gene Symbol: CYP2B6
  Gene Name: cytochrome P450, family 2, subfamily B, polypeptide 6
  Uniprot ID: P20813
  ENST ID: ENST00000324071
  CDS Start-End: 8-1483
caggaccatggaactcagcgtcctcctcttccttgcactcctcacaggactcttgctactcctggttcagcgccaccctaacacccatgaccgcctcccaccagggccccgccctctgccccttttgggaaaccttctgcagatggatagaagaggcctactcaaatcctttctgaggttccgagagaaatatggggacgtcttcacggtacacctgggaccgaggcccgtggtcatgctgtgtggagtagaggccatacgggaggcccttgtggacaaggctgaggccttctctggccggggaaaaatcgccatggtcgacccattcttccggggatatggtgtgatctttgccaatggaaaccgctggaaggtgcttcggcgattctctgtgaccactatgagggacttcgggatgggaaagcggagtgtggaggagcggattcaggaggaggctcagtgtctgatagaggagcttcggaaatccaagggggccctcatggaccccaccttcctcttccagtccattaccgccaacatcatctgctccatcgtctttggaaaacgattccactaccaagatcaagagttcctgaagatgctgaacttgttctaccagactttttcactcatcagctctgtattcggccagctgtttgagctcttctctggcttcttgaaatactttcctggggcacacaggcaagtttacaaaaacctgcaggaaatcaatgcttacattggccacagtgtggagaagcaccgtgaaaccctggaccccagcgcccccaaggacctcatcgacacctacctgctccacatggaaaaagagaaatccaacgcacacagtgaattcagccaccagaacctcaacctcaacacgctctcgctcttctttgctggcactgagaccaccagcaccactctccgctacggcttcctgctcatgctcaaataccctcatgttgcagagagagtctacagggagattgaacaggtgattggcccacatcgccctccagagcttcatgaccgagccaaaatgccatacacagaggcagtcatctatgagattcagagattttccgaccttctccccatgggtgtgccccacattgtcacccaacacaccagcttccgagggtacatcatccccaaggacacagaagtatttctcatcctgagcactgctctccatgacccacactactttgaaaaaccagacgccttcaatcctgaccactttctggatgccaatggggcactgaaaaagactgaagcttttatccccttctccttagggaagcggatttgtcttggtgaaggcatcgcccgtgcggaattgttcctcttcttcaccaccatcctccagaacttctccatggccagccccgtggccccagaagacatcgatctgacaccccaggagtgtggtgtgggcaaaatacccccaacataccagatccgcttcctgccccgctgaaggggctgagggaagggggtcaaaggattccagggtcattcagtgtccccgcctctgtagacaatggctctgactccccgcaacttcctgcctctgagagacctgctacaagccagcttccttcccctccatggcaccagttgtctgaggtcacattgcaagtgagtgcaggagtgagattatcgaaaattataatatacaaaatcatatatatatatatgttcttgttttttgagacagagtctcacactgttgcccaggctggagtgcagtggcgtgatctcggctcactgcaacctccacccccggggatcaagcaactctcctgcctcagcctccctagtagctgggattacaggcatgcactaccacgcttggctaatttttgtatttttagtagagatggggtttcactgtgtaggccaggctggtctcgaactcctgaactcaagtgattcacccaccttagcctcccaaagtgctgggattacaggcgtgagtcaccgtgcccagccatgtatatatataattttaaaaattaagctgaaattcacataacataaaattagctgttttaaagtgtaaaatttagtggcgtgtggttcattcacaaagctgtacaaccaccaccatctagttccaaacattttctttttttctgagatggagtctcactctgtcacccaggttcgagttcagtggtgccatctctgtccactgcaacctccacatcctgggttcaagtgattctcctgcctcagcctctggaggagctggtatcacaggcgtcccccaccacgcctggctaaattttgtatttttaggtggtcttgaactcctgatgtcaggtgattctcctagctccaaatgttttcattatctctcccccaacaaaacccatacctatcaagctgtcactccccataccccattctctttttcatctcggcccctgtcaatctggtttttgtcactatggacttaccaattctgaatatttcccataaacagaatcatacaatatttgattttttttttttttttgaaactaagccttgctctgtctcccaggctggagtgctatggtgcaatttttgttcactgcaacctctgccttccaagatcaagagattctccagtctcagctcccaagtagctgggattacaggcatgtactaccatgcctggctaattttcttgtagttttagtagggacatgttggccaggctggtggtgagctcctggcctcaggtgatccacccacctcagtgttccaaagtgctgatattacaggcataatatgtgatcttttgtgtctggttgctttcatgttgaatgctatttttgaggttcatgcctgttgtagaccacagtcacacactgctgtagtcttccccagtcctcattcccagctgcctcttcctactgcttccgtctatcaaaaagcccccttggcccaggttccctgagctgtgggattctgcactggtgctttggattccctgatatgttccttcaaatctgctgagaattaaataaacatctctaaagcctgacctccccacgtcaa

SEQ ID NO: 124376 - DNA, 1426 bp, Homo sapiens
  Payload ID: 4428
  Gene Symbol: CYP2B6
  Gene Name: cytochrome P450, family 2, subfamily B, polypeptide 6
  ENST ID: ENST00000593831
  CDS Start-End: 113-880
acaaatgaggtgtatgctgactaacagccacccctggtgtggatgtgattggcagttccgagagaaatatggggacgtcttcacggtacacctgggaccgaggcccgtggtcatgctgtgtggagtagaggccatacgggaggcccttgtggacaaggctgaggccttctctggccggggaaaaatcgccatggtcgacccattcttccggggatatggtgtgatctttgccaatggaaaccgctggaaggtgcttcggcgattctctgtgaccactatgagggacttcgggatgggaaagcggagtgtggaggagcggattcaggaggaggctcagtgtctgatagaggagcttcggaaatccaaggagagagtctacagggagattgaacaggtgattggcccacatcgccctccagagcttcatgaccgagccaaaatgccatacacagaggcagtcatctatgagattcagagattttccgaccttctccccatgggtgtgccccacattgtcacccaacacaccagcttccgagggtacatcatccccaaggacacagaagtatttctcatcctgagcactgctctccatgacccacactactttgaaaaaccagacgccttcaatcctgaccactttctggatgccaatggggcactgaaaaagactgaagcttttatccccttctccttagggaagcggatttgtcttggtgaaggcatcgcccgtgcggaattgttcctcttcttcaccaccatcctccagaacttctccatggccagccccgtggccccagaagacatcgatctgacaccccaggagtgtggtgtgggcaaaatacccccaacataccagatccgcttcctgccccgctgaaggggctgagggaagggggtcaaaggattccagggtcattcagtgtccccgcctctgtagacaatggctctgactccccgcaacttcctgcctctgagagacctgctacaagccagcttccttcccctccatggcaccagttgtctgaggtcacattgcaagtgagtgcaggagtgagattatcgaaaattataatatacaaaatcatatatatatatatgttcttgttttttgagacagagtctcacactgttgcccaggctggagtgcagtggcgtgatctcggctcactgcaacctccacccccggggatcaagcaactctcctgcctcagcctccctagtagctgggattacaggcatgcactaccacgcttggctaatttttgtatttttagtagagatggggtttcactgtgtaggccaggctggtctcgaactcctgaactcaagtgattcacccaccttagcctcccaaagtgctgggattacaggcgtgagtcaccgtgcccagccatgtatatatataattttaaaaattaagctg

SEQ ID NO: 124377 - DNA, 2418 bp, Homo sapiens
  Payload ID: 4429
  Gene Symbol: CYP2C18
  Gene Name: cytochrome P450, family 2, subfamily C, polypeptide 18
  Uniprot ID: P33260
  ENST ID: ENST00000285979
  CDS Start-End: 200-1672
ggcaccggaaagaacaagaaaaaagaacaccttatttttatcttcttcagtgagccaatgttcattcaaaagagagattaaagtgctttttgctgactagtcacagtcagagtcagaatcacaggtggattagtagggagtgttataaaagccttgaagtgaaagcccgcagttgtcttactaagaagagaagccttcaatggatccagctgtggctctggtgctctgtctctcctgtttgtttctcctttcactctggaggcagagctctggaagagggaggctcccgtctggccccactcctctcccgattattggaaatatcctgcagttagatgttaaggacatgagcaaatccttaaccaatttctcaaaagtctatggccctgtgttcactgtgtattttggcctgaagcccattgtggtgttgcatggatatgaagcagtgaaggaggccctgattgatcatggagaggagttttctggaagaggaagttttccagtggctgaaaaagttaacaaaggacttggaatccttttcagcaatggaaagagatggaaggagatccggcgtttctgcctcatgactctgcggaattttgggatggggaagaggagcatcgaggaccgtgttcaagaggaagcccgctgccttgtggaggagttgagaaaaaccaatgcctcaccctgtgatcccactttcatcctgggctgtgctccctgcaatgtgatctgctctgttattttccatgatcgatttgattataaagatcagaggtttcttaacttgatggaaaaattcaatgaaaacctcaggattctgagctctccatggatccaggtctgcaataatttccctgctctcatcgattatctcccaggaagtcataataaaatagctgaaaattttgcttacattaaaagttatgtattggagagaataaaagaacatcaagaatccctggacatgaacagtgctcgggactttattgattgtttcctgatcaaaatggaacaggaaaagcacaatcaacagtctgaatttactgttgaaagcttgatagccactgtaactgatatgtttggggctggaacagagacaacgagcaccactctgagatatggactcctgctcctgctgaagtacccagaggtcacagctaaagtccaggaagagattgaatgtgtagttggcagaaaccggagcccctgtatgcaggacaggagtcacatgccctacacagatgctgtggtgcacgagatccagagatacattgacctcctccccaccaacctgccccatgcagtgacctgtgatgttaaattcaaaaactacctcatccccaagggcacgaccataataacatccctgacttctgtgctgcacaatgacaaagaattccccaacccagagatgtttgaccctggccactttctggataagagtggcaactttaagaaaagtgactacttcatgcctttctcagcaggaaaacggatgtgtatgggagagggcctggcccgcatggagctgtttttattcctgaccaccattttgcagaactttaacctgaaatctcaggttgacccaaaggatattgacatcacccccattgccaatgcatttggtcgtgtgccacccttgtaccagctctgcttcattcctgtctgaagaagggcagatagtttggctgctcctgtgctgtcacctgcaattctcccttatcagggccattggcctctcccttctctctgtgagggatattttctctgacttgtcaatccacatcttcccattccctcaagatccaatgaacatccaacctccattaaagagagtttcttgggtcacttcctaaatatatctgctattctccatactctgtatcacttgtattgaccaccacatatgctaatacctatctactgctgagttgtcagtatgttatcactagaaaacaaagaaaaatgattaataaatgacaattcagagccatttattctctgcatgctctagataaaaatgattattatttactgggtcagttcttagatttctttcttttgagtaaaatgaaagtaagaaatgaaagaaaatagaatgtgaagaggctgtgctggccctcatagtgttaagcacaaaaagggagaaaggtaagagggtaggaaagctgttttagctaaatgccacctagagttattggaggtctgaatttggaaaaaaaaactatgtccaggagcagctgtaacctgtagggaaatactggaacaatcatccataagagggatgaacattaagtgtttgaattcatgctctgcttttgtgttactgtaaacacaagatcaagatttggataatctttttcctttgtgtttccaacttagatcatgtctaaatatatgctttcatatggctaa

SEQ ID NO: 124378 - DNA, 1471 bp, Homo sapiens
  Payload ID: 4429
  Gene Symbol: CYP2C18
  Gene Name: cytochrome P450, family 2, subfamily C, polypeptide 18
  Uniprot ID: P33260
  ENST ID: ENST00000339022
  CDS Start-End: 46-1341
tgaagtgaaagcccgcagttgtcttactaagaagagaagccttcaatggatccagctgtggctctggtgctctgtctctcctgtttgtttctcctttcactctggaggcagagctctggaagagggaggctcccgtctggccccactcctctcccgattattggaaatatcctgcagttagatgttaaggacatgagcaaatccttaaccaatttctcaaaagtctatggccctgtgttcactgtgtattttggcctgaagcccattgtggtgttgcatggatatgaagcagtgaaggaggccctgattgatcatggagaggagttttctggaagaggaagttttccagtggctgaaaaagttaacaaaggacttggaatccttttcagcaatggaaagagatggaaggagatccggcgtttctgcctcatgactctgcggaattttgggatggggaagaggagcatcgaggaccgtgttcaagaggaagcccgctgccttgtggaggagttgagaaaaaccaatgcctcaccctgtgatcccactttcatcctgggctgtgctccctgcaatgtgatctgctctgttattttccatgatcgatttgattataaagatcagaggtttcttaacttgatggaaaaattcaatgaaaacctcaggattctgagctctccatggatccaggaaaagcacaatcaacagtctgaatttactgttgaaagcttgatagccactgtaactgatatgtttggggctggaacagagacaacgagcaccactctgagatatggactcctgctcctgctgaagtacccagaggtcacagctaaagtccaggaagagattgaatgtgtagttggcagaaaccggagcccctgtatgcaggacaggagtcacatgccctacacagatgctgtggtgcacgagatccagagatacattgacctcctccccaccaacctgccccatgcagtgacctgtgatgttaaattcaaaaactacctcatccccaagggcacgaccataataacatccctgacttctgtgctgcacaatgacaaagaattccccaacccagagatgtttgaccctggccactttctggataagagtggcaactttaagaaaagtgactacttcatgcctttctcagcaggaaaacggatgtgtatgggagagggcctggcccgcatggagctgtttttattcctgaccaccattttgcagaactttaacctgaaatctcaggttgacccaaaggatattgacatcacccccattgccaatgcatttggtcgtgtgccacccttgtaccagctctgcttcattcctgtctgaagaagggcagatagtttggctgctcctgtgctgtcacctgcaattctcccttatcagggccattggcctctcccttctctctgtgagggatattttctctgacttgtcaatccacatcttcccattccct

SEQ ID NO: 124379 - DNA, 1901 bp, Homo sapiens
  Payload ID: 4430
  Gene Symbol: CYP2C19
  Gene Name: cytochrome P450, family 2, subfamily C, polypeptide 19
  Uniprot ID: P33261
  ENST ID: ENST00000371321
  CDS Start-End: 83-1555
acacacacttaattagcatggagtgttataaaaagcttggagtgcaagctcacggttgtcttaacaagaggagaaggcttcaatggatccttttgtggtccttgtgctctgtctctcatgtttgcttctcctttcaatctggagacagagctctgggagaggaaaactccctcctggccccactcctctcccagtgattggaaatatcctacagatagatattaaggatgtcagcaaatccttaaccaatctctcaaaaatctatggccctgtgttcactctgtattttggcctggaacgcatggtggtgctgcatggatatgaagtggtgaaggaagccctgattgatcttggagaggagttttctggaagaggccatttcccactggctgaaagagctaacagaggatttggaatcgttttcagcaatggaaagagatggaaggagatccggcgtttctccctcatgacgctgcggaattttgggatggggaagaggagcattgaggaccgtgttcaagaggaagcccgctgccttgtggaggagttgagaaaaaccaaggcttcaccctgtgatcccactttcatcctgggctgtgctccctgcaatgtgatctgctccattattttccagaaacgtttcgattataaagatcagcaatttcttaacttgatggaaaaattgaatgaaaacatcaggattgtaagcaccccctggatccagatatgcaataattttcccactatcattgattatttcccgggaacccataacaaattacttaaaaaccttgcttttatggaaagtgatattttggagaaagtaaaagaacaccaagaatcgatggacatcaacaaccctcgggactttattgattgcttcctgatcaaaatggagaaggaaaagcaaaaccaacagtctgaattcactattgaaaacttggtaatcactgcagctgacttacttggagctgggacagagacaacaagcacaaccctgagatatgctctccttctcctgctgaagcacccagaggtcacagctaaagtccaggaagagattgaacgtgtcattggcagaaaccggagcccctgcatgcaggacaggggccacatgccctacacagatgctgtggtgcacgaggtccagagatacatcgacctcatccccaccagcctgccccatgcagtgacctgtgacgttaaattcagaaactacctcattcccaagggcacaaccatattaacttccctcacttctgtgctacatgacaacaaagaatttcccaacccagagatgtttgaccctcgtcactttctggatgaaggtggaaattttaagaaaagtaactacttcatgcctttctcagcaggaaaacggatttgtgtgggagagggcctggcccgcatggagctgtttttattcctgaccttcattttacagaactttaacctgaaatctctgattgacccaaaggaccttgacacaactcctgttgtcaatggatttgcttctgtcccgcccttctatcagctgtgcttcattcctgtctgaagaagcacagatggtctggctgctcctgtgctgtccctgcagctctctttcctctggtccaaatttcactatctgtgatgcttcttctgacccgtcatctcacattttcccttcccccaagatctagtgaacattcagcctccattaaaaaagtttcactgtgcaaatatatctgctattccccatactctataatagttacattgagtgccacataatgctgatacttgtctaatgttgagttattaacatattattattaaatagagaaagatgatttgtgtattataattcaaaggcatttcttctctgcatgttctaaacaaaaagcattattatttgctga

SEQ ID NO: 124380 - DNA, 1417 bp, Homo sapiens
  Payload ID: 4430
  Gene Symbol: CYP2C19
  Gene Name: cytochrome P450, family 2, subfamily C, polypeptide 19
  ENST ID: ENST00000480405
  CDS Start-End: 26-514
gtcttaacaagaggagaaggcttcaatggatccttttgtggtccttgtgctctgtctctcatgtttgcttctcctttcaatctggagacagagctctgggagaggaaaactccctcctggccccactcctctcccagtgattggaaatatcctacagatagatattaaggatgtcagcaaatccttaaccaatctctcaaaaatctatggccctgtgttcactctgtattttggcctggaacgcatggtggtgctgcatggatatgaagtggtgaaggaagccctgattgatcttggagaggagttttctggaagaggccatttcccactggctgaaagagctaacagaggatttggaatcgttttcagcaatggaaagagatggaaggagatccggcgtttctccctcatgacgctgcggaattttgggatggggaagaggagcattgaggaccgtgttcaagaggaagcccgctgccttgtggaggagttgagaaaaaccaagggtgggtgaacatactctctatcactgacctttctggactgctctcctctctactgacattcttggaaacatttcaggggtggccagatcttttatttggagtcctggttgttagctcatgtgaagcagggtttgaagctgagagccaagggaatttgcacatgtttgtgctgtgtgtgtacaggcatgattgtgcatacagtgtgggtataaaagttcatttaatcctatgttctcctgaactttgcttctttgttttcaaataagaaatgatgaatatagattttgagttcattttttgaaagagttaaagagcagtgtttttcccattatctattccagaacatgtcaccagagaatacttgacaagtggacatggtggaaatggccctatcacacccctagggagcatgaaccaaatggcatgtgcttttatttaattggactatgtttgtatggtcagcctcactgacttgtctagggtttcttttaggcccatgcttgccattctggccagtaatgacattctacagtttttattgcttaggcatatcttagtgtagttctcatcagcttttatttctctgtaaatacagcattatttaaaaaatagtgttaattatttcttgttactctattgattttgagtaaacatatgctatgacataattctgtgaaatacacaaatgtctatttataaaataatttatttaactagattttaattattagtaataactgtaatttttattccttaagtataatttggctctgtttcattttgcttatctctttccaatcatatttatgaaattttggcttagaaatttatggtaattattattttccactgccaactctactcacctatgaagttttacaatgaatcagtttatcagcttggataccaaa

SEQ ID NO: 124381 - DNA, 1923 bp, Homo sapiens
  Payload ID: 4431
  Gene Symbol: CYP2C8
  Gene Name: cytochrome P450, family 2, subfamily C, polypeptide 8
  Uniprot ID: P10632
  ENST ID: ENST00000371270
  CDS Start-End: 96-1568
acatgtcaaagagacacacactaaattagcagggagtgttataaaaactttggagtgcaagctcacagctgtcttaataagaagagaaggcttcaatggaaccttttgtggtcctggtgctgtgtctctcttttatgcttctcttttcactctggagacagagctgtaggagaaggaagctccctcctggccccactcctcttcctattattggaaatatgctacagatagatgttaaggacatctgcaaatctttcaccaatttctcaaaagtctatggtcctgtgttcaccgtgtattttggcatgaatcccatagtggtgtttcatggatatgaggcagtgaaggaagccctgattgataatggagaggagttttctggaagaggcaattccccaatatctcaaagaattactaaaggacttggaatcatttccagcaatggaaagagatggaaggagatccggcgtttctccctcacaaccttgcggaattttgggatggggaagaggagcattgaggaccgtgttcaagaggaagctcactgccttgtggaggagttgagaaaaaccaaggcttcaccctgtgatcccactttcatcctgggctgtgctccctgcaatgtgatctgctccgttgttttccagaaacgatttgattataaagatcagaattttctcaccctgatgaaaagattcaatgaaaacttcaggattctgaactccccatggatccaggtctgcaataatttccctctactcattgattgtttcccaggaactcacaacaaagtgcttaaaaatgttgctcttacacgaagttacattagggagaaagtaaaagaacaccaagcatcactggatgttaacaatcctcgggactttatcgattgcttcctgatcaaaatggagcaggaaaaggacaaccaaaagtcagaattcaatattgaaaacttggttggcactgtagctgatctatttgttgctggaacagagacaacaagcaccactctgagatatggactcctgctcctgctgaagcacccagaggtcacagctaaagtccaggaagagattgatcatgtaattggcagacacaggagcccctgcatgcaggataggagccacatgccttacactgatgctgtagtgcacgagatccagagatacagtgaccttgtccccaccggtgtgccccatgcagtgaccactgatactaagttcagaaactacctcatccccaagggcacaaccataatggcattactgacttccgtgctacatgatgacaaagaatttcctaatccaaatatctttgaccctggccactttctagataagaatggcaactttaagaaaagtgactacttcatgcctttctcagcaggaaaacgaatttgtgcaggagaaggacttgcccgcatggagctatttttatttctaaccacaattttacagaactttaacctgaaatctgttgatgatttaaagaacctcaatactactgcagttaccaaagggattgtttctctgccaccctcataccagatctgcttcatccctgtctgaagaatgctagcccatctggctgccgatctgctatcacctgcaactctttttttatcaaggacattcccactattatgtcttctctgacctctcatcaaatcttcccattcactcaatatcccataagcatccaaactccattaaggagagttgttcaggtcactgcacaaatatatctgcaattattcatactctgtaacacttgtattaattgctgcatatgctaatacttttctaatgctgactttttaatatgttatcactgtaaaacacagaaaagtgattaatgaatgataatttagatccatttcttttgtgaatgtgctaaataaaaagtgttattaattgctggttc

SEQ ID NO: 124382 - DNA, 1868 bp, Homo sapiens
  Payload ID: 4431
  Gene Symbol: CYP2C8
  Gene Name: cytochrome P450, family 2, subfamily C, polypeptide 8
  ENST ID: ENST00000527420
  CDS Start-End: 2-1183
aatggaaccttttgtggtcctggtgctgtgtctctcttttatgcttctcttttcactctggagacagagctgtaggagaaggaagctccctcctggccccactcctcttcctattattggaaatatgctacagatagatgttaaggacatctgcaaatctttcaccaatttctcaaaagtctatggtcctgtgttcaccgtgtattttggcatgaatcccatagtggtgtttcatggatatgaggcagtgaaggaagccctgattgataatggagaggagttttctggaagaggcaattccccaatatctcaaagaattactaaaggacttggaatcatttccagcaatggaaagagatggaaggagatccggcgtttctccctcacaaccttgcggaattttgggatggggaagaggagcattgaggaccgtgttcaagaggaagctcactgccttgtggaggagttgagaaaaaccaaggcttcaccctgtgatcccactttcatcctgggctgtgctccctgcaatgtgatctgctccgttgttttccagaaacgatttgattataaagatcagaattttctcaccctgatgaaaagattcaatgaaaacttcaggattctgaactccccatggatccaggtctgcaataatttccctctactcattgattgtttcccaggaactcacaacaaagtgcttaaaaatgttgctcttacacgaagttacattagggagaaagtaaaagaacaccaagcatcactggatgttaacaatcctcgggactttatcgattgcttcctgatcaaaatggagcaggaaaaggacaaccaaaagtcagaattcaatattgaaaacttggttggcactgtagctgatctatttgttgctggaacagagacaacaagcaccactctgagatatggactcctgctcctgctgaagcacccagaggtcacagctaaagtccaggaagagattgatcatgtaattggcagacacaggagcccctgcatgcaggataggagccacatgccttacactgatgctgtagtgcacgagatccagagatacagtgaccttgtccccaccggtgtgccccatgcagtgaccactgatactaagttcagaaactacctcatccccaagagctttgataacaagataatgctggctgcataaaactagggcacaaccataatggcattactgacttccgtgctacatgatgacaaagaatttcctaatccaaatatctttgaccctggccactttctagataagaatggcaactttaagaaaagtgactacttcatgcctttctcagcaggaaaacgaatttgtgcaggagaaggacttgcccgcatggagctatttttatttctaaccacaattttacagaactttaacctgaaatctgttgatgatttaaagaacctcaatactactgcagttaccaaagggattgtttctctgccaccctcataccagatctgcttcatccctgtctgaagaatgctagcccatctggctgccgatctgctatcacctgcaactctttttttatcaaggacattcccactattatgtcttctctgacctctcatcaaatcttcccattcactcaatatcccataagcatccaaactccattaaggagagttgttcaggtcactgcacaaatatatctgcaattattcatactctgtaacacttgtattaattgctgcatatgctaatacttttctaatgctgactttttaatatgttatcactgtaaaacacagaaaagtgattaatgaatgataatttagatccatttcttttgtgaatgtgctaaataaaaagtgttattaattgctggttc

SEQ ID NO: 124383 - DNA, 1961 bp, Homo sapiens
  Payload ID: 4431
  Gene Symbol: CYP2C8
  Gene Name: cytochrome P450, family 2, subfamily C, polypeptide 8
  ENST ID: ENST00000490994
  CDS Start-End: 96-347
acatgtcaaagagacacacactaaattagcagggagtgttataaaaactttggagtgcaagctcacagctgtcttaataagaagagaaggcttcaatggaaccttttgtggtcctggtgctgtgtctctcttttatgcttctcttttcactctggagacagagctgtaggagaaggaagctccctcctggccccactcctcttcctattattggaaatatgctacagatagatgttaaggacatctgcaaatctttcaccaatgtaagtctgccttatgttcctccagccaattgcaaaggttctcaaaagtctatggtcctgtgttcaccgtgtattttggcatgaatcccatagtggtgtttcatggatatgaggcagtgaaggaagccctgattgataatggagaggagttttctggaagaggcaattccccaatatctcaaagaattactaaaggacttggaatcatttccagcaatggaaagagatggaaggagatccggcgtttctccctcacaaccttgcggaattttgggatggggaagaggagcattgaggaccgtgttcaagaggaagctcactgccttgtggaggagttgagaaaaaccaaggcttcaccctgtgatcccactttcatcctgggctgtgctccctgcaatgtgatctgctccgttgttttccagaaacgatttgattataaagatcagaattttctcaccctgatgaaaagattcaatgaaaacttcaggattctgaactccccatggatccaggtctgcaataatttccctctactcattgattgtttcccaggaactcacaacaaagtgcttaaaaatgttgctcttacacgaagttacattagggagaaagtaaaagaacaccaagcatcactggatgttaacaatcctcgggactttatcgattgcttcctgatcaaaatggagcaggaaaaggacaaccaaaagtcagaattcaatattgaaaacttggttggcactgtagctgatctatttgttgctggaacagagacaacaagcaccactctgagatatggactcctgctcctgctgaagcacccagaggtcacagctaaagtccaggaagagattgatcatgtaattggcagacacaggagcccctgcatgcaggataggagccacatgccttacactgatgctgtagtgcacgagatccagagatacagtgaccttgtccccaccggtgtgccccatgcagtgaccactgatactaagttcagaaactacctcatccccaagggcacaaccataatggcattactgacttccgtgctacatgatgacaaagaatttcctaatccaaatatctttgaccctggccactttctagataagaatggcaactttaagaaaagtgactacttcatgcctttctcagcaggaaaacgaatttgtgcaggagaaggacttgcccgcatggagctatttttatttctaaccacaattttacagaactttaacctgaaatctgttgatgatttaaagaacctcaatactactgcagttaccaaagggattgtttctctgccaccctcataccagatctgcttcatccctgtctgaagaatgctagcccatctggctgccgatctgctatcacctgcaactctttttttatcaaggacattcccactattatgtcttctctgacctctcatcaaatcttcccattcactcaatatcccataagcatccaaactccattaaggagagttgttcaggtcactgcacaaatatatctgcaattattcatactctgtaacacttgtattaattgctgcatatgctaatacttttctaatgctgactttttaatatgttatcactgtaaaacacagaaaagtgattaatgaatgataatttagatccatttcttttgtgaatgtgctaaataaaaagtgttattaattgctggttc

SEQ ID NO: 124384 - DNA, 1587 bp, Homo sapiens
  Payload ID: 4431
  Gene Symbol: CYP2C8
  Gene Name: cytochrome P450, family 2, subfamily C, polypeptide 8
  ENST ID: ENST00000525991
  CDS Start-End: 96-395
acatgtcaaagagacacacactaaattagcagggagtgttataaaaactttggagtgcaagctcacagctgtcttaataagaagagaaggcttcaatggaaccttttgtggtcctggtgctgtgtctctcttttatgcttctcttttcactctggagacagagctgtaggagaaggaagctccctcctggccccactcctcttcctattattggaaatatgctacagatagatgttaaggacatctgcaaatctttcaccaatgtaagtctgccttatgttcctccagccaattgcaaagggaatcatttccagcaatggaaagagatggaaggagatccggcgtttctccctcacaaccttgcggaattttgggatggggaagaggagcattgaggaccgtgttcaagaggaagctcactgccttgtggaggagttgagaaaaaccaaggcttcaccctgtgatcccactttcatcctgggctgtgctccctgcaatgtgatctgctccgttgttttccagaaacgatttgattataaagatcagaattttctcaccctgatgaaaagattcaatgaaaacttcaggattctgaactccccatggatccaggtctgcaataatttccctctactcattgattgtttcccaggaactcacaacaaagtgcttaaaaatgttgctcttacacgaagttacattagggagaaagtaaaagaacaccaagcatcactggatgttaacaatcctcgggactttatcgattgcttcctgatcaaaatggagcaggaaaaggacaaccaaaagtcagaattcaatattgaaaacttggttggcactgtagctgatctatttgttgctggaacagagacaacaagcaccactctgagatatggactcctgctcctgctgaagcacccagaggtcacagctaaagtccaggaagagattgatcatgtaattggcagacacaggagcccctgcatgcaggataggagccacatgccttacactgatgctgtagtgcacgagatccagagatacagtgaccttgtccccaccggtgtgccccatgcagtgaccactgatactaagttcagaaactacctcatccccaagggcacaaccataatggcattactgacttccgtgctacatgatgacaaagaatttcctaatccaaatatctttgaccctggccactttctagataagaatggcaactttaagaaaagtgactacttcatgcctttctcagcaggaaaacgaatttgtgcaggagaaggacttgcccgcatggagctatttttatttctaaccacaattttacagaactttaacctgaaatctgttgatgatttaaagaacctcaatactactgcagttaccaaagggattgtttctctgccaccctcataccagatctgcttcatccctgtctgaagaatgctagcccatctggctgccgatctgctatcacctgcaactctttttttatcaaggacattcccactattatgtcttctctgacctctcatcaaatcttcccattcactcaatatcccataagcatccaaactccattaa

SEQ ID NO: 124385 - DNA, 2024 bp, Homo sapiens
  Payload ID: 4431
  Gene Symbol: CYP2C8
  Gene Name: cytochrome P450, family 2, subfamily C, polypeptide 8
  ENST ID: ENST00000539050
  CDS Start-End: 406-1668
acatgtcaaagagacacacactaaattagcagggagtgttataaaaactttggagtgcaagctcacagctgtcttaataagaagagaaggcttcaatggaaccttttgtggtcctggtgctgtgtctctcttttatgcttctcttttcactctggagacagagctgtaggagaaggaagctccctcctggccccactcctcttcctattattggaaatatgctacagatagatgttaaggacatctgcaaatctttcaccaatgtaagtctgccttatgttcctccagccaattgcaaaggtgttttgctatgatttttgactgaaggtgaagggaagtgtgtgtgattagaaatttcatccattctcaaaagtctatggtcctgtgttcaccgtgtattttggcatgaatcccatagtggtgtttcatggatatgaggcagtgaaggaagccctgattgataatggagaggagttttctggaagaggcaattccccaatatctcaaagaattactaaaggacttggaatcatttccagcaatggaaagagatggaaggagatccggcgtttctccctcacaaccttgcggaattttgggatggggaagaggagcattgaggaccgtgttcaagaggaagctcactgccttgtggaggagttgagaaaaaccaaggcttcaccctgtgatcccactttcatcctgggctgtgctccctgcaatgtgatctgctccgttgttttccagaaacgatttgattataaagatcagaattttctcaccctgatgaaaagattcaatgaaaacttcaggattctgaactccccatggatccaggtctgcaataatttccctctactcattgattgtttcccaggaactcacaacaaagtgcttaaaaatgttgctcttacacgaagttacattagggagaaagtaaaagaacaccaagcatcactggatgttaacaatcctcgggactttatcgattgcttcctgatcaaaatggagcaggaaaaggacaaccaaaagtcagaattcaatattgaaaacttggttggcactgtagctgatctatttgttgctggaacagagacaacaagcaccactctgagatatggactcctgctcctgctgaagcacccagaggtcacagctaaagtccaggaagagattgatcatgtaattggcagacacaggagcccctgcatgcaggataggagccacatgccttacactgatgctgtagtgcacgagatccagagatacagtgaccttgtccccaccggtgtgccccatgcagtgaccactgatactaagttcagaaactacctcatccccaagggcacaaccataatggcattactgacttccgtgctacatgatgacaaagaatttcctaatccaaatatctttgaccctggccactttctagataagaatggcaactttaagaaaagtgactacttcatgcctttctcagcaggaaaacgaatttgtgcaggagaaggacttgcccgcatggagctatttttatttctaaccacaattttacagaactttaacctgaaatctgttgatgatttaaagaacctcaatactactgcagttaccaaagggattgtttctctgccaccctcataccagatctgcttcatccctgtctgaagaatgctagcccatctggctgccgatctgctatcacctgcaactctttttttatcaaggacattcccactattatgtcttctctgacctctcatcaaatcttcccattcactcaatatcccataagcatccaaactccattaaggagagttgttcaggtcactgcacaaatatatctgcaattattcatactctgtaacacttgtattaattgctgcatatgctaatacttttctaatgctgactttttaatatgttatcactgtaaaacacagaaaagtgattaatgaatgataatttagatccatttcttttgtgaatgtgctaaataaaaagtgttattaattgctggttca

SEQ ID NO: 124386 - DNA, 1799 bp, Homo sapiens
  Payload ID: 4431
  Gene Symbol: CYP2C8
  Gene Name: cytochrome P450, family 2, subfamily C, polypeptide 8
  Uniprot ID: P10632
  ENST ID: ENST00000535898
  CDS Start-End: 277-1443
acatgtcaaagagacacacactaaattagcagggagtgttataaaaactttggagtgcaagctcacagctgtcttaataagaagagaaggcttcaatggaaccttttgtggtcctggtgctgtgtctctcttttatgcttctcttttcactctggagacagagctgtaggagaaggaagctccctcctggccccactcctcttcctattattggaaatatgctacagatagatgttaaggacatctgcaaatctttcaccaatgtaagtctgccttatgttcctccagccaattgcaaagggaatcatttccagcaatggaaagagatggaaggagatccggcgtttctccctcacaaccttgcggaattttgggatggggaagaggagcattgaggaccgtgttcaagaggaagctcactgccttgtggaggagttgagaaaaaccaaggcttcaccctgtgatcccactttcatcctgggctgtgctccctgcaatgtgatctgctccgttgttttccagaaacgatttgattataaagatcagaattttctcaccctgatgaaaagattcaatgaaaacttcaggattctgaactccccatggatccaggtctgcaataatttccctctactcattgattgtttcccaggaactcacaacaaagtgcttaaaaatgttgctcttacacgaagttacattagggagaaagtaaaagaacaccaagcatcactggatgttaacaatcctcgggactttatcgattgcttcctgatcaaaatggagcaggaaaaggacaaccaaaagtcagaattcaatattgaaaacttggttggcactgtagctgatctatttgttgctggaacagagacaacaagcaccactctgagatatggactcctgctcctgctgaagcacccagaggtcacagctaaagtccaggaagagattgatcatgtaattggcagacacaggagcccctgcatgcaggataggagccacatgccttacactgatgctgtagtgcacgagatccagagatacagtgaccttgtccccaccggtgtgccccatgcagtgaccactgatactaagttcagaaactacctcatccccaagggcacaaccataatggcattactgacttccgtgctacatgatgacaaagaatttcctaatccaaatatctttgaccctggccactttctagataagaatggcaactttaagaaaagtgactacttcatgcctttctcagcaggaaaacgaatttgtgcaggagaaggacttgcccgcatggagctatttttatttctaaccacaattttacagaactttaacctgaaatctgttgatgatttaaagaacctcaatactactgcagttaccaaagggattgtttctctgccaccctcataccagatctgcttcatccctgtctgaagaatgctagcccatctggctgccgatctgctatcacctgcaactctttttttatcaaggacattcccactattatgtcttctctgacctctcatcaaatcttcccattcactcaatatcccataagcatccaaactccattaaggagagttgttcaggtcactgcacaaatatatctgcaattattcatactctgtaacacttgtattaattgctgcatatgctaatacttttctaatgctgactttttaatatgttatcactgtaaaacacagaaaagtgattaatgaatgataatttagatccatttcttttgtgaatgtgctaaataaaaagtgttattaattgctggttca

SEQ ID NO: 124387 - DNA, 1962 bp, Homo sapiens
  Payload ID: 4431
  Gene Symbol: CYP2C8
  Gene Name: cytochrome P450, family 2, subfamily C, polypeptide 8
  ENST ID: ENST00000623108
  CDS Start-End: 344-1606
acatgtcaaagagacacacactaaattagcagggagtgttataaaaactttggagtgcaagctcacagctgtcttaataagaagagaaggcttcaatggaaccttttgtggtcctggtgctgtgtctctcttttatgcttctcttttcactctggagacagagctgtaggagaaggaagctccctcctggccccactcctcttcctattattggaaatatgctacagatagatgttaaggacatctgcaaatctttcaccaatgtaagtctgccttatgttcctccagccaattgcaaaggttctcaaaagtctatggtcctgtgttcaccgtgtattttggcatgaatcccatagtggtgtttcatggatatgaggcagtgaaggaagccctgattgataatggagaggagttttctggaagaggcaattccccaatatctcaaagaattactaaaggacttggaatcatttccagcaatggaaagagatggaaggagatccggcgtttctccctcacaaccttgcggaattttgggatggggaagaggagcattgaggaccgtgttcaagaggaagctcactgccttgtggaggagttgagaaaaaccaaggcttcaccctgtgatcccactttcatcctgggctgtgctccctgcaatgtgatctgctccgttgttttccagaaacgatttgattataaagatcagaattttctcaccctgatgaaaagattcaatgaaaacttcaggattctgaactccccatggatccaggtctgcaataatttccctctactcattgattgtttcccaggaactcacaacaaagtgcttaaaaatgttgctcttacacgaagttacattagggagaaagtaaaagaacaccaagcatcactggatgttaacaatcctcgggactttatcgattgcttcctgatcaaaatggagcaggaaaaggacaaccaaaagtcagaattcaatattgaaaacttggttggcactgtagctgatctatttgttgctggaacagagacaacaagcaccactctgagatatggactcctgctcctgctgaagcacccagaggtcacagctaaagtccaggaagagattgatcatgtaattggcagacacaggagcccctgcatgcaggataggagccacatgccttacactgatgctgtagtgcacgagatccagagatacagtgaccttgtccccaccggtgtgccccatgcagtgaccactgatactaagttcagaaactacctcatccccaagggcacaaccataatggcattactgacttccgtgctacatgatgacaaagaatttcctaatccaaatatctttgaccctggccactttctagataagaatggcaactttaagaaaagtgactacttcatgcctttctcagcaggaaaacgaatttgtgcaggagaaggacttgcccgcatggagctatttttatttctaaccacaattttacagaactttaacctgaaatctgttgatgatttaaagaacctcaatactactgcagttaccaaagggattgtttctctgccaccctcataccagatctgcttcatccctgtctgaagaatgctagcccatctggctgccgatctgctatcacctgcaactctttttttatcaaggacattcccactattatgtcttctctgacctctcatcaaatcttcccattcactcaatatcccataagcatccaaactccattaaggagagttgttcaggtcactgcacaaatatatctgcaattattcatactctgtaacacttgtattaattgctgcatatgctaatacttttctaatgctgactttttaatatgttatcactgtaaaacacagaaaagtgattaatgaatgataatttagatccatttcttttgtgaatgtgctaaataaaaagtgttattaattgctggttca

SEQ ID NO: 124388 - DNA, 924 bp, Homo sapiens
  Payload ID: 4431
  Gene Symbol: CYP2C8
  Gene Name: cytochrome P450, family 2, subfamily C, polypeptide 8
  ENST ID: ENST00000628935
  CDS Start-End: 1-924
atggctgccaagtgttgcagcactttcttccttggctgtgaattctcccagtttctgcccctttttttattaggaatcatttccagcaatggaaagagatggaaggagatccggcgtttctccctcacaaccttgcggaattttgggatggggaagaggagcattgaggaccgtgttcaagaggaagctcactgccttgtggaggagttgagaaaaaccaaggcttcaccctgtgatcccactttcatcctgggctgtgctccctgcaatgtgatctgctccgttgttttccagaaacgatttgattataaagatcagaattttctcaccctgatgaaaagattcaatgaaaacttcaggattctgaactccccatggatccaggtctgcaataatttccctctactcattgattgtttcccaggaactcacaacaaagtgcttaaaaatgttgctcttacacgaagttacattagggagaaagtaaaagaacaccaagcatcactggatgttaacaatcctcgggactttatcgattgcttcctgatcaaaatggagcaggaaaaggacaaccaaaagtcagaattcaatattgaaaacttggttggcactgtagctgatctatttgttgctggaacagagacaacaagcaccactctgagatatggactcctgctcctgctgaagcacccagaggtcacagctaaagtccaggaagagattgatcatgtaattggcagacacaggagcccctgcatgcaggataggagccacatgccttacactgatgctgtagtgcacgagatccagagatacagtgaccttgtccccaccggtgtgccccatgcagtgaccactgatactaagttcagaaactacctcatccccaagagctttgataacaagataatgctggctgcataa

SEQ ID NO: 124389 - DNA, 1847 bp, Homo sapiens
  Payload ID: 4432
  Gene Symbol: CYP2C9
  Gene Name: cytochrome P450, family 2, subfamily C, polypeptide 9
  Uniprot ID: P11712
  ENST ID: ENST00000260682
  CDS Start-End: 13-1485
gagaaggcttcaatggattctcttgtggtccttgtgctctgtctctcatgtttgcttctcctttcactctggagacagagctctgggagaggaaaactccctcctggccccactcctctcccagtgattggaaatatcctacagataggtattaaggacatcagcaaatccttaaccaatctctcaaaggtctatggccctgtgttcactctgtattttggcctgaaacccatagtggtgctgcatggatatgaagcagtgaaggaagccctgattgatcttggagaggagttttctggaagaggcattttcccactggctgaaagagctaacagaggatttggaattgttttcagcaatggaaagaaatggaaggagatccggcgtttctccctcatgacgctgcggaattttgggatggggaagaggagcattgaggaccgtgttcaagaggaagcccgctgccttgtggaggagttgagaaaaaccaaggcctcaccctgtgatcccactttcatcctgggctgtgctccctgcaatgtgatctgctccattattttccataaacgttttgattataaagatcagcaatttcttaacttaatggaaaagttgaatgaaaacatcaagattttgagcagcccctggatccagatctgcaataatttttctcctatcattgattacttcccgggaactcacaacaaattacttaaaaacgttgcttttatgaaaagttatattttggaaaaagtaaaagaacaccaagaatcaatggacatgaacaaccctcaggactttattgattgcttcctgatgaaaatggagaaggaaaagcacaaccaaccatctgaatttactattgaaagcttggaaaacactgcagttgacttgtttggagctgggacagagacgacaagcacaaccctgagatatgctctccttctcctgctgaagcacccagaggtcacagctaaagtccaggaagagattgaacgtgtgattggcagaaaccggagcccctgcatgcaagacaggagccacatgccctacacagatgctgtggtgcacgaggtccagagatacattgaccttctccccaccagcctgccccatgcagtgacctgtgacattaaattcagaaactatctcattcccaagggcacaaccatattaatttccctgacttctgtgctacatgacaacaaagaatttcccaacccagagatgtttgaccctcatcactttctggatgaaggtggcaattttaagaaaagtaaatacttcatgcctttctcagcaggaaaacggatttgtgtgggagaagccctggccggcatggagctgtttttattcctgacctccattttacagaactttaacctgaaatctctggttgacccaaagaaccttgacaccactccagttgtcaatggatttgcctctgtgccgcccttctaccagctgtgcttcattcctgtctgaagaagagcagatggcctggctgctgctgtgcagtccctgcagctctctttcctctggggcattatccatctttcactatctgtaatgccttttctcacctgtcatctcacattttcccttccctgaagatctagtgaacattcgacctccattacggagagtttcctatgtttcactgtgcaaatatatctgctattctccatactctgtaacagttgcattgactgtcacataatgctcatacttatctaatgttgagttattaatatgttattattaaatagagaaatatgatttgtgtattataattcaaaggcatttcttttctgcatgttctaaataaaaagcattattatttgctg

SEQ ID NO: 124390 - DNA, 1433 bp, Homo sapiens
  Payload ID: 4433
  Gene Symbol: CYP2D6
  Gene Name: cytochrome P450, family 2, subfamily D, polypeptide 6
  Uniprot ID: P10635
  ENST ID: ENST00000359033
  CDS Start-End: 75-1415
gcctggtcctctgtgcctggtggggtgggggtgccaggtgtgtccagaggagcccatttggtagtgaggcaggtatggggctagaagcactggtgcccctggccgtgatagtggccatcttcctgctcctggtggacctgatgcaccggcgccaacgctgggctgcacgctacccaccaggccccctgccactgcccgggctgggcaacctgctgcatgtggacttccagaacacaccatactgcttcgaccagttgcggcgccgcttcggggacgtgttcagcctgcagctggcctggacgccggtggtcgtgctcaatgggctggcggccgtgcgcgaggcgctggtgacccacggcgaggacaccgccgaccgcccgcctgtgcccatcacccagatcctgggtttcgggccgcgttcccaaggacgcccctttcgccccaacggtctcttggacaaagccgtgagcaacgtgatcgcctccctcacctgcgggcgccgcttcgagtacgacgaccctcgcttcctcaggctgctggacctagctcaggagggactgaaggaggagtcgggctttctgcgcgaggtgctgaatgctgtccccgtcctcctgcatatcccagcgctggctggcaaggtcctacgcttccaaaaggctttcctgacccagctggatgagctgctaactgagcacaggatgacctgggacccagcccagcccccccgagacctgactgaggccttcctggcagagatggagaaggccaaggggaaccctgagagcagcttcaatgatgagaacctgcgcatagtggtggctgacctgttctctgccgggatggtgaccacctcgaccacgctggcctggggcctcctgctcatgatcctacatccggatgtgcagcgccgtgtccaacaggagatcgacgacgtgatagggcaggtgcggcgaccagagatgggtgaccaggctcacatgccctacaccactgccgtgattcatgaggtgcagcgctttggggacatcgtccccctgggtgtgacccatatgacatcccgtgacatcgaagtacagggcttccgcatccctaagggaacgacactcatcaccaacctgtcatcggtgctgaaggatgaggccgtctgggagaagcccttccgcttccaccccgaacacttcctggatgcccagggccactttgtgaagccggaggccttcctgcctttctcagcaggccgccgtgcatgcctcggggagcccctggcccgcatggagctcttcctcttcttcacctccctgctgcagcacttcagcttctcggtgcccactggacagccccggcccagccaccatggtgtctttgctttcctggtgagcccatccccctatgagctttgtgctgtgccccgctagaatggggtacctagtccc

SEQ ID NO: 124391 - DNA, 1187 bp, Homo sapiens
  Payload ID: 4433
  Gene Symbol: CYP2D6
  Gene Name: cytochrome P450, family 2, subfamily D, polypeptide 6
  ENST ID: ENST00000360124
  CDS Start-End: 1-543
ttgcggcgccgcttcggggacgtgttcagcctgcagctggcctggacgccggtggtcgtgctcaatgggctggcggccgtgcgcgaggcgctggtgacccacggcgaggacaccgccgaccgcccgcctgtgcccatcacccagatcctgggtttcgggccgcgttcccaaggacgcccctttcgccccaacggtctcttggacaaagccgtgagcaacgtgatcgcctccctcacctgcgggcgccgcttcgagtacgacgaccctcgcttcctcaggctgctggacctagctcaggagggactgaaggaggagtcgggctttctgcgcgaggtgctgaatgctgtccccgtcctcctgcatatcccagcgctggctggcaaggtcctacgcttccaaaaggctttcctgacccagctggatgagctgctaactgagcacaggatgacctgggacccagcccagcccccccgagacctgactgaggccttcctggcagagatggagaagtggtggctgacctgttctctgccgggatggtgaccacctcgaccacgctggcctggggcctcctgctcatgatcctacatccggatgtgcagcgccgtgtccaacaggagatcgacgacgtgatagggcaggtgcggcgaccagagatgggtgaccaggctcacatgccctacaccactgccgtgattcatgaggtgcagcgctttggggacatcgtccccctgggtgtgacccatatgacatcccgtgacatcgaagtacagggcttccgcatccctaagggaacgacactcatcaccaacctgtcatcggtgctgaaggatgaggccgtctgggagaagcccttccgcttccaccccgaacacttcctggatgcccagggccactttgtgaagccggaggccttcctgcctttctcagcaggccgccgtgcatgcctcggggagcccctggcccgcatggagctcttcctcttcttcacctccctgctgcagcacttcagcttctcggtgcccactggacagccccggcccagccaccatggtgtctttgctttcctggtgagcccatccccctatgagctttgtgctgtgccccgctagaatggggtacctagtccccagcctgctccctagccagaggctctaatgtacaataaagcaatgtggtagttccaa

SEQ ID NO: 124392 - DNA, 1684 bp, Homo sapiens
  Payload ID: 4433
  Gene Symbol: CYP2D6
  Gene Name: cytochrome P450, family 2, subfamily D, polypeptide 6
  Uniprot ID: P10635
  ENST ID: ENST00000360608
  CDS Start-End: 116-1609
ataagggaagggtcacgcgctcggtgtgctgagagtgtcctgcctggtcctctgtgcctggtggggtgggggtgccaggtgtgtccagaggagcccatttggtagtgaggcaggtatggggctagaagcactggtgcccctggccgtgatagtggccatcttcctgctcctggtggacctgatgcaccggcgccaacgctgggctgcacgctacccaccaggccccctgccactgcccgggctgggcaacctgctgcatgtggacttccagaacacaccatactgcttcgaccagttgcggcgccgcttcggggacgtgttcagcctgcagctggcctggacgccggtggtcgtgctcaatgggctggcggccgtgcgcgaggcgctggtgacccacggcgaggacaccgccgaccgcccgcctgtgcccatcacccagatcctgggtttcgggccgcgttcccaaggggtgttcctggcgcgctatgggcccgcgtggcgcgagcagaggcgcttctccgtgtccaccttgcgcaacttgggcctgggcaagaagtcgctggagcagtgggtgaccgaggaggccgcctgcctttgtgccgccttcgccaaccactccggacgcccctttcgccccaacggtctcttggacaaagccgtgagcaacgtgatcgcctccctcacctgcgggcgccgcttcgagtacgacgaccctcgcttcctcaggctgctggacctagctcaggagggactgaaggaggagtcgggctttctgcgcgaggtgctgaatgctgtccccgtcctcctgcatatcccagcgctggctggcaaggtcctacgcttccaaaaggctttcctgacccagctggatgagctgctaactgagcacaggatgacctgggacccagcccagcccccccgagacctgactgaggccttcctggcagagatggagaaggccaaggggaaccctgagagcagcttcaatgatgagaacctgcgcatagtggtggctgacctgttctctgccgggatggtgaccacctcgaccacgctggcctggggcctcctgctcatgatcctacatccggatgtgcagcgccgtgtccaacaggagatcgacgacgtgatagggcaggtgcggcgaccagagatgggtgaccaggctcacatgccctacaccactgccgtgattcatgaggtgcagcgctttggggacatcgtccccctgggtgtgacccatatgacatcccgtgacatcgaagtacagggcttccgcatccctaagggaacgacactcatcaccaacctgtcatcggtgctgaaggatgaggccgtctgggagaagcccttccgcttccaccccgaacacttcctggatgcccagggccactttgtgaagccggaggccttcctgcctttctcagcaggccgccgtgcatgcctcggggagcccctggcccgcatggagctcttcctcttcttcacctccctgctgcagcacttcagcttctcggtgcccactggacagccccggcccagccaccatggtgtctttgctttcctggtgagcccatccccctatgagctttgtgctgtgccccgctagaatggggtacctagtccccagcctgctccctagccagaggctctaatgtacaataaagcaatgtggtagttccaa

SEQ ID NO: 124393 - DNA, 1714 bp, Homo sapiens
  Payload ID: 4433
  Gene Symbol: CYP2D6
  Gene Name: cytochrome P450, family 2, subfamily D, polypeptide 6
  ENST ID: ENST00000389970
  CDS Start-End: 157-1641
gtgctgagagtgtcctgcctggtcctctgtgcctggtggggtgggggtgccaggtgtgtccagaggagcccatttggtagtgaggcaggtatggggctagaagcactggtgcccctggccgtgatagtggccatcttcctgctcctggtggacctgatgcaccggcgccaacgctgggctgcacgctacccaccaggccccctgccactgcccgggctgggcaacctgctgcatgtggacttccagaacacaccatactgcttcgaccagttgcggcgccgcttcggggacgtgttcagcctgcagctggcctggacgccggtggtcgtgctcaatgggctggcggccgtgcgcgaggcgctggtgacccacggcgaggacaccgccgaccgcccgcctgtgcccatcacccagatcctgggtttcgggccgcgttcccaaggggtgttcctggcgcgctatgggcccgcgtggcgcgagcagaggcgcttctccgtgtccaccttgcgcaacttgggcctgggcaagaagtcgctggagcagtgggtgaccgaggaggccgcctgcctttgtgccgccttcgccaaccactccggacgcccctttcgccccaacggtctcttggacaaagccgtgagcaacgtgatcgcctccctcacctgcgggcgccgcttcgagtacgacgaccctcgcttcctcaggctgctggacctagctcaggagggactgaaggaggagtcgggctttctgcgcgaggtgctgaatgctgtccccgtcctcctgcatatcccagcgctggctggcaaggtcctacgcttccaaaaggctttcctgacccagctggatgagctgctaactgagcacaggatgacctgggacccagcccagcccccccgagacctgactgaggccttcctggcagagatggagaaggccaaggggaaccctgagagcagcttcaatgatgagaacctgcgcatagtggtggctgacctgttctctgccgggatggtgaccacctcgaccacgctggcctggggcctcctgctcatgatcctacatccggatgtgcagcagggaggaagggtacaggcgggggcccatcccattgtggggacgcatgtctgtccaggccgtgtccaacaggagatcgacgacgtgatagggcaggtgcggcgaccagagatgggtgaccaggctcacatgccctacaccactgccgtgattcatgaggtgcagcgctttggggacatcgtccccctgggtgtgacccatatgacatcccgtgacatcgaagtacagggcttccgcatccctaagggaacgacactcatcaccaacctgtcatcggtgctgaaggatgaggccgtctgggagaagcccttccgcttccaccccgaacacttcctggatgcccagggccactttgtgaagccggaggccttcctgcctttctcagcaggccgccgtgcatgcctcggggagcccctggcccgcatggagctcttcctcttcttcacctccctgctgcagcacttcagcttctcggtgcccactggacagccccggcccagccaccatggtgtctttgctttcctggtgagcccatccccctatgagctttgtgctgtgccccgctagaatggggtacctagtccccagcctgctccctagccagaggctctaatgtacaataaagcaatgtggtagttcc

SEQ ID NO: 124394 - DNA, 1684 bp, Homo sapiens
  Payload ID: 4433
  Gene Symbol: CYP2D6
  Gene Name: cytochrome P450, family 2, subfamily D, polypeptide 6
  ENST ID: ENST00000607853
  CDS Start-End: 116-1609
ataagggaagggtcacgcgctcggtgtgctgagagtgtcctgcctggtcctctgtgcctggtggggtgggggtgccaggtgtgtccagaggagcccatttggtagtgaggcaggtatggggctagaagcactggtgcccctggccgtgatagtggccatcttcctgctcctggtggacctgatgcaccggcgccaacgctgggctgcacgctactcaccaggccccctgccactgcccgggctgggcaacctgctgcatgtggacttccagaacacaccatactgcttcgaccagttgcggcgccgcttcggggacgtgttcagcctgcagctggcctggacgccggtggtcgtgctcaatgggctggcggccgtgcgcgaggcgctggtgacccacggcgaggacaccgccgaccgcccgcctgtgcccatcacccagatcctgggttttgggccgcgttcccaaggggtgttcctggcgcgctatgggcccgcgtggcgcgagcagaggcgcttctccgtctccaccttgcgcaacttgggcctgggcaagaagtcgctggagcagtgggtgaccgaggaggccgcctgcctttgtgccgccttcgccaaccactccggacgcccctttcgccccaacggtctcttggacaaagccgtgagcaacgtgatcgcctccctcacctgcgggcgccgcttcgagtacgacgaccctcgcttcctcaggctgctggacctagctcaggagggactgaaggaggagtcgggctttctgcgcgaggtgctgaatgctgtccccgtcctcctgcatatcccagcgctggctggcaaggtcctacgcttccaaaaggctttcctgacccagctggatgagctgctaactgagcacaggatgacctgggacccagcccagcccccccgagacctgactgaggccttcctggcagagatggagaaggccaaggggaaccctgagagcagcttcaatgatgagaacctgcgcatagtggtggctgacctgttctctgccgggatggtgaccacctcgaccacgctggcctggggcctcctgctcatgatcctacatccggatgtgcagcgccgtgtccaacaggagatcgacgacgtgatagggcaggtgcggcgaccagagatgggtgaccaggctcacatgccctacaccactgccgtgattcatgaggtgcagcgctttggggacatcgtccccctgggtgtgacccatatgacatcccgtgacatcgaagtacagggcttccgcatccctaagggaacgacactcatcaccaacctgtcatcggtgctgaaggatgaggccgtctgggagaagcccttccgcttccaccccgaacacttcctggatgcccagggccactttgtgaagccggaggccttcctgcctttctcagcaggccgccgtgcatgcctcggggagcccctggcccgcatggagctcttcctcttcttcacctccctgctgcagcacttcagcttctcggtgcccactggacagccccggcccagccaccatggtgtctttgctttcctggtgaccccatccccctatgagctttgtgctgtgccccgctagaatggggtacctagtccccagcctgctccctagccagaggctctaatgtacaataaagcaatgtggtagttccaa

SEQ ID NO: 124395 - DNA, 1684 bp, Homo sapiens
  Payload ID: 4433
  Gene Symbol: CYP2D6
  Gene Name: cytochrome P450, family 2, subfamily D, polypeptide 6
  ENST ID: ENST00000615454
  CDS Start-End: 116-1609
ataagggaagggtcacgcgctcggtgtgctgagagtgtcctgcctggtcctctgtgcctggtggggtgggggtgccaggtgtgtccagaggagcccatttggtagtgaggcaggtatggggctagaagcactggtgcccctggccgtgatagtggccatcttcctgctcctggtggacctgatgcaccggcgccaacgctgggctgcacgctacccaccaggccccctgccactgcccgggctgggcaacctgctgcatgtggacttccagaacacaccatactgcttcgaccagttgcggcgccgcttcggggacgtgttcagcctgcagctggcctggacgccggtggtcgtgctcaatgggctggcggccgtgcgcgaggcgctggtgacccacggcgaggacaccgccgaccgcccgcctgtgcccatcacccagatcctgggtttcgggccgcgttcccaaggggtgttcctggcgcgctatgggcccgcgtggcgcgagcagaggcgcttctccgtctccaccttgcgcaacttgggcctgggcaagaagtcgctggagcagtgggtgaccgaggaggccgcctgcctttgtgccgccttcgccaaccactccggacgcccctttcgccccaacggtctcttggacaaagccgtgagcaacgtgatcgcctccctcacctgcgggcgccgcttcgagtacgacgaccctcgcttcctcaggctgctggacctagctcaggagggactgaaggaggagtcgggctttctgcgcgaggtgctgaatgctgtccccgtcctcctgcatatcccagcgctggctggcaaggtcctacgcttccaaaaggctttcctgacccagctggatgagctgctaactgagcacaggatgacctgggacccagcccagcccccccgagacctgactgaggccttcctggcagagatggagaaggccaaggggaaccctgagagcagcttcaatgatgagaacctgtgcatagtggtggctgacctgttctctgccgggatggtgaccacctcgaccacgctggcctggggcctcctgctcatgatcctacatccggatgtgcagcgccgtgtccaacaggagatcgacgacgtgatagggcaggtgcggcgaccagagatgggtgaccaggctcacatgccctacaccactgccgtgattcatgaggtgcagcgctttggggacatcgtccccctgggtgtgacccatatgacatcccgtgacatcgaagtacagggcttccgcatccctaagggaacgacactcatcaccaacctgtcatcggtgctgaaggatgaggccgtctgggagaagcccttccgcttccaccccgaacacttcctggatgcccagggccactttgtgaagccggaggccttcctgcctttctcagcaggccgccgtgcatgcctcggggagcccctggcccgcatggagctcttcctcttcttcacctccctgctgcagcacttcagcttctcggtgcccactggacagccccggcccagccaccatggtgtctttgctttcctggtgaccccatccccctatgagctttgtgctgtgccccgctagaatggggtacctagtccccagcctgctccctagccagaggctctaatgtacaataaagcaatgtggtagttccaa

SEQ ID NO: 124396 - DNA, 1504 bp, Homo sapiens; identical to SEQ ID NO: 103642
  Payload ID: 4433
  Gene Symbol: CYP2D6
  Gene Name: cytochrome P450, family 2, subfamily D, polypeptide 6
  ENST ID: ENST00000619390
  CDS Start-End: 91-1431

SEQ ID NO: 124397 - DNA, 1433 bp, Homo sapiens
  Payload ID: 4433
  Gene Symbol: CYP2D6
  Gene Name: cytochrome P450, family 2, subfamily D, polypeptide 6
  Uniprot ID: P10635
  ENST ID: ENST00000612990
  CDS Start-End: 75-1415
gcctggtcctctgtgcctggtggggtgggggtgccaggtgtgtccagaggagcccatttggtagtgaggcaggtatggggctagaagcactggtgcccctggccgtgatagtggccatcttcctgctcctggtggacctgatgcaccggcgccaacgctgggctgcacgctacccaccaggccccctgccactgcccgggctgggcaacctgctgcatgtggacttccagaacacaccatactgcttcgaccagttgcggcgccgcttcggggacgtgttcagcctgcagctggcctggacgccggtggtcgtgctcaatgggctggcggccgtgcgcgaggcgctggtgacccacggcgaggacaccgccgaccgcccgcctgtgcccatcacccagatcctgggtttcgggccgcgttcccaaggacgcccctttcgccccaacggtctcttggacaaagccgtgagcaacgtgatcgcctccctcacctgcgggcgccgcttcgagtacgacgaccctcgcttcctcaggctgctggacctagctcaggagggactgaaggaggagtcgggctttctgcgcgaggtgctgaatgctgtccccgtcctcctgcatatcccagcgctggctggcaaggtcctacgcttccaaaaggctttcctgacccagctggatgagctgctaactgagcacaggatgacctgggacccagcccagcccccccgagacctgactgaggccttcctggcagagatggagaaggccaaggggaaccctgagagcagcttcaatgatgagaacctgtgcatagtggtggctgacctgttctctgccgggatggtgaccacctcgaccacgctggcctggggcctcctgctcatgatcctacatccggatgtgcagcgccgtgtccaacaggagatcgacgacgtgatagggcaggtgcggcgaccagagatgggtgaccaggctcacatgccctacaccactgccgtgattcatgaggtgcagcgctttggggacatcgtccccctgggtgtgacccatatgacatcccgtgacatcgaagtacagggcttccgcatccctaagggaacgacactcatcaccaacctgtcatcggtgctgaaggatgaggccgtctgggagaagcccttccgcttccaccccgaacacttcctggatgcccagggccactttgtgaagccggaggccttcctgcctttctcagcaggccgccgtgcatgcctcggggagcccctggcccgcatggagctcttcctcttcttcacctccctgctgcagcacttcagcttctcggtgcccactggacagccccggcccagccaccatggtgtctttgctttcctggtgaccccatccccctatgagctttgtgctgtgccccgctagaatggggtacctagtccc

SEQ ID NO: 124398 - DNA, 1684 bp, Homo sapiens; identical to SEQ ID NO: 124394
  Payload ID: 4433
  Gene Symbol: CYP2D6
  Gene Name: cytochrome P450, family 2, subfamily D, polypeptide 6
  ENST ID: ENST00000630716
  CDS Start-End: 116-1609

SEQ ID NO: 124399 - DNA, 1433 bp, Homo sapiens
  Payload ID: 4433
  Gene Symbol: CYP2D6
  Gene Name: cytochrome P450, family 2, subfamily D, polypeptide 6
  ENST ID: ENST00000629640
  CDS Start-End: 75-1415
gcctggtcctctgtgcctggtggggtgggggtgccaggtgtgtccagaggagcccatttggtagtgaggcaggtatggggctagaagcactggtgcccctggccgtgatagtggccatcttcctgctcctggtggacctgatgcaccggcgccaacgctgggctgcacgctactcaccaggccccctgccactgcccgggctgggcaacctgctgcatgtggacttccagaacacaccatactgcttcgaccagttgcggcgccgcttcggggacgtgttcagcctgcagctggcctggacgccggtggtcgtgctcaatgggctggcggccgtgcgcgaggcgctggtgacccacggcgaggacaccgccgaccgcccgcctgtgcccatcacccagatcctgggttttgggccgcgttcccaaggacgcccctttcgccccaacggtctcttggacaaagccgtgagcaacgtgatcgcctccctcacctgcgggcgccgcttcgagtacgacgaccctcgcttcctcaggctgctggacctagctcaggagggactgaaggaggagtcgggctttctgcgcgaggtgctgaatgctgtccccgtcctcctgcatatcccagcgctggctggcaaggtcctacgcttccaaaaggctttcctgacccagctggatgagctgctaactgagcacaggatgacctgggacccagcccagcccccccgagacctgactgaggccttcctggcagagatggagaaggccaaggggaaccctgagagcagcttcaatgatgagaacctgcgcatagtggtggctgacctgttctctgccgggatggtgaccacctcgaccacgctggcctggggcctcctgctcatgatcctacatccggatgtgcagcgccgtgtccaacaggagatcgacgacgtgatagggcaggtgcggcgaccagagatgggtgaccaggctcacatgccctacaccactgccgtgattcatgaggtgcagcgctttggggacatcgtccccctgggtgtgacccatatgacatcccgtgacatcgaagtacagggcttccgcatccctaagggaacgacactcatcaccaacctgtcatcggtgctgaaggatgaggccgtctgggagaagcccttccgcttccaccccgaacacttcctggatgcccagggccactttgtgaagccggaggccttcctgcctttctcagcaggccgccgtgcatgcctcggggagcccctggcccgcatggagctcttcctcttcttcacctccctgctgcagcacttcagcttctcggtgcccactggacagccccggcccagccaccatggtgtctttgctttcctggtgaccccatccccctatgagctttgtgctgtgccccgctagaatggggtacctagtccc

SEQ ID NO: 124400 - DNA, 1187 bp, Homo sapiens
  Payload ID: 4433
  Gene Symbol: CYP2D6
  Gene Name: cytochrome P450, family 2, subfamily D, polypeptide 6
  ENST ID: ENST00000625976
  CDS Start-End: 1-543
ttgcggcgccgcttcggggacgtgttcagcctgcagctggcctggacgccggtggtcgtgctcaatgggctggcggccgtgcgcgaggcgctggtgacccacggcgaggacaccgccgaccgcccgcctgtgcccatcacccagatcctgggtttcgggccgcgttcccaaggacgcccctttcgccccaacggtctcttggacaaagccgtgagcaacgtgatcgcctccctcacctgcgggcgccgcttcgagtacgacgaccctcgcttcctcaggctgctggacctagctcaggagggactgaaggaggagtcgggctttctgcgcgaggtgctgaatgctgtccccgtcctcctgcatatcccagcgctggctggcaaggtcctacgcttccaaaaggctttcctgacccagctggatgagctgctaactgagcacaggatgacctgggacccagcccagcccccccgagacctgactgaggccttcctggcagagatggagaagtggtggctgacctgttctctgccgggatggtgaccacctcgaccacgctggcctggggcctcctgctcatgatcctacatccggatgtgcagcgccgtgtccaacaggagatcgacgacgtgatagggcaggtgcggcgaccagagatgggtgaccaggctcacatgccctacaccactgccgtgattcatgaggtgcagcgctttggggacatcgtccccctgggtgtgacccatatgacatcccgtgacatcgaagtacagggcttccgcatccctaagggaacgacactcatcaccaacctgtcatcggtgctgaaggatgaggccgtctgggagaagcccttccgcttccaccccgaacacttcctggatgcccagggccactttgtgaagccggaggccttcctgcctttctcagcaggccgccgtgcatgcctcggggagcccctggcccgcatggagctcttcctcttcttcacctccctgctgcagcacttcagcttctcggtgcccactggacagccccggcccagccaccatggtgtctttgctttcctggtgaccccatccccctatgagctttgtgctgtgccccgctagaatggggtacctagtccccagcctgctccctagccagaggctctaatgtacaataaagcaatgtggtagttccaa

SEQ ID NO: 124401 - DNA, 1187 bp, Homo sapiens
  Payload ID: 4433
  Gene Symbol: CYP2D6
  Gene Name: cytochrome P450, family 2, subfamily D, polypeptide 6
  ENST ID: ENST00000630793
  CDS Start-End: 1-543
ttgcggcgccgcttcggggacgtgttcagcctgcagctggcctggacgccggtggtcgtgctcaatgggctggcggccgtgcgcgaggcgctggtgacccacggcgaggacaccgccgaccgcccgcctgtgcccatcacccagatcctgggttttgggccgcgttcccaaggacgcccctttcgccccaacggtctcttggacaaagccgtgagcaacgtgatcgcctccctcacctgcgggcgccgcttcgagtacgacgaccctcgcttcctcaggctgctggacctagctcaggagggactgaaggaggagtcgggctttctgcgcgaggtgctgaatgctgtccccgtcctcctgcatatcccagcgctggctggcaaggtcctacgcttccaaaaggctttcctgacccagctggatgagctgctaactgagcacaggatgacctgggacccagcccagcccccccgagacctgactgaggccttcctggcagagatggagaagtggtggctgacctgttctctgccgggatggtgaccacctcgaccacgctggcctggggcctcctgctcatgatcctacatccggatgtgcagcgccgtgtccaacaggagatcgacgacgtgatagggcaggtgcggcgaccagagatgggtgaccaggctcacatgccctacaccactgccgtgattcatgaggtgcagcgctttggggacatcgtccccctgggtgtgacccatatgacatcccgtgacatcgaagtacagggcttccgcatccctaagggaacgacactcatcaccaacctgtcatcggtgctgaaggatgaggccgtctgggagaagcccttccgcttccaccccgaacacttcctggatgcccagggccactttgtgaagccggaggccttcctgcctttctcagcaggccgccgtgcatgcctcggggagcccctggcccgcatggagctcttcctcttcttcacctccctgctgcagcacttcagcttctcggtgcccactggacagccccggcccagccaccatggtgtctttgctttcctggtgaccccatccccctatgagctttgtgctgtgccccgctagaatggggtacctagtccccagcctgctccctagccagaggctctaatgtacaataaagcaatgtggtagttccaa

SEQ ID NO: 124402 - DNA, 1714 bp, Homo sapiens
  Payload ID: 4433
  Gene Symbol: CYP2D6
  Gene Name: cytochrome P450, family 2, subfamily D, polypeptide 6
  ENST ID: ENST00000625898
  CDS Start-End: 157-1641
gtgctgagagtgtcctgcctggtcctctgtgcctggtggggtgggggtgccaggtgtgtccagaggagcccatttggtagtgaggcaggtatggggctagaagcactggtgcccctggccgtgatagtggccatcttcctgctcctggtggacctgatgcaccggcgccaacgctgggctgcacgctactcaccaggccccctgccactgcccgggctgggcaacctgctgcatgtggacttccagaacacaccatactgcttcgaccagttgcggcgccgcttcggggacgtgttcagcctgcagctggcctggacgccggtggtcgtgctcaatgggctggcggccgtgcgcgaggcgctggtgacccacggcgaggacaccgccgaccgcccgcctgtgcccatcacccagatcctgggttttgggccgcgttcccaaggggtgttcctggcgcgctatgggcccgcgtggcgcgagcagaggcgcttctccgtctccaccttgcgcaacttgggcctgggcaagaagtcgctggagcagtgggtgaccgaggaggccgcctgcctttgtgccgccttcgccaaccactccggacgcccctttcgccccaacggtctcttggacaaagccgtgagcaacgtgatcgcctccctcacctgcgggcgccgcttcgagtacgacgaccctcgcttcctcaggctgctggacctagctcaggagggactgaaggaggagtcgggctttctgcgcgaggtgctgaatgctgtccccgtcctcctgcatatcccagcgctggctggcaaggtcctacgcttccaaaaggctttcctgacccagctggatgagctgctaactgagcacaggatgacctgggacccagcccagcccccccgagacctgactgaggccttcctggcagagatggagaaggccaaggggaaccctgagagcagcttcaatgatgagaacctgcgcatagtggtggctgacctgttctctgccgggatggtgaccacctcgaccacgctggcctggggcctcctgctcatgatcctacatccggatgtgcagcagggaggaagggtacaggcgggggcccatcccattgtggggacgcatgtctgtccaggccgtgtccaacaggagatcgacgacgtgatagggcaggtgcggcgaccagagatgggtgaccaggctcacatgccctacaccactgccgtgattcatgaggtgcagcgctttggggacatcgtccccctgggtgtgacccatatgacatcccgtgacatcgaagtacagggcttccgcatccctaagggaacgacactcatcaccaacctgtcatcggtgctgaaggatgaggccgtctgggagaagcccttccgcttccaccccgaacacttcctggatgcccagggccactttgtgaagccggaggccttcctgcctttctcagcaggccgccgtgcatgcctcggggagcccctggcccgcatggagctcttcctcttcttcacctccctgctgcagcacttcagcttctcggtgcccactggacagccccggcccagccaccatggtgtctttgctttcctggtgaccccatccccctatgagctttgtgctgtgccccgctagaatggggtacctagtccccagcctgctccctagccagaggctctaatgtacaataaagcaatgtggtagttcc

SEQ ID NO: 124403 - DNA, 1187 bp, Homo sapiens; identical to SEQ ID NO: 124401
  Payload ID: 4433
  Gene Symbol: CYP2D6
  Gene Name: cytochrome P450, family 2, subfamily D, polypeptide 6
  ENST ID: ENST00000635505
  CDS Start-End: 1-543

SEQ ID NO: 124404 - DNA, 1433 bp, Homo sapiens; identical to SEQ ID NO: 124399
  Payload ID: 4433
  Gene Symbol: CYP2D6
  Gene Name: cytochrome P450, family 2, subfamily D, polypeptide 6
  ENST ID: ENST00000634653
  CDS Start-End: 75-1415

SEQ ID NO: 124405 - DNA, 1714 bp, Homo sapiens; identical to SEQ ID NO: 124402
  Payload ID: 4433
  Gene Symbol: CYP2D6
  Gene Name: cytochrome P450, family 2, subfamily D, polypeptide 6
  ENST ID: ENST00000635028
  CDS Start-End: 157-1641

SEQ ID NO: 124406 - DNA, 1684 bp, Homo sapiens; identical to SEQ ID NO: 124394
  Payload ID: 4433
  Gene Symbol: CYP2D6
  Gene Name: cytochrome P450, family 2, subfamily D, polypeptide 6
  ENST ID: ENST00000634240
  CDS Start-End: 116-1609

SEQ ID NO: 124407 - DNA, 692 bp, Homo sapiens
  Payload ID: 4434
  Gene Symbol: CYP2D7
  Gene Name: cytochrome P450, family 2, subfamily D, polypeptide 7 (gene/pseudogene)
  ENST ID: ENST00000435101
  CDS Start-End: 1-138
gacccagcccagccaccccgagacctgactgaggccttcctggcaaagaaggagaaggccaaggggagccctgagagcagcttcaatgatgagaacctgcgcatagtgtccgtgtccaacaggagatcgacgacgtgatagggcaggtgcggcgaccagagatgggtgaccaggctcacatgccctgcaccactgccgtgattcacgaggtgcagcactttggggacatcgtccccctgggtgtgacccatatgacatcccgtgacatcgaagtacagggcttccgcatccctaagggaacgacactcatcaccaacctgtcatcggtgctgaaggatgaggccgtctggaagaagcccttccgcttccaccccgaacacttcctggatgcccagggccactttgtgaagccggaggccttcctgcctttctcagcaggccgccgtgcatgcctcggggagcccctggcccgcatggagctcttcctcttcttcacctccctgctgcagcacttcagcttctccgtggccgccggacagccccggcccagccactctcgtgtcgtcagctttctggtgaccccatccccctacgagctttgtgctgtgccccgctagaatggggtacctagtccccagcctgctccctagccagaggctctaatgtacaataaagcaatgtggtagttccaa

SEQ ID NO: 124408 - DNA, 1740 bp, Homo sapiens
  Payload ID: 4434
  Gene Symbol: CYP2D7
  Gene Name: cytochrome P450, family 2, subfamily D, polypeptide 7 (gene/pseudogene)
  ENST ID: ENST00000433992
  CDS Start-End: 114-1663
aagggaagggtcacgcgctcggtgtgccgagagtgtcctgcctggtcctctgtgcctggtggggtgggggtgccaggtgtgtccagaggagcccagttggtagtgaggcagccatggggctagaagcactggtgcccctggccatgatagtggccatcttcctgctcctggtggacctgatgcaccggcaccaacgctgggctgcacgctacccgccaggtcccctgccactgcccgggctgggcaaccttgctgcatgtggacttccagaacacaccatactgcttcgaccagttgcggcgccgcttcggggacgtgttcagcctgcagctggcctggacgccggtggtcgtgctcaatgggctggcggccgtgcgcgaggcgatggtgacccgcggcgaggacacggccgaccgcccgcctgcgcccatctaccaggtcctgggcttcgggccgcgttcccaaggggtgatcctgtcgcgctatgggcccgcgtggcgcgagcagaggcgcttctccgtgtccaccttgcgcaacttgggcctgggcaagaagtcgctggagcagtgggtgaccgaggaggccgcctgcctttgtgccgccttcgccgaccaagccggacgcccctttcgccccaacggcctcttggacaaagccgtgagcaacgtgatcgcctccctcacctgcgggcgccgcttcgagtacgacgaccctcgcttcctcaggctgctggacctagctcaggagggactgaaggaggagtcgggcttcctgcgcgaggtgctgaatgctgtccccgtcctcccgcacatcccagcgctggctggcaaggtcctacgcttccaaaaggctttcctgacccagctggatgagctgctaactgagcacaggatgacctgggacccagcccagccaccccgagacctgactgaggccttcctggcaaagaaggagaaggccaaggggagccctgagagcagcttcaatgatgagaacctgcgcatagtggtgggtaacctgttccttgccgggatggtgaccacctcgaccacgctggcctggggcctcctgctcatgatcctacacctggatgtgcagcgaggaaggagagtgtcccctgggtgctgacccattgtggggacgcatgtctgtccagtccgtgtccaacaggagatcgacgacgtgatagggcaggtgcggcgaccagagatgggtgaccaggctcacatgccctgcaccactgccgtgattcacgaggtgcagcactttggggacatcgtccccctgggtgtgacccatatgacatcccgtgacatcgaagtacagggcttccgcatccctaagggaacgacactcatcaccaacctgtcatcggtgctgaaggatgaggccgtctggaagaagcccttccgcttccaccccgaacacttcctggatgcccagggccactttgtgaagccggaggccttcctgcctttctcagcaggccgccgtgcatgcctcggggagcccctggcccgcatggagctcttcctcttcttcacctccctgctgcagcacttcagcttctccgtggccgccggacagccccggcccagccactctcgtgtcgtcagctttctggtgaccccatccccctacgagctttgtgctgtgccccgctagaatggggtacctagtccccagcctgctccctagccagaggctctaatgtacaataaagcaatgtggtagttccaa

SEQ ID NO: 124409 - DNA, 1655 bp, Homo sapiens
  Payload ID: 4434
  Gene Symbol: CYP2D7
  Gene Name: cytochrome P450, family 2, subfamily D, polypeptide 7 (gene/pseudogene)
  ENST ID: ENST00000358097
  CDS Start-End: 86-1578
gagagtgtcctgcctggtcctctgtgcctggtggggtgggggtgccaggtgtgtccagaggagcccagttggtagtgaggcagccatggggctagaagcactggtgcccctggccatgatagtggccatcttcctgctcctggtggacctgatgcaccggcaccaacgctgggctgcacgctacccgccaggtcccctgccactgcccgggctgggcaaccttgctgcatgtggacttccagaacacaccatactgcttcgaccagttgcggcgccgcttcggggacgtgttcagcctgcagctggcctggacgccggtggtcgtgctcaatgggctggcggccgtgcgcgaggcgatggtgacccgcggcgaggacacggccgaccgcccgcctgcgcccatctaccaggtcctgggcttcgggccgcgttcccaaggggtgatcctgtcgcgctatgggcccgcgtggcgcgagcagaggcgcttctccgtgtccaccttgcgcaacttgggcctgggcaagaagtcgctggagcagtgggtgaccgaggaggccgcctgcctttgtgccgccttcgccgaccaagccggacgcccctttcgccccaacggcctcttggacaaagccgtgagcaacgtgatcgcctccctcacctgcgggcgccgcttcgagtacgacgaccctcgcttcctcaggctgctggacctagctcaggagggactgaaggaggagtcgggcttcctgcgcgaggtgctgaatgctgtccccgtcctcccgcacatcccagcgctggctggcaaggtcctacgcttccaaaaggctttcctgacccagctggatgagctgctaactgagcacaggatgacctgggacccagcccagccaccccgagacctgactgaggccttcctggcaaagaaggagaaggccaaggggagccctgagagcagcttcaatgatgagaacctgcgcatagtggtgggtaacctgttccttgccgggatggtgaccacctcgaccacgctggcctggggcctcctgctcatgatcctacacctggatgtgcagctccgtgtccaacaggagatcgacgacgtgatagggcaggtgcggcgaccagagatgggtgaccaggctcacatgccctgcaccactgccgtgattcacgaggtgcagcactttggggacatcgtccccctgggtgtgacccatatgacatcccgtgacatcgaagtacagggcttccgcatccctaagggaacgacactcatcaccaacctgtcatcggtgctgaaggatgaggccgtctggaagaagcccttccgcttccaccccgaacacttcctggatgcccagggccactttgtgaagccggaggccttcctgcctttctcagcaggccgccgtgcatgcctcggggagcccctggcccgcatggagctcttcctcttcttcacctccctgctgcagcacttcagcttctccgtggccgccggacagccccggcccagccactctcgtgtcgtcagctttctggtgaccccatccccctacgagctttgtgctgtgccccgctagaatggggtacctagtccccagcctgctccctagccagaggctctaatgtacaataaagcaatgtggtagttccaa

SEQ ID NO: 124410 - DNA, 1738 bp, Homo sapiens
  Payload ID: 4434
  Gene Symbol: CYP2D7
  Gene Name: cytochrome P450, family 2, subfamily D, polypeptide 7 (gene/pseudogene)
  ENST ID: ENST00000575319
  CDS Start-End: 112-1663
gggaagggtcacgcgctcggtgtgccgagagtgtcctgcctggtcctctgtgcctggtggggtgggggtgccaggtgtgtccagaggagcccagttggtagtgaggcagccatggggctagaagcactggtgcccctggccatgatagtggccatcttcctgctcctggtggacctgatgcaccggcaccaacgctgggctgcacgctacccgccaggtcccctgccactgcccgggctgggcaaccttgctgcatgtggacttccagaacacaccatactgcttcgaccagttgcggcgccgcttcggggacgtgttcagcctgcagctggcctggacgccggtggtcgtgctcaatgggctggcggccgtgcgcgaggcgatggtgacccgcggcgaggacacggccgaccgcccgcctgcgcccatctaccaggtcctgggcttcgggccgcgttcccaaggggtgatcctgtcgcgctatgggcccgcgtggcgcgagcagaggcgcttctccgtgtccaccttgcgcaacttgggcctgggcaagaagtcgctggagcagtgggtgaccgaggaggccgcctgcctttgtgccgccttcgccgaccaagccggacgcccctttcgccccaacggcctcttggacaaagccgtgagcaacgtgatcgcctccctcacctgcgggcgccgcttcgagtacgacgaccctcgcttcctcaggctgctggacctagctcaggagggactgaaggaggagtcgggcttcctgcgcgaggtgctgaatgctgtccccgtcctcccgcacatcccagcgctggctggcaaggtcctacgcttccaaaaggctttcctgacccagctggatgagctgctaactgagcacaggatgacctgggacccagcccagccaccccgagacctgactgaggccttcctggcaaagaaggagaaggccaaggggagccctgagagcagcttcaatgatgagaacctgcgcatagtggtgggtaacctgttccttgccgggatggtgaccacctcgaccacgctggcctggggcctcctgctcatgatcctacacctggatgtgcagcgaggaaggagagtgtcccctgggtgctgacccattgtggggacgcatgtctgtccagtccgtgtccaacaggagatcgacgacgtgatagggcaggtgcggcgaccagagatgggtgaccaggctcacatgccctgcaccactgccgtgattcacgaggtgcagcgctttggggacatcatccccctgagtgtgacccatatgacatcccgtgacatcgaagtacagggcttccgcatccctaagggaacgacactcatcaccaacctgtcatcggtgctgaaggatgaggccgtctggaagaagcccttccgcttccaccccgaacacttcctggatgcccagggccactttgtgaagccggaggccttcctgcctttctcagcaggccgccgtgcatgcctcggggagcccctggcccgcatggagctcttcctcttcttcacctccctgctgcagcacttcagcttctccgtggccgccggacagccccggcccagccactctcgtgtcgtcagctttctggtgaccccatccccctacgagctttgtgctgtgccccgctagaatggggtacctagtccccagcctgctccctagccagaggctctaatgtacaataaagcaatgtggtagttccaa

SEQ ID NO: 124411 - DNA, 1655 bp, Homo sapiens
  Payload ID: 4434
  Gene Symbol: CYP2D7
  Gene Name: cytochrome P450, family 2, subfamily D, polypeptide 7 (gene/pseudogene)
  ENST ID: ENST00000574062
  CDS Start-End: 86-1580
gagagtgtcctgcctggtcctctgtgcctggtggggtgggggtgccaggtgtgtccagaggagcccagttggtagtgaggcagccatggggctagaagcactggtgcccctggccatgatagtggccatcttcctgctcctggtggacctgatgcaccggcaccaacgctgggctgcacgctacccgccaggtcccctgccactgcccgggctgggcaaccttgctgcatgtggacttccagaacacaccatactgcttcgaccagttgcggcgccgcttcggggacgtgttcagcctgcagctggcctggacgccggtggtcgtgctcaatgggctggcggccgtgcgcgaggcgatggtgacccgcggcgaggacacggccgaccgcccgcctgcgcccatctaccaggtcctgggcttcgggccgcgttcccaaggggtgatcctgtcgcgctatgggcccgcgtggcgcgagcagaggcgcttctccgtgtccaccttgcgcaacttgggcctgggcaagaagtcgctggagcagtgggtgaccgaggaggccgcctgcctttgtgccgccttcgccgaccaagccggacgcccctttcgccccaacggcctcttggacaaagccgtgagcaacgtgatcgcctccctcacctgcgggcgccgcttcgagtacgacgaccctcgcttcctcaggctgctggacctagctcaggagggactgaaggaggagtcgggcttcctgcgcgaggtgctgaatgctgtccccgtcctcccgcacatcccagcgctggctggcaaggtcctacgcttccaaaaggctttcctgacccagctggatgagctgctaactgagcacaggatgacctgggacccagcccagccaccccgagacctgactgaggccttcctggcaaagaaggagaaggccaaggggagccctgagagcagcttcaatgatgagaacctgcgcatagtggtgggtaacctgttccttgccgggatggtgaccacctcgaccacgctggcctggggcctcctgctcatgatcctacacctggatgtgcagctccgtgtccaacaggagatcgacgacgtgatagggcaggtgcggcgaccagagatgggtgaccaggctcacatgccctgcaccactgccgtgattcacgaggtgcagcgctttggggacatcatccccctgagtgtgacccatatgacatcccgtgacatcgaagtacagggcttccgcatccctaagggaacgacactcatcaccaacctgtcatcggtgctgaaggatgaggccgtctggaagaagcccttccgcttccaccccgaacacttcctggatgcccagggccactttgtgaagccggaggccttcctgcctttctcagcaggccgccgtgcatgcctcggggagcccctggcccgcatggagctcttcctcttcttcacctccctgctgcagcacttcagcttctccgtggccgccggacagccccggcccagccactctcgtgtcgtcagctttctggtgaccccatccccctacgagctttgtgctgtgccccgctagaatggggtacctagtccccagcctgctccctagccagaggctctaatgtacaataaagcaatgtggtagttccaa

SEQ ID NO: 124412 - DNA, 1504 bp, Homo sapiens
  Payload ID: 4434
  Gene Symbol: CYP2D7
  Gene Name: cytochrome P450, family 2, subfamily D, polypeptide 7 (gene/pseudogene)
  ENST ID: ENST00000616376
  CDS Start-End: 91-1431
gtgctgagagtgtcctgcctggtcctctgtgcctggtggggtgggggtgccaggtgtgtccagaggagcccagttggtagtgaggcagccatggggctagaagcactggtgcccctggccatgatagtggccatcttcctgctcctggtggacctgatgcaccggcaccaacgctgggctgcacgctacccgccaggtcccctgccactgcccgggctgggcaacttgctgcatgtggacttccagaacacaccatactgcttcgaccagttgcggcgccgcttcggggacgtgttcagcctgcagctggcctggacgccggtggtcgtgctcaatgggctggcggccgtgcgcgaggcgatggtgacccgcggcgaggacacggccgaccgcccgcctgcgcccatctaccaggtcctgggcttcgggccgcgttcccaaggacgcccctttcgccccaacggtctcttggacaaagccgtgagcaacgtgatcgcctccctcacctgcgggcgccgcttcgagtacgacgaccctcgcttcctcaggctgctggacctagctcaggagggactgaaggaggagtcgggcttcctgcgcgaggtgctgaatgctgtccccgtcctcctgcacatcccagcgctggctggcaaggtcctacgcttccaaaaggctttcctgacccagctggatgagctgctaactgagcacaggatgacctgggacccagcccagccaccccgagacctgactgaggccttcctggcaaagaaggagaaggccaaggggagccctgagagcagcttcaatgatgagaacctgcgcatagtggtgggtaacctgttccttgccgggatggtgaccaccttgaccacgctggcctggggcctcctgctcatgatcctacacctggatgtgcagctccgtgtccaacaggagatcgacgacgtgatagggcaggtgcggcgaccagagatgggtgaccaggctcacatgccctacaccactgccgtgattcacgaggtgcagcgctttggggacatcatccccctgagtgtgacccatatgacatcccatgacatcgaagtacagggcttccgcatccctaagggaacgacactcatcaccaacctgtcatcggtgctgaaggatgaggccgtctggaagaagcccttccgcttccaccccgaacacttcctggatgcccagggccactttgtgaagccggaggccttcctgcctttctcagcaggccgccgtgcatgcctcggggagcccctggcccgcatggagctcttcctcttcttcacctccctgctgcagcacttcagcttctccgtggccgccggacagccccggcccagccactctcgtgtcgtcagctttctggtgaccccatccccctacgagctttgtgctgtgccccgctagaatggggtacctagtccccagcctgctccctagccagaggctctaatgtacaataaagcaatgtggtagttcc

SEQ ID NO: 124413 - DNA, 1738 bp, Homo sapiens
  Payload ID: 4434
  Gene Symbol: CYP2D7
  Gene Name: cytochrome P450, family 2, subfamily D, polypeptide 7 (gene/pseudogene)
  ENST ID: ENST00000620741
  CDS Start-End: 112-1663
gggaagggtcacgcgctcggtgtgctgagagtgtcctgcctggtcctctgtgcctggtggggtgggggtgccaggtgtgtccagaggagcccagttggtagtgaggcagccatggggctagaagcactggtgcccctggccatgatagtggccatcttcctgctcctggtggacctgatgcaccggcaccaacgctgggctgcacgctacccgccaggtcccctgccactgcccgggctgggcaaccttgctgcatgtggacttccagaacacaccatactgcttcgaccagttgcggcgccgcttcggggacgtgttcagcctgcagctggcctggacgccggtggtcgtgctcaatgggctggcggccgtgcgcgaggcgatggtgacccgcggcgaggacacggccgaccgcccgcctgcgcccatctaccaggtcctgggcttcgggccgcgttcccaaggggtgttcctgtcgcgctatgggcccgcgtggcgcgagcagaggcgcttctccgtgtccaccttgcgcaacttgggcctgggcaagaagtcgctggagcagtgggtgaccgaggaggccgcctgcctttgtgccgccttcgccgaccaagccggacgcccctttcgccccaacggtctcttggacaaagccgtgagcaacgtgatcgcctccctcacctgcgggcgccgcttcgagtacgacgaccctcgcttcctcaggctgctggacctagctcaggagggactgaaggaggagtcgggcttcctgcgcgaggtgctgaatgctgtccccgtcctcctgcacatcccagcgctggctggcaaggtcctacgcttccaaaaggctttcctgacccagctggatgagctgctaactgagcacaggatgacctgggacccagcccagccaccccgagacctgactgaggccttcctggcaaagaaggagaaggccaaggggagccctgagagcagcttcaatgatgagaacctgcgcatagtggtgggtaacctgttccttgccgggatggtgaccaccttgaccacgctggcctggggcctcctgctcatgatcctacacctggatgtgcagcgacgaaggagagtgtcccctgggtgctgacccattgtggggacgcatgtctgtccagtccgtgtccaacaggagatcgacgacgtgatagggcaggtgcggcgaccagagatgggtgaccaggctcacatgccctacaccactgccgtgattcacgaggtgcagcgctttggggacatcatccccctgagtgtgacccatatgacatcccatgacatcgaagtacagggcttccgcatccctaagggaacgacactcatcaccaacctgtcatcggtgctgaaggatgaggccgtctggaagaagcccttccgcttccaccccgaacacttcctggatgcccagggccactttgtgaagccggaggccttcctgcctttctcagcaggccgccgtgcatgcctcggggagcccctggcccgcatggagctcttcctcttcttcacctccctgctgcagcacttcagcttctccgtggccgccggacagccccggcccagccactctcgtgtcgtcagctttctggtgaccccatccccctacgagctttgtgctgtgccccgctagaatggggtacctagtccccagcctgctccctagccagaggctctaatgtacaataaagcaatgtggtagttccaa

SEQ ID NO: 124414 - DNA, 1734 bp, Homo sapiens
  Payload ID: 4434
  Gene Symbol: CYP2D7
  Gene Name: cytochrome P450, family 2, subfamily D, polypeptide 7 (gene/pseudogene)
  ENST ID: ENST00000619036
  CDS Start-End: 114-1661
aagggaagggtcacgcgctcggtgtgccgagagtgtcctgcctggtcctctgtgcctggtggggtgggggtgccaggtgtgtccagaggagcccagttggtagtgaggcagccatggggctagaagcactggtgcccctggccatgatagtggccatcttcctgctcctggtggacctgatgcaccggcaccaacgctgggctgcacgctacccgccaggtcccctgccactgcccgggctgggcaacttgctgcatgtggacttccagaacacaccatactgcttcgaccagttgcggcgccgcttcggggacgtgttcagcctgcagctggcctggacgccggtggtcgtgctcaatgggctggcggccgtgcgcgaggcgatggtgacccgcggcgaggacacggccgaccgcccgcctgcgcccatctaccaggtcctgggcttcgggccgcgttcccaaggggtgatcctgtcgcgctatgggcccgcgtggcgcgagcagaggcgcttctccgtgtccaccttgcgcaacttgggcctgggcaagaagtcgctggagcagtgggtgaccgaggaggccgcctgcctttgtgccgccttcgccgaccaagccggacgcccctttcgccccaacggcctcttggacaaagccgtgagcaacgtgatcgcctccctcacctgcgggcgccgcttcgagtacgacgaccctcgcttcctcaggctgctggacctagctcaggagggactgaaggaggagtcgggcttcctgcgcgaggtgctgaatgctgtccccgtcctcccgcacatcccagcgctggctggcaaggtcctacgcttccaaaaggctttcctgacccagctggatgagctgctaactgagcacaggatgacctgggacccagcccagccaccccgagacctgactgaggccttcctggcaaagaaggagaaggccaaggggagccctgagagcagcttcaatgatgagaacctgcgcatagtggtgggtaacctgttccttgccgggatggtgaccacctcgaccacgctggcctggggcctcctgctcatgatcctacacctggatgtgcagcgaggaaggagagtgtcccctgggtgccccattgtggggacgcatgtctgtccagtccgtgtccaacaggagatcgacgacgtgatagggcaggtgcggcgaccagagatgggtgaccaggctcacatgccctgcaccactgccgtgattcacgaggtgcagcgctttggggacatcatccccctgagtgtgacccatatgacatcccgtgacatcgaagtacagggcttccgcatccctaagggaacgacactcatcaccaacctgtcatcggtgctgaaggatgaggccgtctggaagaagcccttccgcttccaccccgaacacttcctggatgcccagggccactttgtgaagccggaggccttcctgcctttctcagcaggccgccgtgcatgcctcggggagcccctggcccgcatggagctcttcctcttcttcacctccctgctgcagcacttcagcttctccgtggccgccggacagccccggcccagccactctcgtgtcgtcagctttctggtgaccccatccccctacgagctttgtgctgtgccccgctagaatggggtacctagtccccagcctgctccctagccagaggctctaatgtacaataaagcaatgtggtagttcc

SEQ ID NO: 124415 - DNA, 1504 bp, Homo sapiens
  Payload ID: 4434
  Gene Symbol: CYP2D7
  Gene Name: cytochrome P450, family 2, subfamily D, polypeptide 7 (gene/pseudogene)
  ENST ID: ENST00000614621
  CDS Start-End: 91-1431
gtgccgagagtgtcctgcctggtcctctgtgcctggtggggtgggggtgccaggtgtgtccagaggagcccagttggtagtgaggcagccatggggctagaagcactggtgcccctggccatgatagtggccatcttcctgctcctggtggacctgatgcaccggcaccaacgctgggctgcacgctacccgccaggtcccctgccactgcccgggctgggcaacttgctgcatgtggacttccagaacacaccatactgcttcgaccagttgcggcgccgcttcggggacgtgttcagcctgcagctggcctggacgccggtggtcgtgctcaatgggctggcggccgtgcgcgaggcgatggtgacccgcggcgaggacacggccgaccgcccgcctgcgcccatctaccaggtcctgggcttcgggccgcgttcccaaggacgcccctttcgccccaacggcctcttggacaaagccgtgagcaacgtgatcgcctccctcacctgcgggcgccgcttcgagtacgacgaccctcgcttcctcaggctgctggacctagctcaggagggactgaaggaggagtcgggcttcctgcgcgaggtgctgaatgctgtccccgtcctcccgcacatcccagcgctggctggcaaggtcctacgcttccaaaaggctttcctgacccagctggatgagctgctaactgagcacaggatgacctgggacccagcccagccaccccgagacctgactgaggccttcctggcaaagaaggagaaggccaaggggagccctgagagcagcttcaatgatgagaacctgcgcatagtggtgggtaacctgttccttgccgggatggtgaccacctcgaccacgctggcctggggcctcctgctcatgatcctacacctggatgtgcagctccgtgtccaacaggagatcgacgacgtgatagggcaggtgcggcgaccagagatgggtgaccaggctcacatgccctgcaccactgccgtgattcacgaggtgcagcgctttggggacatcatccccctgagtgtgacccatatgacatcccgtgacatcgaagtacagggcttccgcatccctaagggaacgacactcatcaccaacctgtcatcggtgctgaaggatgaggccgtctggaagaagcccttccgcttccaccccgaacacttcctggatgcccagggccactttgtgaagccggaggccttcctgcctttctcagcaggccgccgtgcatgcctcggggagcccctggcccgcatggagctcttcctcttcttcacctccctgctgcagcacttcagcttctccgtggccgccggacagccccggcccagccactctcgtgtcgtcagctttctggtgaccccatccccctacgagctttgtgctgtgccccgctagaatggggtacctagtccccagcctgctccctagccagaggctctaatgtacaataaagcaatgtggtagttcc

SEQ ID NO: 124416 - DNA, 1504 bp, Homo sapiens
  Payload ID: 4434
  Gene Symbol: CYP2D7
  Gene Name: cytochrome P450, family 2, subfamily D, polypeptide 7 (gene/pseudogene)
  ENST ID: ENST00000614967
  CDS Start-End: 91-1431
gtgccgagagtgtcctgcctggtcctctgtgcctggtggggtgggggtgccaggtgtgtccagaggagcccagttggtagtgaggcagccatggggctagaagcactggtgcccctggccatgatagtggccatcttcctgctcctggtggacctgatgcaccggcaccaacgctgggctgcacgctacccgccaggtcccctgccactgcccgggctgggcaacttgctgcatgtggacttccagaacacaccatactgcttcgaccagttgcggcgccgcttcggggacgtgttcagcctgcagctggcctggacgccggtggtcgtgctcaatgggctggcggccgtgcgcgaggcgatggtgacccgcggcgaggacacggccgaccgcccgcctgcgcccatctaccaggtcctgggcttcgggccgcgttcccaaggacgcccctttcgccccaacggcctcttggacaaagccgtgagcaacgtgatcgcctccctcacctgcgggcgccgcttcgagtacgacgaccctcgcttcctcaggctgctggacctagctcaggagggactgaaggaggagtcgggcttcctgcgcgaggtgctgaatgctgtccccgtcctcccgcacatcccagcgctggctggcaaggtcctacgcttccaaaaggctttcctgacccagctggatgagctgctaactgagcacaggatgacctgggacccagcccagccaccccgagacctgactgaggccttcctggcaaagaaggagaaggccaaggggagccctgagagcagcttcaatgatgagaacctgcgcatagtggtgggtaacctgttccttgccgggatggtgaccacctcgaccacgctggcctggggcctcctgctcatgatcctacacctggatgtgcagctccgtgtccaacaggagatcgacgacgtgatagggcaggtgcggcgaccagagatgggtgaccaggctcacatgccctgcaccactgccgtgattcacgaggtgcagcactttggggacatcgtccccctgggtgtgacccatatgacatcccgtgacatcgaagtacagggcttccgcatccctaagggaacgacactcatcaccaacctgtcatcggtgctgaaggatgaggccgtctggaagaagcccttccgcttccaccccgaacacttcctggatgcccagggccactttgtgaagccggaggccttcctgcctttctcagcaggccgccgtgcatgcctcggggagcccctggcccgcatggagctcttcctcttcttcacctccctgctgcagcacttcagcttctccgtggccgccggacagccccggcccagccactctcgtgtcgtcagctttctggtgaccccatccccctacgagctttgtgctgtgccccgctagaatggggtacctagtccccagcctgctccctagccagaggctctaatgtacaataaagcaatgtggtagttcc

SEQ ID NO: 124417 - DNA, 1734 bp, Homo sapiens
  Payload ID: 4434
  Gene Symbol: CYP2D7
  Gene Name: cytochrome P450, family 2, subfamily D, polypeptide 7 (gene/pseudogene)
  ENST ID: ENST00000617651
  CDS Start-End: 114-1661
aagggaagggtcacgcgctcggtgtgctgagagtgtcctgcctggtcctctgtgcctggtggggtgggggtgccaggtgtgtccagaggagcccagttggtagtgaggcagccatggggctagaagcactggtgcccctggccatgatagtggccatcttcctgctcctggtggacctgatgcaccggcaccaacgctgggctgcacgctacccgccaggtcccctgccactgcccgggctgggcaacttgctgcatgtggacttccagaacacaccatactgcttcgaccagttgcggcgccgcttcggggacgtgttcagcctgcagctggcctggacgccggtggtcgtgctcaatgggctggcggccgtgcgcgaggcgatggtgacccgcggcgaggacacggccgaccgcccgcctgcgcccatctaccaggtcctgggcttcgggccgcgttcccaaggggtgttcctgtcgcgctatgggcccgcgtggcgcgagcagaggcgcttctccgtgtccaccttgcgcaacttgggcctgggcaagaagtcgctggagcagtgggtgaccgaggaggccgcctgcctttgtgccgccttcgccgaccaagccggacgcccctttcgccccaacggtctcttggacaaagccgtgagcaacgtgatcgcctccctcacctgcgggcgccgcttcgagtacgacgaccctcgcttcctcaggctgctggacctagctcaggagggactgaaggaggagtcgggcttcctgcgcgaggtgctgaatgctgtccccgtcctcctgcacatcccagcgctggctggcaaggtcctacgcttccaaaaggctttcctgacccagctggatgagctgctaactgagcacaggatgacctgggacccagcccagccaccccgagacctgactgaggccttcctggcaaagaaggagaaggccaaggggagccctgagagcagcttcaatgatgagaacctgcgcatagtggtgggtaacctgttccttgccgggatggtgaccaccttgaccacgctggcctggggcctcctgctcatgatcctacacctggatgtgcagcgacgaaggagagtgtcccctgggtgccccattgtggggacgcatgtctgtccagtccgtgtccaacaggagatcgacgacgtgatagggcaggtgcggcgaccagagatgggtgaccaggctcacatgccctacaccactgccgtgattcacgaggtgcagcgctttggggacatcatccccctgagtgtgacccatatgacatcccatgacatcgaagtacagggcttccgcatccctaagggaacgacactcatcaccaacctgtcatcggtgctgaaggatgaggccgtctggaagaagcccttccgcttccaccccgaacacttcctggatgcccagggccactttgtgaagccggaggccttcctgcctttctcagcaggccgccgtgcatgcctcggggagcccctggcccgcatggagctcttcctcttcttcacctccctgctgcagcacttcagcttctccgtggccgccggacagccccggcccagccactctcgtgtcgtcagctttctggtgaccccatccccctacgagctttgtgctgtgccccgctagaatggggtacctagtccccagcctgctccctagccagaggctctaatgtacaataaagcaatgtggtagttcc

SEQ ID NO: 124418 - DNA, 1657 bp, Homo sapiens
  Payload ID: 4434
  Gene Symbol: CYP2D7
  Gene Name: cytochrome P450, family 2, subfamily D, polypeptide 7 (gene/pseudogene)
  ENST ID: ENST00000612408
  CDS Start-End: 91-1584
gtgccgagagtgtcctgcctggtcctctgtgcctggtggggtgggggtgccaggtgtgtccagaggagcccagttggtagtgaggcagccatggggctagaagcactggtgcccctggccatgatagtggccatcttcctgctcctggtggacctgatgcaccggcaccaacgctgggctgcacgctacccgccaggtcccctgccactgcccgggctgggcaacttgctgcatgtggacttccagaacacaccatactgcttcgaccagttgcggcgccgcttcggggacgtgttcagcctgcagctggcctggacgccggtggtcgtgctcaatgggctggcggccgtgcgcgaggcgatggtgacccgcggcgaggacacggccgaccgcccgcctgcgcccatctaccaggtcctgggcttcgggccgcgttcccaaggggtgatcctgtcgcgctatgggcccgcgtggcgcgagcagaggcgcttctccgtgtccaccttgcgcaacttgggcctgggcaagaagtcgctggagcagtgggtgaccgaggaggccgcctgcctttgtgccgccttcgccgaccaagccggacgcccctttcgccccaacggcctcttggacaaagccgtgagcaacgtgatcgcctccctcacctgcgggcgccgcttcgagtacgacgaccctcgcttcctcaggctgctggacctagctcaggagggactgaaggaggagtcgggcttcctgcgcgaggtgctgaatgctgtccccgtcctcccgcacatcccagcgctggctggcaaggtcctacgcttccaaaaggctttcctgacccagctggatgagctgctaactgagcacaggatgacctgggacccagcccagccaccccgagacctgactgaggccttcctggcaaagaaggagaaggccaaggggagccctgagagcagcttcaatgatgagaacctgcgcatagtggtgggtaacctgttccttgccgggatggtgaccacctcgaccacgctggcctggggcctcctgctcatgatcctacacctggatgtgcagctccgtgtccaacaggagatcgacgacgtgatagggcaggtgcggcgaccagagatgggtgaccaggctcacatgccctgcaccactgccgtgattcacgaggtgcagcgctttggggacatcatccccctgagtgtgacccatatgacatcccgtgacatcgaagtacagggcttccgcatccctaagggaacgacactcatcaccaacctgtcatcggtgctgaaggatgaggccgtctggaagaagcccttccgcttccaccccgaacacttcctggatgcccagggccactttgtgaagccggaggccttcctgcctttctcagcaggccgccgtgcatgcctcggggagcccctggcccgcatggagctcttcctcttcttcacctccctgctgcagcacttcagcttctccgtggccgccggacagccccggcccagccactctcgtgtcgtcagctttctggtgaccccatccccctacgagctttgtgctgtgccccgctagaatggggtacctagtccccagcctgctccctagccagaggctctaatgtacaataaagcaatgtggtagttcc

SEQ ID NO: 124419 - DNA, 1734 bp, Homo sapiens
  Payload ID: 4434
  Gene Symbol: CYP2D7
  Gene Name: cytochrome P450, family 2, subfamily D, polypeptide 7 (gene/pseudogene)
  Uniprot ID: A0A087X1C5
  ENST ID: ENST00000612115
  CDS Start-End: 114-1661
aagggaagggtcacgcgctcggtgtgccgagagtgtcctgcctggtcctctgtgcctggtggggtgggggtgccaggtgtgtccagaggagcccagttggtagtgaggcagccatggggctagaagcactggtgcccctggccatgatagtggccatcttcctgctcctggtggacctgatgcaccggcaccaacgctgggctgcacgctacccgccaggtcccctgccactgcccgggctgggcaacttgctgcatgtggacttccagaacacaccatactgcttcgaccagttgcggcgccgcttcggggacgtgttcagcctgcagctggcctggacgccggtggtcgtgctcaatgggctggcggccgtgcgcgaggcgatggtgacccgcggcgaggacacggccgaccgcccgcctgcgcccatctaccaggtcctgggcttcgggccgcgttcccaaggggtgatcctgtcgcgctatgggcccgcgtggcgcgagcagaggcgcttctccgtgtccaccttgcgcaacttgggcctgggcaagaagtcgctggagcagtgggtgaccgaggaggccgcctgcctttgtgccgccttcgccgaccaagccggacgcccctttcgccccaacggcctcttggacaaagccgtgagcaacgtgatcgcctccctcacctgcgggcgccgcttcgagtacgacgaccctcgcttcctcaggctgctggacctagctcaggagggactgaaggaggagtcgggcttcctgcgcgaggtgctgaatgctgtccccgtcctcccgcacatcccagcgctggctggcaaggtcctacgcttccaaaaggctttcctgacccagctggatgagctgctaactgagcacaggatgacctgggacccagcccagccaccccgagacctgactgaggccttcctggcaaagaaggagaaggccaaggggagccctgagagcagcttcaatgatgagaacctgcgcatagtggtgggtaacctgttccttgccgggatggtgaccacctcgaccacgctggcctggggcctcctgctcatgatcctacacctggatgtgcagcgaggaaggagagtgtcccctgggtgccccattgtggggacgcatgtctgtccagtccgtgtccaacaggagatcgacgacgtgatagggcaggtgcggcgaccagagatgggtgaccaggctcacatgccctgcaccactgccgtgattcacgaggtgcagcactttggggacatcgtccccctgggtgtgacccatatgacatcccgtgacatcgaagtacagggcttccgcatccctaagggaacgacactcatcaccaacctgtcatcggtgctgaaggatgaggccgtctggaagaagcccttccgcttccaccccgaacacttcctggatgcccagggccactttgtgaagccggaggccttcctgcctttctcagcaggccgccgtgcatgcctcggggagcccctggcccgcatggagctcttcctcttcttcacctccctgctgcagcacttcagcttctccgtggccgccggacagccccggcccagccactctcgtgtcgtcagctttctggtgaccccatccccctacgagctttgtgctgtgccccgctagaatggggtacctagtccccagcctgctccctagccagaggctctaatgtacaataaagcaatgtggtagttcc

SEQ ID NO: 124420 - DNA, 692 bp, Homo sapiens
  Payload ID: 4434
  Gene Symbol: CYP2D7
  Gene Name: cytochrome P450, family 2, subfamily D, polypeptide 7 (gene/pseudogene)
  ENST ID: ENST00000618719
  CDS Start-End: 1-138
gacccagcccagccaccccgagacctgactgaggccttcctggcaaagaaggagaaggccaaggggagccctgagagcagcttcaatgatgagaacctgcgcatagtgtccgtgtccaacaggagatcgacgacgtgatagggcaggtgcggcgaccagagatgggtgaccaggctcacatgccctacaccactgccgtgattcacgaggtgcagcgctttggggacatcatccccctgagtgtgacccatatgacatcccatgacatcgaagtacagggcttccgcatccctaagggaacgacactcatcaccaacctgtcatcggtgctgaaggatgaggccgtctggaagaagcccttccgcttccaccccgaacacttcctggatgcccagggccactttgtgaagccggaggccttcctgcctttctcagcaggccgccgtgcatgcctcggggagcccctggcccgcatggagctcttcctcttcttcacctccctgctgcagcacttcagcttctccgtggccgccggacagccccggcccagccactctcgtgtcgtcagctttctggtgaccccatccccctacgagctttgtgctgtgccccgctagaatggggtacctagtccccagcctgctccctagccagaggctctaatgtacaataaagcaatgtggtagttccaa

SEQ ID NO: 124421 - DNA, 1576 bp, Homo sapiens
  Payload ID: 4434
  Gene Symbol: CYP2D7
  Gene Name: cytochrome P450, family 2, subfamily D, polypeptide 7 (gene/pseudogene)
  ENST ID: ENST00000629682
  CDS Start-End: 7-1501
gcagccatggggctagaagcactggtgcccctggccatgatagtggccatcttcctgctcctggtggacctgatgcaccggcaccaacgctgggctgcacgctacccgccaggtcccctgccactgcccgggctgggcaaccttgctgcatgtggacttccagaacacaccatactgcttcgaccagttgcggcgccgcttcggggacgtgttcagcctgcagctggcctggacgccggtggtcgtgctcaatgggctggcggccgtgcgcgaggcgatggtgacccgcggcgaggacacggccgaccgcccgcctgcgcccatctaccaggtcctgggcttcgggccgcgttcccaaggggtgttcctgtcgcgctatgggcccgcgtggcgcgagcagaggcgcttctccgtgtccaccttgcgcaacttgggcctgggcaagaagtcgctggagcagtgggtgaccgaggaggccgcctgcctttgtgccgccttcgccgaccaagccggacgcccctttcgccccaacggtctcttggacaaagccgtgagcaacgtgatcgcctccctcacctgcgggcgccgcttcgagtacgacgaccctcgcttcctcaggctgctggacctagctcaggagggactgaaggaggagtcgggcttcctgcgcgaggtgctgaatgctgtccccgtcctcctgcacatcccagcgctggctggcaaggtcctacgcttccaaaaggctttcctgacccagctggatgagctgctaactgagcacaggatgacctgggacccagcccagccaccccgagacctgactgaggccttcctggcaaagaaggagaaggccaaggggagccctgagagcagcttcaatgatgagaacctgcgcatagtggtgggtaacctgttccttgccgggatggtgaccaccttgaccacgctggcctggggcctcctgctcatgatcctacacctggatgtgcagctccgtgtccaacaggagatcgacgacgtgatagggcaggtgcggcgaccagagatgggtgaccaggctcacatgccctacaccactgccgtgattcacgaggtgcagcgctttggggacatcatccccctgagtgtgacccatatgacatcccatgacatcgaagtacagggcttccgcatccctaagggaacgacactcatcaccaacctgtcatcggtgctgaaggatgaggccgtctggaagaagcccttccgcttccaccccgaacacttcctggatgcccagggccactttgtgaagccggaggccttcctgcctttctcagcaggccgccgtgcatgcctcggggagcccctggcccgcatggagctcttcctcttcttcacctccctgctgcagcacttcagcttctccgtggccgccggacagccccggcccagccactctcgtgtcgtcagctttctggtgaccccatccccctacgagctttgtgctgtgccccgctagaatggggtacctagtccccagcctgctccctagccagaggctctaatgtacaataaagcaatgtggtagttccaa

SEQ ID NO: 124422 - DNA, 1655 bp, Homo sapiens
  Payload ID: 4434
  Gene Symbol: CYP2D7
  Gene Name: cytochrome P450, family 2, subfamily D, polypeptide 7 (gene/pseudogene)
  ENST ID: ENST00000634785
  CDS Start-End: 86-1578
gagagtgtcctgcctggtcctctgtgcctggtggggtgggggtgccaggtgtgtccagaggagcccagttggtagtgaggcagccatggggctagaagcactggtgcccctggccatgatagtggccatcttcctgctcctggtggacctgatgcaccggcaccaacgctgggctgcacgctacccgccaggtcccctgccactgcccgggctgggcaaccttgctgcatgtggacttccagaacacaccatactgcttcgaccagttgcggcgccgcttcggggacgtgttcagcctgcagctggcctggacgccggtggtcgtgctcaatgggctggcggccgtgcgcgaggcgatggtgacccgcggcgaggacacggccgaccgcccgcctgcgcccatctaccaggtcctgggcttcgggccgcgttcccaaggggtgatcctgtcgcgctatgggcccgcgtggcgcgagcagaggcgcttctccgtgtccaccttgcgcaacttgggcctgggcaagaagtcgctggagcagtgggtgaccgaggaggccgcctgcctttgtgccgccttcgccgaccaagccggacgcccctttcgccccaacggcctcttggacaaagccgtgagcaacgtgatcgcctccctcacctgcgggcgccgcttcgagtacgacgaccctcgcttcctcaggctgctggacctagctcaggagggactgaaggaggagtcgggcttcctgcgcgaggtgctgaatgctgtccccgtcctcccgcacatcccagcgctggctggcaaggtcctacgcttccaaaaggctttcctgacccagctggatgagctgctaactgagcacaggatgacctgggacccagcccagccaccccgagacctgactgaggccttcctggcaaagaaggagaaggccaaggggagccctgagagcagcttcaatgatgagaacctgcgcatagtggtgggtaacctgttccttgccgggatggtgaccacctcgaccacgctggcctggggcctcctgctcatgatcctacacctggatgtgcagctccgtgtccaacaggagatcgacgacgtgatagggcaggtgcggcgaccagagatgggtgaccaggctcacatgccctacaccactgccgtgattcatgaggtgcagcgctttggggacatcgtccccctgggtgtgacccatatgacatcccgtgacatcgaagtacagggcttccgcatccctaagggaacgacactcatcaccaacctgtcatcggtgctgaaggatgaggccgtctggaagaagcccttccgcttccaccccgaacacttcctggatgcccagggccactttgtgaagccggaggccttcctgcctttctcagcaggccgccgtgcatgcctcggggagcccctggcccgcatggagctcttcctcttcttcacctccctgctgcagcacttcagcttctccgtggccgccggacagccccggcccagccactctcgtgtcgtcagctttctggtgaccccatccccctacgagctttgtgctgtgccccgctagaatggggtacctagtccccagcctgctccctagccagaggctctaatgtacaataaagcaatgtggtagttccaa

SEQ ID NO: 124423 - DNA, 1504 bp, Homo sapiens
  Payload ID: 4434
  Gene Symbol: CYP2D7
  Gene Name: cytochrome P450, family 2, subfamily D, polypeptide 7 (gene/pseudogene)
  ENST ID: ENST00000635668
  CDS Start-End: 91-1431
gtgccgagagtgtcctgcctggtcctctgtgcctggtggggtgggggtgccaggtgtgtccagaggagcccagttggtagtgaggcagccatggggctagaagcactggtgcccctggccatgatagtggccatcttcctgctcctggtggacctgatgcaccggcaccaacgctgggctgcacgctacccgccaggtcccctgccactgcccgggctgggcaacttgctgcatgtggacttccagaacacaccatactgcttcgaccagttgcggcgccgcttcggggacgtgttcagcctgcagctggcctggacgccggtggtcgtgctcaatgggctggcggccgtgcgcgaggcgatggtgacccgcggcgaggacacggccgaccgcccgcctgcgcccatctaccaggtcctgggcttcgggccgcgttcccaaggacgcccctttcgccccaacggcctcttggacaaagccgtgagcaacgtgatcgcctccctcacctgcgggcgccgcttcgagtacgacgaccctcgcttcctcaggctgctggacctagctcaggagggactgaaggaggagtcgggcttcctgcgcgaggtgctgaatgctgtccccgtcctcccgcacatcccagcgctggctggcaaggtcctacgcttccaaaaggctttcctgacccagctggatgagctgctaactgagcacaggatgacctgggacccagcccagccaccccgagacctgactgaggccttcctggcaaagaaggagaaggccaaggggagccctgagagcagcttcaatgatgagaacctgcgcatagtggtgggtaacctgttccttgccgggatggtgaccacctcgaccacgctggcctggggcctcctgctcatgatcctacacctggatgtgcagctccgtgtccaacaggagatcgacgacgtgatagggcaggtgcggcgaccagagatgggtgaccaggctcacatgccctacaccactgccgtgattcatgaggtgcagcgctttggggacatcgtccccctgggtgtgacccatatgacatcccgtgacatcgaagtacagggcttccgcatccctaagggaacgacactcatcaccaacctgtcatcggtgctgaaggatgaggccgtctggaagaagcccttccgcttccaccccgaacacttcctggatgcccagggccactttgtgaagccggaggccttcctgcctttctcagcaggccgccgtgcatgcctcggggagcccctggcccgcatggagctcttcctcttcttcacctccctgctgcagcacttcagcttctccgtggccgccggacagccccggcccagccactctcgtgtcgtcagctttctggtgaccccatccccctacgagctttgtgctgtgccccgctagaatggggtacctagtccccagcctgctccctagccagaggctctaatgtacaataaagcaatgtggtagttcc

SEQ ID NO: 124424 - DNA, 1740 bp, Homo sapiens
  Payload ID: 4434
  Gene Symbol: CYP2D7
  Gene Name: cytochrome P450, family 2, subfamily D, polypeptide 7 (gene/pseudogene)
  ENST ID: ENST00000635170
  CDS Start-End: 114-1663
aagggaagggtcacgcgctcggtgtgccgagagtgtcctgcctggtcctctgtgcctggtggggtgggggtgccaggtgtgtccagaggagcccagttggtagtgaggcagccatggggctagaagcactggtgcccctggccatgatagtggccatcttcctgctcctggtggacctgatgcaccggcaccaacgctgggctgcacgctacccgccaggtcccctgccactgcccgggctgggcaaccttgctgcatgtggacttccagaacacaccatactgcttcgaccagttgcggcgccgcttcggggacgtgttcagcctgcagctggcctggacgccggtggtcgtgctcaatgggctggcggccgtgcgcgaggcgatggtgacccgcggcgaggacacggccgaccgcccgcctgcgcccatctaccaggtcctgggcttcgggccgcgttcccaaggggtgatcctgtcgcgctatgggcccgcgtggcgcgagcagaggcgcttctccgtgtccaccttgcgcaacttgggcctgggcaagaagtcgctggagcagtgggtgaccgaggaggccgcctgcctttgtgccgccttcgccgaccaagccggacgcccctttcgccccaacggcctcttggacaaagccgtgagcaacgtgatcgcctccctcacctgcgggcgccgcttcgagtacgacgaccctcgcttcctcaggctgctggacctagctcaggagggactgaaggaggagtcgggcttcctgcgcgaggtgctgaatgctgtccccgtcctcccgcacatcccagcgctggctggcaaggtcctacgcttccaaaaggctttcctgacccagctggatgagctgctaactgagcacaggatgacctgggacccagcccagccaccccgagacctgactgaggccttcctggcaaagaaggagaaggccaaggggagccctgagagcagcttcaatgatgagaacctgcgcatagtggtgggtaacctgttccttgccgggatggtgaccacctcgaccacgctggcctggggcctcctgctcatgatcctacacctggatgtgcagcgaggaaggagagtgtcccctgggtgctgacccattgtggggacgcatgtctgtccagtccgtgtccaacaggagatcgacgacgtgatagggcaggtgcggcgaccagagatgggtgaccaggctcacatgccctacaccactgccgtgattcatgaggtgcagcgctttggggacatcgtccccctgggtgtgacccatatgacatcccgtgacatcgaagtacagggcttccgcatccctaagggaacgacactcatcaccaacctgtcatcggtgctgaaggatgaggccgtctggaagaagcccttccgcttccaccccgaacacttcctggatgcccagggccactttgtgaagccggaggccttcctgcctttctcagcaggccgccgtgcatgcctcggggagcccctggcccgcatggagctcttcctcttcttcacctccctgctgcagcacttcagcttctccgtggccgccggacagccccggcccagccactctcgtgtcgtcagctttctggtgaccccatccccctacgagctttgtgctgtgccccgctagaatggggtacctagtccccagcctgctccctagccagaggctctaatgtacaataaagcaatgtggtagttccaa

SEQ ID NO: 124425 - DNA, 692 bp, Homo sapiens
  Payload ID: 4434
  Gene Symbol: CYP2D7
  Gene Name: cytochrome P450, family 2, subfamily D, polypeptide 7 (gene/pseudogene)
  ENST ID: ENST00000634782
  CDS Start-End: 1-138
gacccagcccagccaccccgagacctgactgaggccttcctggcaaagaaggagaaggccaaggggagccctgagagcagcttcaatgatgagaacctgcgcatagtgtccgtgtccaacaggagatcgacgacgtgatagggcaggtgcggcgaccagagatgggtgaccaggctcacatgccctacaccactgccgtgattcatgaggtgcagcgctttggggacatcgtccccctgggtgtgacccatatgacatcccgtgacatcgaagtacagggcttccgcatccctaagggaacgacactcatcaccaacctgtcatcggtgctgaaggatgaggccgtctggaagaagcccttccgcttccaccccgaacacttcctggatgcccagggccactttgtgaagccggaggccttcctgcctttctcagcaggccgccgtgcatgcctcggggagcccctggcccgcatggagctcttcctcttcttcacctccctgctgcagcacttcagcttctccgtggccgccggacagccccggcccagccactctcgtgtcgtcagctttctggtgaccccatccccctacgagctttgtgctgtgccccgctagaatggggtacctagtccccagcctgctccctagccagaggctctaatgtacaataaagcaatgtggtagttccaa

SEQ ID NO: 124426 - DNA, 1734 bp, Homo sapiens
  Payload ID: 4434
  Gene Symbol: CYP2D7
  Gene Name: cytochrome P450, family 2, subfamily D, polypeptide 7 (gene/pseudogene)
  ENST ID: ENST00000635135
  CDS Start-End: 114-1661
aagggaagggtcacgcgctcggtgtgccgagagtgtcctgcctggtcctctgtgcctggtggggtgggggtgccaggtgtgtccagaggagcccagttggtagtgaggcagccatggggctagaagcactggtgcccctggccatgatagtggccatcttcctgctcctggtggacctgatgcaccggcaccaacgctgggctgcacgctacccgccaggtcccctgccactgcccgggctgggcaacttgctgcatgtggacttccagaacacaccatactgcttcgaccagttgcggcgccgcttcggggacgtgttcagcctgcagctggcctggacgccggtggtcgtgctcaatgggctggcggccgtgcgcgaggcgatggtgacccgcggcgaggacacggccgaccgcccgcctgcgcccatctaccaggtcctgggcttcgggccgcgttcccaaggggtgatcctgtcgcgctatgggcccgcgtggcgcgagcagaggcgcttctccgtgtccaccttgcgcaacttgggcctgggcaagaagtcgctggagcagtgggtgaccgaggaggccgcctgcctttgtgccgccttcgccgaccaagccggacgcccctttcgccccaacggcctcttggacaaagccgtgagcaacgtgatcgcctccctcacctgcgggcgccgcttcgagtacgacgaccctcgcttcctcaggctgctggacctagctcaggagggactgaaggaggagtcgggcttcctgcgcgaggtgctgaatgctgtccccgtcctcccgcacatcccagcgctggctggcaaggtcctacgcttccaaaaggctttcctgacccagctggatgagctgctaactgagcacaggatgacctgggacccagcccagccaccccgagacctgactgaggccttcctggcaaagaaggagaaggccaaggggagccctgagagcagcttcaatgatgagaacctgcgcatagtggtgggtaacctgttccttgccgggatggtgaccacctcgaccacgctggcctggggcctcctgctcatgatcctacacctggatgtgcagcgaggaaggagagtgtcccctgggtgccccattgtggggacgcatgtctgtccagtccgtgtccaacaggagatcgacgacgtgatagggcaggtgcggcgaccagagatgggtgaccaggctcacatgccctacaccactgccgtgattcatgaggtgcagcgctttggggacatcgtccccctgggtgtgacccatatgacatcccgtgacatcgaagtacagggcttccgcatccctaagggaacgacactcatcaccaacctgtcatcggtgctgaaggatgaggccgtctggaagaagcccttccgcttccaccccgaacacttcctggatgcccagggccactttgtgaagccggaggccttcctgcctttctcagcaggccgccgtgcatgcctcggggagcccctggcccgcatggagctcttcctcttcttcacctccctgctgcagcacttcagcttctccgtggccgccggacagccccggcccagccactctcgtgtcgtcagctttctggtgaccccatccccctacgagctttgtgctgtgccccgctagaatggggtacctagtccccagcctgctccctagccagaggctctaatgtacaataaagcaatgtggtagttcc

SEQ ID NO: 124427 - DNA, 1667 bp, Homo sapiens
  Payload ID: 4435
  Gene Symbol: CYP2E1
  Gene Name: cytochrome P450, family 2, subfamily E, polypeptide 1
  Uniprot ID: P05181
  ENST ID: ENST00000252945
  CDS Start-End: 34-1515
ctcccgggctggcagcagggccccagcggcaccatgtctgccctcggagtcaccgtggccctgctggtgtgggcggccttcctcctgctggtgtccatgtggaggcaggtgcacagcagctggaatctgcccccaggccctttcccgcttcccatcatcgggaacctcttccagttggaattgaagaatattcccaagtccttcacccggttggcccagcgcttcgggccggtgttcacgctgtacgtgggctcgcagcgcatggtggtgatgcacggctacaaggcggtgaaggaagcgctgctggactacaaggacgagttctcgggcagaggcgacctccccgcgttccatgcgcacagggacaggggaatcatttttaataatggacctacctggaaggacatccggcggttttccctgaccaccctccggaactatgggatggggaaacagggcaatgagagccggatccagagggaggcccacttcctgctggaagcactcaggaagacccaaggccagcctttcgaccccaccttcctcatcggctgcgcgccctgcaacgtcatagccgacatcctcttccgcaagcattttgactacaatgatgagaagtttctaaggctgatgtatttgtttaatgagaacttccacctactcagcactccctggctccagctttacaataattttcccagctttctacactacttgcctggaagccacagaaaagtcataaaaaatgtggctgaagtaaaagagtatgtgtctgaaagggtgaaggagcaccatcaatctctggaccccaactgtccccgggacctcaccgactgcctgctcgtggaaatggagaaggaaaagcacagtgcagagcgcttgtacacaatggacggtatcaccgtgactgtggccgacctgttctttgcggggacagagaccaccagcacaactctgagatatgggctcctgattctcatgaaataccctgagatcgaagagaagctccatgaagaaattgacagggtgattgggccaagccgaatccctgccatcaaggataggcaagagatgccctacatggatgctgtggtgcatgagattcagcggttcatcaccctcgtgccctccaacctgccccatgaagcaacccgagacaccattttcagaggatacctcatccccaagggcacagtcgtagtgccaactctggactctgttttgtatgacaaccaagaatttcctgatccagaaaagtttaagccagaacacttcctgaatgaaaatggaaagttcaagtacagtgactatttcaagccattttccacaggaaaacgagtgtgtgctggagaaggcctggctcgcatggagttgtttcttttgttgtgtgccattttgcagcattttaatttgaagcctctcgttgacccaaaggatatcgacctcagccctatacatattgggtttggctgtatcccaccacgttacaaactctgtgtcattccccgctcatgagtgtgtggaggacaccctgaaccccccgctttcaaacaagttttcaaattgtttgaggtcaggatttctcaaactgattcctttctttgcatatgagtatttgaaaataaatattttcccagaatataaataaatcatcacatgattatttt

SEQ ID NO: 124428 - DNA, 918 bp, Homo sapiens
  Payload ID: 4435
  Gene Symbol: CYP2E1
  Gene Name: cytochrome P450, family 2, subfamily E, polypeptide 1
  ENST ID: ENST00000418356
  CDS Start-End: 1-918
aggccctttcccgcttcccatcatcgggaacctcttccagttggaattgaagaatattcccaagtccttcacccgggccagcctttcgaccccaccttcctcatcggctgcgcgccctgcaacgtcatagccgacatcctcttccgcaagcattttgactacaatgatgagaagtttctaaggctgatgtatttgtttaatgagaacttccacctactcagcactccctggctccagctttacaataattttcccagctttctacactacttgcctggaagccacagaaaagtcataaaaaatgtggctgaagtaaaagagtatgtgtctgaaagggtgaaggagcaccatcaatctctggaccccaactgtccccgggacctcaccgactgcctgctcgtggaaatggagaaggaaaagcacagtgcagagcgcttgtacacaatggacggtatcaccgtgactgtggccgacctgttctttgcggggacagagaccaccagcacaactctgagatatgggctcctgattctcatgaaataccctgagatcgaagagaagctccatgaagaaattgacagggtgattgggccaagccgaatccctgccatcaaggataggcaagagatgccctacatggatgctgtggtgcatgagattcagcggttcatcaccctcgtgccctccaacctgccccatgaagcaacccgagacaccattttcagaggatacctcatccccaagggcacagtcgtagtgccaactctggactctgttttgtatgacaaccaagaatttcctgatccagaaaagtttaagccagaacacttcctgaatgaaaatggaaagttcaagtacagtgactatttcaagccattttccacaggaaaacgagtgtgtgctggagaaggcctggct

SEQ ID NO: 124429 - DNA, 1068 bp, Homo sapiens
  Payload ID: 4435
  Gene Symbol: CYP2E1
  Gene Name: cytochrome P450, family 2, subfamily E, polypeptide 1
  ENST ID: ENST00000421586
  CDS Start-End: 1-1068
aggccctttcccgcttcccatcatcgggaacctcttccagttggaattgaagaatattcccaagtccttcacccgggaatcatttttaataatggacctacctggaaggacatccggcggttttccctgaccaccctccggaactatgggatggggaaacagggcaatgagagccggatccagagggaggcccacttcctgctggaagcactcaggaagacccaaggccagcctttcgaccccaccttcctcatcggctgcgcgccctgcaacgtcatagccgacatcctcttccgcaagcattttgactacaatgatgagaagtttctaaggctgatgtatttgtttaatgagaacttccacctactcagcactccctggctccagctttacaataattttcccagctttctacactacttgcctggaagccacagaaaagtcataaaaaatgtggctgaagtaaaagagtatgtgtctgaaagggtgaaggagcaccatcaatctctggaccccaactgtccccgggacctcaccgactgcctgctcgtggaaatggagaaggaaaagcacagtgcagagcgcttgtacacaatggacggtatcaccgtgactgtggccgacctgttctttgcggggacagagaccaccagcacaactctgagatatgggctcctgattctcatgaaataccctgagatcgaagagaagctccatgaagaaattgacagggtgattgggccaagccgaatccctgccatcaaggataggcaagagatgccctacatggatgctgtggtgcatgagattcagcggttcatcaccctcgtgccctccaacctgccccatgaagcaacccgagacaccattttcagaggatacctcatccccaagggcacagtcgtagtgccaactctggactctgttttgtatgacaaccaagaatttcctgatccagaaaagtttaagccagaacacttcctgaatgaaaatggaaagttcaagtacagtgactatttcaagccattttccacaggaaaacgagtgtgtgctggagaaggcctggct

SEQ ID NO: 124430 - DNA, 475 bp, Homo sapiens
  Payload ID: 4435
  Gene Symbol: CYP2E1
  Gene Name: cytochrome P450, family 2, subfamily E, polypeptide 1
  ENST ID: ENST00000541261
  CDS Start-End: 216-475
aacagtattatggccagaggactcagaccacagctgcatccctgtgaggcacagactctccagggcacgcgggtcccgcctgggatgtgcacactcagttaacttgagaaagtggaatcgaattccgatgttgaattttccttctggccccattcatgtggcaggtggtgattcaggattgtctcccgggctggcagcagggccccagcggcaccatgtctgccctcggagtcaccgtggccctgctggtgtgggcggccttcctcctgctggtgtccatgtggaggcaggtgcacagcagctggaatctgcccccaggccctttcccgcttcccatcatcgggaacctcttccagttggaattgaagaatattcccaagtccttcacccggttggcccagcgcttcgggccggtgttcacgctgtacgtgggctcgcagcgcatggtggtgatgcacggctacaaggcggtgaa

SEQ ID NO: 124431 - DNA, 1912 bp, Homo sapiens
  Payload ID: 4435
  Gene Symbol: CYP2E1
  Gene Name: cytochrome P450, family 2, subfamily E, polypeptide 1
  Uniprot ID: P05181
  ENST ID: ENST00000463117
  CDS Start-End: 273-1754
acttccgggttgtttgctcccggagccataaccgcagctcagcgtgcgggcagagccggctgacaggagacaggacacagcacagagccccgcgccctctgaggcgggaggcttcgttcctgcaccagcgtggcttgccctttggacgcggcgagttaacttgagaaagtggaatcgaattccgatgttgaattttccttctggccccattcatgtggcaggtggtgattcaggattgtctcccgggctggcagcagggccccagcggcaccatgtctgccctcggagtcaccgtggccctgctggtgtgggcggccttcctcctgctggtgtccatgtggaggcaggtgcacagcagctggaatctgcccccaggccctttcccgcttcccatcatcgggaacctcttccagttggaattgaagaatattcccaagtccttcacccggttggcccagcgcttcgggccggtgttcacgctgtacgtgggctcgcagcgcatggtggtgatgcacggctacaaggcggtgaaggaagcgctgctggactacaaggacgagttctcgggcagaggcgacctccccgcgttccatgcgcacagggacaggggaatcatttttaataatggacctacctggaaggacatccggcggttttccctgaccaccctccggaactatgggatggggaaacagggcaatgagagccggatccagagggaggcccacttcctgctggaagcactcaggaagacccaaggccagcctttcgaccccaccttcctcatcggctgcgcgccctgcaacgtcatagccgacatcctcttccgcaagcattttgactacaatgatgagaagtttctaaggctgatgtatttgtttaatgagaacttccacctactcagcactccctggctccagctttacaataattttcccagctttctacactacttgcctggaagccacagaaaagtcataaaaaatgtggctgaagtaaaagagtatgtgtctgaaagggtgaaggagcaccatcaatctctggaccccaactgtccccgggacctcaccgactgcctgctcgtggaaatggagaaggaaaagcacagtgcagagcgcttgtacacaatggacggtatcaccgtgactgtggccgacctgttctttgcggggacagagaccaccagcacaactctgagatatgggctcctgattctcatgaaataccctgagatcgaagagaagctccatgaagaaattgacagggtgattgggccaagccgaatccctgccatcaaggataggcaagagatgccctacatggatgctgtggtgcatgagattcagcggttcatcaccctcgtgccctccaacctgccccatgaagcaacccgagacaccattttcagaggatacctcatccccaagggcacagtcgtagtgccaactctggactctgttttgtatgacaaccaagaatttcctgatccagaaaagtttaagccagaacacttcctgaatgaaaatggaaagttcaagtacagtgactatttcaagccattttccacaggaaaacgagtgtgtgctggagaaggcctggctcgcatggagttgtttcttttgttgtgtgccattttgcagcattttaatttgaagcctctcgttgacccaaaggatatcgacctcagccctatacatattgggtttggctgtatcccaccacgttacaaactctgtgtcattccccgctcatgagtgtgtggaggacaccctgaaccccccgctttcaaacaagttttcaaattgtttgaggtcaggatttctcaaactgattcctttctttgcatatgagtatttgaaaataaatattttcccagaatataaataaatcatcacatgattattttaactat

SEQ ID NO: 124432 - DNA, 745 bp, Homo sapiens
  Payload ID: 4435
  Gene Symbol: CYP2E1
  Gene Name: cytochrome P450, family 2, subfamily E, polypeptide 1
  ENST ID: ENST00000541080
  CDS Start-End: 1-130
aggccctttcccgcttcccatcatcgggaacctcttccagttggaattgaagaatattcccaagtccttcacccgggaatcatttttaataatggacctacctggaaggacatccggcggttttccctgaccaccctccggaactatgggatggggaaacagggcaatgagagccggatccagagggaggcccacttcctgctggaagcactcaggaagacccaagctttctacactacttgcctggaagccacagaaaagtcataaaaaatgtggctgaagtaaaagagtatgtgtctgaaagggtgaaggagcaccatcaatctctggaccccaactgtccccgggacctcaccgactgcctgctcgtggaaatggagaagagaagctccatgaagaaattgacagggtgattgggccaagccgaatccctgccatcaaggataggcaagagatgccctacatggatgctgtggtgcatgagattcagcggttcatcaccctcgtgccctccaacctgccccatgaagcaacccgagacaccattttcagaggatacctcatccccaagggcacagtcgtagtgccaactctggactctgttttgtatgacaaccaagaatttcctgatccagaaaagtttaagccagaacacttcctgaatgaaaatggaaagttcaagtacagtgactatttcaagccattttccacaggaaaacgagtgtgtgctggagaaggcctggct

SEQ ID NO: 124433 - DNA, 1720 bp, Homo sapiens
  Payload ID: 4436
  Gene Symbol: CYP2F1
  Gene Name: cytochrome P450, family 2, subfamily F, polypeptide 1
  Uniprot ID: P24903
  ENST ID: ENST00000331105
  CDS Start-End: 73-1548
aagcacacccagagctgcaggctctagcgcatcccagccagtgtctcctgcagctcagcagctgccttcaccatggacagcataagcacagccatcttactcctgctcctggctctcgtctgtctgctcctgaccctaagctcaagagataagggaaagctgcctccgggacccagacccctctcaatcctgggaaacctgctgctgctttgctcccaagacatgctgacttctctcactaagctgagcaaggagtatggctccatgtacacagtgcacctgggacccaggcgggtggtggtcctcagcgggtaccaagctgtgaaggaggccctggtggaccagggagaggagtttagtggccgcggtgactaccctgcctttttcaactttaccaagggcaatggcatcgccttctccagtggggatcgatggaaggtcctgagacagttctctatccagattctacggaatttcgggatggggaagagaagcattgaggagcgaatcctagaggagggcagcttcctgctggcggagctgcggaaaactgaaggcgagccctttgaccccacgtttgtgctgagtcgctcagtgtccaacattatctgttccgtgctcttcggcagccgcttcgactatgatgatgagcgtctgctcaccattatccgccttatcaatgacaacttccaaatcatgagcagcccctggggcgagttgtacgacatcttcccgagcctcctggactgggtgcctgggccgcaccaacgcatcttccagaacttcaagtgcctgagagacctcatcgcccacagcgtccacgaccaccaggcctcgctagaccccagatctccccgggacttcatccagtgcttcctcaccaagatggcagaggagaaggaggacccactgagccacttccacatggataccctgctgatgaccacacataacctgctctttggcggcaccaagacggtgagcaccacgctgcaccacgccttcctggcactcatgaagtacccaaaagttcaagcccgcgtgcaggaggagatcgacctcgtggtgggacgcgcgcggctgccggcgctgaaggaccgcgcggccatgccttacacagacgcggtgatccacgaggtgcagcgctttgcagacatcatccccatgaacttgccgcaccgcgtcactagggacacggcctttcgcggcttcctgatacccaagggcaccgatgtcatcaccctccttaacaccgtccactacgaccccagccagttcctgacgccccaggagttcaaccccgagcattttttggatgccaatcagtccttcaagaagagtccagccttcatgcccttctcagctgggcgccgtctgtgcctgggagagtcgctggcgcgcatggagctctttctgtacctcaccgccatcctgcagagcttttcgctgcagccgctgggtgcgcccgaggacatcgacctgaccccactcagctcaggtcttggcaatttgccgcggcctttccagctgtgcctgcgcccgcgctaacgccccggcccttccagattcgcctgtgagcgatgaggcccgcccatgcgggttgctacgtccccttcttggtccacagtctgccctcatccctctggcagtcacgctgtcttccctgcatgctgtgcctgccgcgtgcccttcccccatccctccaatctgtgccccgtct

SEQ ID NO: 124434 - DNA, 710 bp, Homo sapiens
  Payload ID: 4436
  Gene Symbol: CYP2F1
  Gene Name: cytochrome P450, family 2, subfamily F, polypeptide 1
  ENST ID: ENST00000439903
  CDS Start-End: 1-244
gccgcaccgcgtcactagggacacggcctttcgcggcttcctgatacccaagggcaccgatgtcatcaccctccttaacaccgtccactacgaccccagccagttcctgacgccccaggagttcaaccccgagcattttttggatgccaatcagtccttcaagaagagtccagccttcatgcccttctcagctgctttggatgcacagagacattcattcctcctctcaactctgctcctatagggcgccgtctgtgcctgggagagtcgctggcgcgcatggagctctttctgtacctcaccgccatcctgcagagcttttcgctgcagccgctgggtgcgcccgaggacatcgacctgaccccactcagctcaggtcttggcaatttgccgcggcctttccagctgtgcctgcgcccgcgctaacgccccggcccttccagattcgcctgtgagcgatgaggcccgcccatgcgggttgctacgtccccttcttggtccacagtctgccctcatccctctggcagtcacgctgtcttccctgcatgctgtgcctgccgcgtgcccttcccccatccctccaatctgtgccccgtctgcagggcagaggcagatgtggcatgtctttttgtacccacagagcttgttctatggcacgcccttttctaggctttttgtatcatttcttagtacattgtaatagattcaaa

SEQ ID NO: 124435 - DNA, 516 bp, Homo sapiens
  Payload ID: 4436
  Gene Symbol: CYP2F1
  Gene Name: cytochrome P450, family 2, subfamily F, polypeptide 1
  ENST ID: ENST00000534009
  CDS Start-End: 1-516
gcccgcgtgcaggaggagatcgacctcgtggtgggacgcgcgcggctgccggcgctgaaggaccgcgcggccatgccttacacagacgcggtgatccacgaggtgcagcgctttgcagacatcatccccatgaacttgccgcaccgcgtcactagggacacggcctttcgcggcttcctgatacccaagggcaccgatgtcatcaccctccttaacaccgtccactacgaccccagccagttcctgacgccccaggagttcaaccccgagcattttttggatgccaatcagtccttcaagaagagtccagccttcatgcccttctcagctggtgagggcaggaatcagagtctttctggcccaatttctacctacattcctcaccctaattccacttgccaaatcctctcactccttccttccacccattctcagctttggatgcacagagacattcattcctcctctcaactctgctcctataggcaagtagtgactaaaatcctcgtgaagcaa

SEQ ID NO: 124436 - DNA, 1662 bp, Homo sapiens
  Payload ID: 4436
  Gene Symbol: CYP2F1
  Gene Name: cytochrome P450, family 2, subfamily F, polypeptide 1
  Uniprot ID: P24903
  ENST ID: ENST00000532164
  CDS Start-End: 73-1035
aagcacacccagagctgcaggctctagcgcatcccagccagtgtctcctgcagctcagcagctgccttcaccatggacagcataagcacagccatcttactcctgctcctggctctcgtctgtctgctcctgaccctaagctcaagagataagggaaagctgcctccgggacccagacccctctcaatcctgggaaacctgctgctgctttgctcccaagacatgctgacttctctcactaagctgagcaaggagtatggctccatgtacacagtgcacctgggacccaggcgggtggtggtcctcagcgggtaccaagctgtgaaggaggccctggtggaccagggagaggagtttagtggccgcggtgactaccctgcctttttcaactttaccaagggcaatggcatcgccttctccagtggggatcgatggaaggtcctgagacagttctctatccagattctacggaatttcgggatggggaagagaagcattgaggagcgaatcctagaggagggcagcttcctgctggcggagctgcggaaaactgaaggcgagccctttgaccccacgtttgtgctgagtcgctcagtgtccaacattatctgttccgtgctcttcggcagccgcttcgactatgatgatgagcgtctgctcaccattatccgccttatcaatgacaacttccaaatcatgagcagcccctggggcgagttgtacgacatcttcccgagcctcctggactgggtgcctgggccgcaccaacgcatcttccagaacttcaagtgcctgagagacctcatcgcccacagcgtccacgaccaccaggcctcgctagaccccagatctccccgggacttcatccagtgcttcctcaccaagatggcagaggagaaggaggacccactgagccacttccacatggataccctgctgatgaccacacataacctgctctttggcggcaccaagacgcccgcgtgcaggaggagatcgacctcgtggtgggacgcgcgcggctgccggcgctgaaggaccgcgcggccatgccttacacagacgcggtgatccacgaggtgcagcgctttgcagacatcatccccatgaacttgccgcaccgcgtcactagggacacggcctttcgcggcttcctgatacccaagggcaccgatgtcatcaccctccttaacaccgtccactacgaccccagccagttcctgacgccccaggagttcaaccccgagcattttttggatgccaatcagtccttcaagaagagtccagccttcatgcccttctcagctgggcgccgtctgtgcctgggagagtcgctggcgcgcatggagctctttctgtacctcaccgccatcctgcagagcttttcgctgcagccgctgggtgcgcccgaggacatcgacctgaccccactcagctcaggtcttggcaatttgccgcggcctttccagctgtgcctgcgcccgcgctaacgccccggcccttccagattcgcctgtgagcgatgaggcccgcccatgcgggttgctacgtccccttcttggtccacagtctgccctcatccctctggcagtcacgctgtcttccctgcatgctgtgcctgccgcgtgcccttcccccatccctccaatctgtgccccgtct

SEQ ID NO: 124437 - DNA, 1896 bp, Homo sapiens
  Payload ID: 4437
  Gene Symbol: CYP2J2
  Gene Name: cytochrome P450, family 2, subfamily J, polypeptide 2
  Uniprot ID: P51589
  ENST ID: ENST00000371204
  CDS Start-End: 45-1553
cgccgcctgcttggaccgcagaagagcaggaggacgtctgagccatgctcgcggcgatgggctctctggcggctgccctctgggcagtggtccatcctcggactctcctactgggcactgtcgcctttctgctcgctgctgactttctcaaaagacggcgcccaaagaactacccgccggggccctggcgcctgcccttccttggcaacttcttccttgtggacttcgagcagtcgcacctggaggttcagctgtttgtgaagaaatatgggaacctttttagcttggagcttggtgacatatctgcagttcttattactggcttgcccttaatcaaagaagcccttatccacatggaccaaaactttgggaaccgccccgtgacccctatgcgagaacatatctttaagaaaaatggattgattatgtcaagtggccaggcatggaaggagcaaagaaggttcactctgacagcactaaggaactttggtttaggaaagaagagcttagaggaacgcattcaggaggaggcccaacacctcactgaagcaataaaagaggagaacggacagccttttgaccctcatttcaagatcaacaatgcagtttccaatatcatttgctccatcaccttcggagaacgctttgagtaccaggatagttggtttcagcagctgctgaagttactagatgaagtcacatacttggaggcttcaaagacatgccagctctacaatgtctttccatggataatgaaattcctgcctggaccccaccaaactctcttcagcaactggaaaaaactgaaattgtttgtttctcatatgattgacaaacacagaaaggattggaatcctgcagaaacaagagactttattgatgcttaccttaaagaaatgtcaaagcacacaggcaatcctacttcaagtttccatgaagaaaacctcatctgcagcaccctggacctcttctttgccggaaccgagacaacttccacaactctgcgatgggctctgctttatatggccctctacccagaaatccaagaaaaagtacaagctgagattgacagagtgattggccaggggcagcagccgagcacagccgcccgggagtccatgccctacaccaatgctgtcatccatgaggtgcagagaatgggcaacatcatccccctgaacgttcccagggaagtgacagttgataccactttggctgggtaccacctgcccaagggtaccatgatcctgaccaatttgacggcgctgcacagggaccccacagagtgggccacccctgacacattcaatccggaccattttctggagaatggacagtttaagaaaagggaagcctttatgcctttctcaataggaaagcgggcatgcctcggagaacagttggccaggactgagctgtttattttcttcacttcccttatgcaaaaatttaccttcaggcccccaaacaatgagaagctgagcctgaagtttagaatgggtatcaccatttccccagtcagtcaccgcctctgcgctgttcctcaggtgtaatattgttaagaaagaaaggggcaaggaaagtaagaagacatggcacgtgttctgaaaccactggtgtctgctcagatgtgttgggacaaaatgaaagtgactttcaagaaagatcagaggaatttgactcagagaaaactagatccaaatcccagctctactgtctcgtccgaattagccttgggaaaatcatttatatgctaaataatttacctttttatctaggagatgaaaagaggataatgtttccttccataaagaaagttcttgtaagaatcaaaagaaatggtgagctttaagtggtttgtaaaccataaaacacatcataaaagttctatctata

SEQ ID NO: 124438 - DNA, 2235 bp, Homo sapiens
  Payload ID: 4438
  Gene Symbol: CYP2R1
  Gene Name: cytochrome P450, family 2, subfamily R, polypeptide 1
  Uniprot ID: Q6VVX0
  ENST ID: ENST00000334636
  CDS Start-End: 48-1553
cctgggtctcagggctgctgtggagttcgcacctccagctcgggccgatgtggaagctttggagagctgaagagggcgcggcggcgctcggcggcgcgctcttcctgctgctcttcgcgctaggggtccgccagctgctgaagcagaggcggccgatgggcttccccccggggccgccggggctgccatttatcggcaacatctattccctggcagcctcatccgagcttccccatgtctacatgagaaagcagagccaggtgtacggagagatcttcagtttagatcttggaggcatatcaactgtggttctaaatggctatgatgtagtaaaggaatgccttgttcatcaaagcgaaatttttgcagacagaccatgccttcctttattcatgaagatgacaaaaatgggaggcttactcaattccagatatggccgaggatgggttgatcacagacgattagctgtaaacagttttcgatattttggatatggccaaaagtcttttgaatctaaaatcttggaagaaaccaaatttttcaatgatgctattgaaacatacaaaggtagaccttttgactttaaacagttaataacgaatgctgtttcaaacataaccaatctgatcatttttggagaacgattcacttatgaagacaccgattttcagcacatgattgagttatttagtgaaaatgtggaactagctgccagtgcctcagtcttcttgtataatgcctttccatggattggcatcctgccttttggaaaacatcaacagctgtttagaaatgcagctgtagtctatgattttctctccagactcattgaaaaagcttcagtcaacagaaagcctcagctacctcagcattttgttgatgcttatttagatgagatggatcaaggtaaaaatgacccatcatctactttctccaaagaaaacctaattttctcagtgggtgaactcatcattgctggaactgaaactacaaccaatgtgctacggtgggcgattcttttcatggccctttatcctaatattcaaggacaagttcagaaagagattgatttaattatgggccctaatgggaagccttcttgggacgacaaatgcaaaatgccttatactgaggcagttttgcatgaagttttaagattctgtaatatagttccattagggattttccatgcaacctctgaagatgcagttgtacgtggttattccattcctaaaggcacaacagtaattacaaatctttattctgtacactttgatgaaaagtactggagagacccagaagtgttccatcctgagcgatttctggacagcagtggatattttgccaagaaggaagctttggttcctttttccctaggaagaagacattgtcttggagaacacttggctcggatggaaatgttcttgttttttacagcattgcttcagaggtttcatttgcattttccacatgaactagttccagatctgaagcccaggttaggcatgacattgcagccccaaccctacctcatctgtgctgaaagacgctgaaactgcctgggatgttttcgggaacaagaatgtatatttgccttatccctgaacttggtttaatcaaatcaatgtgtgtattagaataaaagtcacagcatcaaaaagccaaatgaacacagatgtgtcttaaaatagtactagagcagaaacaagcactagtcgtgattgtttttcaagattttatgacttctggggtaaaattctctgttgagagacacaaaggtgcaaatgatgggtgttgcttaaaatgctaagaagggtcatggacgccctaagctgagcatcttgtttagtaccaggtactttcatcccttcttgactccatctgccttctgtcctggggggccttggttccagaaaccagctcccttctgatcaggtattgtcattaataaactgtgtggtaccagtccagtttaatagaggactacagaagaaattaaaacacaaataaatgagttaggactatagaggtattttagatatggtgggagatggtagaagaaatatgtatttaatgtagagcctgccagtgctttcatatcttgcttcctgctctgtcttcataagaactgtgtcattcttcttataaatgagggtctgtgtgaccctgagtgtccatcttcatagcagttaagtagataggacattacaataatatatttaaaatttaaaatga

SEQ ID NO: 124439 - DNA, 1668 bp, Homo sapiens
  Payload ID: 4438
  Gene Symbol: CYP2R1
  Gene Name: cytochrome P450, family 2, subfamily R, polypeptide 1
  ENST ID: ENST00000534686
  CDS Start-End: 576-689
gccacttcaggtccagggtggacgcatgccctcaggtgcgggcgtcttgcgagtcggcctcgcagctctgtggaagctgcacgcggcttgtcggaaaatcaaggcgttctgagttctagatggttaatagcaggttcttcggtgtctgcagtcgacgaacgactggtgtaggcgtttgctgtgagaatggagaatgcaggggaacgcccctgactgagaagcgggccctgggaaacgattgtgaacgcgtgaatgaattgatgactaaaatccgctgcgggggtcctacagcgcagatggtaatgccgttctgactggctgggaacggcaccttagcagatacttaaaaggcgccttctgtgtgccactgtcactgccaacttggtgactcatttaaaactcataaccagccggtgaggtcggtacttcgctcctcctcattctgcggaggggaaagcagcacggaaatgccctgtgactggcagcggaaaaggcgaccaccgcttgtgtatcttcagtttagatcttggaggcatatcaactgtggttctaaatggctatgatgtagtaaaggaatgccttgttcatcaaagcgaaatttttgcagacagaccatgccttcctttattcatgaagatgacaaaaatgggaggcttactcaattccagatatggccgaggatgggttgatcacagacgattagctgtaaacagttttcgatattttggatatggccaaaagtcttttgaatctaaaatcttggaagaaaccaaatttttcaatgatgctattgaaacatacaaaggtagaccttttgactttaaacagttaataacgaatgctgtttcaaacataaccaatctgatcatttttggagaacgattcacttatgaagacaccgattttcagcacatgattgagttatttagtgaaaatgtggaactagctgccagtgcctcagtcttcttgtataatgcctttccatggattggcatcctgccttttggaaaacatcaacagctgtttagaaatgcagctgtagtctatgattttctctccagactcattgaaaaagcttcagtcaacagaaagcctcagctacctcagcattttgttgatgcttatttagatgagatggatcaaggtaaaaatgacccatcatctactttctccaaagaaaacctaattttctcagtgggtgaactcatcattgctggaactgaaactacaaccaatgtgctacggtgggcgattcttttcatggccctttatcctaatattcaagtactggagagacccagaagtgttccatcctgagcgatttctggacagcagtggatattttgccaagaaggaagctttggttcctttttccctaggaagaagacattgtcttggagaacacttggctcggatggaaatgttcttgttttttacagcattgcttcagaggtttcatttgcattttccacatgaactagttccagatctgaagcccaggttaggcatgacattgcagccccaaccctacctcatctgtgctgaaagacgctgaaactgcctgggatgttttcgggaacaagaatgtatatttgccttatccctgaacttggtttaatcaaatcaatgtgtgtattagaataaaagtcacagcatcaaaaagccaaa

SEQ ID NO: 124440 - DNA, 1746 bp, Homo sapiens
  Payload ID: 4438
  Gene Symbol: CYP2R1
  Gene Name: cytochrome P450, family 2, subfamily R, polypeptide 1
  ENST ID: ENST00000532378
  CDS Start-End: 856-1662
tccagggtggacgcatgccctcaggtgcgggcgtcttgcgagtcggcctcgcagctctgtggaagctgcacgcggcttgtcggaaaatcaaggcgttctgagttctagatggttaatagcaggttcttcggtgtctgcagtcgacgaacgactggtgtaggcgtttgctgtgagaatggagaatgcaggggaacgcccctgactgagaagcgggccctgggaaacgattgtgaacgcgtgaatgaattgatgactaaaatccgctgcgggggtcctacagcgcagatggtaatgccgttctgactggctgggaacggcaccttagcagatacttaaaaggcgccttctgtgtgccactgtcactgccaacttggtgactcatttaaaactcataaccagccggtgaggtcggtacttcgctcctcctcattctgcggaggggaaagcagcacggaaatgccctgtgactggcagcggaaaaggcgaccaccgcttgtgtgtgggtgtcccgacgtccggagggggcaggagtttccacgggtcctgggacagagctcacctgttttgttttgaattacacttatttatatgcaactacaggcctgacgctagcggtgaagaaggcagatacagccttttaaggagttggcagatgagtgggagagagaaaactaatctcattatcggccacaggctgtggtcagtgttttgaaggaaaagtacagggatgtttggcaactgtggtatttcagtttacgttgttaaagggaagctggacgagataataaagatcttcagtttagatcttggaggcatatcaactgtggttctaaatggctatgatgtagtaaaggaatgccttgttcatcaaagcgaaatttttgcagacagaccatgccttcctttattcatgaagatgacaaaaatgggagactcattgaaaaagcttcagtcaacagaaagcctcagctacctcagcattttgttgatgcttatttagatgagatggatcaaggtaaaaatgacccatcatctactttctccaaagaaaacctaattttctcagtgggtgaactcatcattgctggaactgaaactacaaccaatgtgctacggtgggcgattcttttcatggccctttatcctaatattcaaggacaagttcagaaagagattgatttaattatgggccctaatgggaagccttcttgggacgacaaatgcaaaatgccttatactgaggcagttttgcatgaagttttaagattctgtaatatagttccattagggattttccatgcaacctctgaagatgcagttgtacgtggttattccattcctaaaggcacaacagtaattacaaatctttattctgtacactttgatgaaaagtactggagagacccagaagtgttccatcctgagcgatttctggacagcagtggatattttgccaagaaggaagctttggttcctttttccctaggaagaagacattgtcttggagaacacttggctcggatggaaatgttcttgttttttacagcattgcttcagaggtttcatttgcattttccacatgaactagttccagatctgaagcccaggttaggcatgacattgcagccccaaccctacctcatctgtgctgaaagacgctgaaactgcctgggatgttttcgggaacaagaatgtatatttgccttatccctgaacttggtttaatcaaatcaatgtgtgtattag

SEQ ID NO: 124441 - DNA, 2325 bp, Homo sapiens
  Payload ID: 4438
  Gene Symbol: CYP2R1
  Gene Name: cytochrome P450, family 2, subfamily R, polypeptide 1
  ENST ID: ENST00000532805
  CDS Start-End: 1483-1596
tttctcaagccatggctcctccttgctttttatgatccctggtgtccacaatttgaagctctaccctgaagctctatcctgaaatacatttgccctctgttctgccttcatagtgacacaactttaagttcatggctcttttactatccttgtggaatggcatctttttattgtctctgctaaagttcccttctgcgaagagactttcctttaataggactacattactgcattgtccccactttgctcggctggtagccattcccttttacttagaactcttctactgtcacttttgactaataccactgcttatggcaggcagtccatgttcttttcccaaggttctggatatacctagtgctcacttggcagagcccacccgtgtgccaaagactctggtggccccattactcagctggttagttgttaccacttggcagtcctcatgacctttgctgatataactttctgctgaacttttgttctctgctaagcctcctgttttcttctgaagtagtgtgtaccatggctaaatctccttgacttgtttgcacagggataaggcttgtctcagtattttggctgtaaaatgctatcctgaaaggatggcaataagcaatctttacattccactgataagggaatatcgttctctcactgactggcctcttatattgggttaactagaatagactacaggaggtgtgacattgtaagtgaacctggggtgaggcacagggcagacaactccagcaaggcatggaatggatcctgttttgccttccccttaactgagaggcagccacctaacctatgtggtaaatgcctttcctccaaggttaggttcccttagagccctcttcattcactttgtggaatacagagagccaaatacaaatgggcttagttacaatatgtttatacttcaaagttgtctctcaggtatttgacaatcctctccctcactagcctcattcatcttggaaatagaaggagattcctagatatcattgaacattttgaggtaaaatgaatcataaaagagcatatatatcaaatatattttctatggcaatactgaagcccagataggttaagtgttctgctcagagtcttttatctgtttaatggcaaaccttaaactagacccaggcctcccgagtccagtacccttttcattatactgttggtaagactgtgactttaggcactgaatggcataatgaaatcacacagttttgcatgccttatagaaggagggcactctgaacattgtcagttgagtaataactgcctatattttcagggacgtaacaaatcctggaagagccgcacttaccacttgtagatttccatggttatatttctccatacatgctgtcatttaaatgttgtttttcttctcttctcaaagatcttcagtttagatcttggaggcatatcaactgtggttctaaatggctatgatgtagtaaaggaatgccttgttcatcaaagcgaaatttttgcagacagaccatgccttcctttattcatgaagatgacaaaaatgggaggcttactcaattccagatatggccgaggatgggttgatcacagacgattagctgtaaacagttttcgatattttggatatggccaaaagtcttttgaatctaaaatcttggaagaaaccaaatttttcaatgatgctattgaaacatacaaaggtagaccttttgactttaaacagttaataacgaatgctgtttcaaacataaccaatctgatcatttttggagaacgattcacttatgaagacaccgattttcagcacatgattgagttatttagtgaaaatgtggaactagctgccagtgcctcagtcttcttgtataatgcctttccatggattggcatcctgccttttggaaaacatcaacagctgtttagaaatgcagctgtaagacccagaagtgttccatcctgagcgatttctggacagcagtggatattttgccaagaaggaagctttggttcctttttccctaggaagaagacattgtcttggagaacacttggctcggatggaaatgttcttgttttttacagcattgcttcagaggtttcatttgcattttccacatgaactagttccagatctgaagcccaggttaggcatgacattgcagccccaaccctacctcatctgtgctgaaagacgctgaaactgcctgggatgttttcgggaacaagaatgtatatttgccttatccctgaacttggtttaatcaaatcaatgtgtgtattagaataaaagtcacagcatcaaaaagccaaatg

SEQ ID NO: 124442 - DNA, 1882 bp, Homo sapiens
  Payload ID: 4438
  Gene Symbol: CYP2R1
  Gene Name: cytochrome P450, family 2, subfamily R, polypeptide 1
  ENST ID: ENST00000530609
  CDS Start-End: 554-667
cgcatgccctcaggtgcgggcgtcttgcgagtcggcctcgcagctctgtggaagctgcacgcggcttgtcggaaaatcaaggcgttctgagttctagatggttaatagcaggttcttcggtgtctgcagtcgacgaacgactggtgtaggcgtttgctgtgagaatggagaatgcaggggaacgcccctgactgagaagcgggccctgggaaacgattgtgaacgcgtgaatgaattgatgactaaaatccgctgcgggggtcctacagcgcagatggtaatgccgttctgactggctgggaacggcaccttagcagatacttaaaaggcgccttctgtgtgccactgtcactgccaacttggtgactcatttaaaactcataaccagccggtgaggtcggtacttcgctcctcctcattctgcggaggggaaagcagcacggaaatgccctgtgactggcagcggaaaaggcgaccaccgcttgtgtatcttcagtttagatcttggaggcatatcaactgtggttctaaatggctatgatgtagtaaaggaatgccttgttcatcaaagcgaaatttttgcagacagaccatgccttcctttattcatgaagatgacaaaaatgggaggcttactcaattccagatatggccgaggatgggttgatcacagacgattagctgtaaacagttttcgatattttggatatggccaaaagtcttttgaatctaaaatcttggaagaaaccaaatttttcaatgatgctattgaaacatacaaaggtagaccttttgactttaaacagttaataacgaatgctgtttcaaacataaccaatctgatcatttttggagaacgattcacttatgaagacaccgattttcagcacatgattgagttatttagtgaaaatgtggaactagctgccagtgcctcagtcttcttgtataatgcctttccatggattggcatcctgccttttggaaaacatcaacagctgtttagaaatgcagctgtagtctatgattttctctccagactcattgaaaaagcttcagtcaacagaaagcctcagctacctcagcattttgttgatgcttatttagatgagatggatcaaggtaaaaatgacccatcatctactttctccaaagaaaacctaattttctcagtgggtgaactcatcattgctggaactgaaactacaaccaatgtgctacggtgggcgattcttttcatggccctttatcctaatattcaaggacaagttcagaaagagattgatttaattatgggccctaatgggaagccttcttgggacgacaaatgcaaaatgccttatactgaggcagttttgcatgaagttttaagattctgtaatatagttccattagggattttccatgcaacctctgaagatgcagttgtacgtggttattccattcctaaaggcacaacagtaattacaaatctttattctgtacactttgatgaaaagtactggagagacccagaagtgttccatcctgagcgatttctggacagcagtggatattttgccaagaaggaagctttggttcctttttccctaggaagaagacattgtcttggagaacacttggctcggatggaaatgttcttgttttttacagcattgcttcagaggtttcatttgcattttccacatgaactagttccagatctgaagcccaggttaggcatgacattgcagccccaaccctacctcatctgtgctgaaagacgctgaaactgcctgggatgttttcgggaacaagaatgtatatttgccttatccctgaacttggtttaatcaaatcaatgtgtgtattagaataaaagtcacagcatcaaaaagccaaa

SEQ ID NO: 124443 - DNA, 446 bp, Homo sapiens
  Payload ID: 4438
  Gene Symbol: CYP2R1
  Gene Name: cytochrome P450, family 2, subfamily R, polypeptide 1
  ENST ID: ENST00000525015
  CDS Start-End: 1-98
atcaaagcgaaatttttgcagacagaccatgccttcctttattcatgaagatgacaaaaatgggagtactggagagacccagaagtgttccatcctgagcgatttctggacagcagtggatattttgccaagaaggaagctttggttcctttttccctaggaagaagacattgtcttggagaacacttggctcggatggaaatgttcttgttttttacagcattgcttcagaggtttcatttgcattttccacatgaactagttccagatctgaagcccaggttaggcatgacattgcagccccaaccctacctcatctgtgctgaaagacgctgaaactgcctgggatgttttcgggaacaagaatgtatatttgccttatccctgaacttggtttaatcaaatcaatgtgtgtattagaataaaagtcacagcatcaaaaagcc

SEQ ID NO: 124444 - DNA, 2782 bp, Homo sapiens
  Payload ID: 4439
  Gene Symbol: CYP2S1
  Gene Name: cytochrome P450, family 2, subfamily S, polypeptide 1
  Uniprot ID: Q96SQ9
  ENST ID: ENST00000310054
  CDS Start-End: 217-1731
acatccgttggagcatgagttcccgacatcaggcggcggcggtggtccgggagaaacccggcggcggggagataagcctgcccaggaggcagggggctgggctagctgccccgccccgcgcctgacttcgttggggagggagacgcccggctcccgcccctaactagcccagccgcgcggagcgcctgggagaggagaaggagccgacctgccgagatggaggcgaccggcacctgggcgctgctgctggcgctggcgctgctcctgctgctgacgctggcgctgtccgggaccagggcccgaggccacctgccccccgggcccacgccgctaccactgctgggaaacctcctgcagctacggcccggggcgctgtattcagggctcatgcggctgagtaagaagtacggaccggtgttcaccatctacctgggaccctggcggcctgtggtggtcctggttgggcaggaggctgtgcgggaggccctgggaggtcaggctgaggagttcagcggccggggaaccgtagcgatgctggaagggacttttgatggccatggggttttcttctccaacggggagcggtggaggcagctgaggaagtttaccatgcttgctctgcgggacctgggcatggggaagcgagaaggcgaggagctgatccaggcggaggcccggtgtctggtggagacattccaggggacagaaggacgcccattcgatccctccctgctgctggcccaggccacctccaacgtagtctgctccctcctctttggcctccgcttctcctatgaggataaggagttccaggccgtggtccgggcagctggtggtaccctgctgggagtcagctcccaggggggtcagacctacgagatgttctcctggttcctgcggcccctgccaggcccccacaagcagctcctccaccacgtcagcaccttggctgccttcacagtccggcaggtgcagcagcaccaggggaacctggatgcttcgggccccgcacgtgaccttgtcgatgccttcctgctgaagatggcacaggaggaacaaaacccaggcacagaattcaccaacaagaacatgctgatgacagtcatttatttgctgtttgctgggacgatgacggtcagcaccacggtcggctataccctcctgctcctgatgaaataccctcatgtccaaaagtgggtacgtgaggagctgaatcgggagctgggggctggccaggcaccaagcctaggggaccgtacccgcctcccttacaccgacgcggttctgcatgaggcgcagcggctgctggcgctggtgcccatgggaataccccgcaccctcatgcggaccacccgcttccgagggtacaccctgccccagggcacggaggtcttccccctccttggctccatcctgcatgaccccaacatcttcaagcacccagaagagttcaacccagaccgtttcctggatgcagatggacggttcaggaagcatgaggcgttcctgcccttctccttagggaagcgtgtctgccttggagagggcctggcaaaagcggagctcttcctcttcttcaccaccatcctacaagccttctccctggagagcccgtgcccgccggacaccctgagcctcaagcccaccgtcagtggccttttcaacattcccccagccttccagctgcaagtccgtcccactgaccttcactccaccacgcagaccagatgaaggaaggcaacttggaagtggtgggtgcccaggacggtgcctccagcctcaacagtgggcatggacagggttaatgtctccagagtgtacactgcaggcagccacatttacacgcctgcagttgttttccggagtctgtcccacggcccacacgctcacttgactcatgctgctaagatgcacaaccgcacacccatacacaactacaagggccacaaagcaactgctgggttagctttccacagacataaatatagtccatctgcaatcacaagcacatagccaggtaacccaccaactcccctggatctgcagcccacacgtgggagtctggctgtcaccttcacaagccacagaaacggccacacatgttcacagctcacacgccctctccattcatcgaacttctcagtgtccctgtccctggtgcctggcacagggaacagcatgccccctccggggtcatgccacccagagactgtcgctgtctatggccccaactcatgctccctctcttggctacaccactctcccagcctgtgaccaccgatgtccacacacccccaaccacttgtccacacagctacccacgtacgacatcgtcctggctccccagagtatcttcccactgagacacgccgcccccacagaggcacagtccccagccacctctgcaactgcagccctcagtcacccctttttaagcaccctgattctaccaaatgcaaacacatctgggtctgcgattatgcacagagactttggacatacgaggaccctcagaccggaggaacacctgcccaaccccaacacgtgcttatgtaaccacgtggaaagcggcccctgctgcccctccacacacacatacacactcactgatctacagcccctgttcggcgtcagagtccccactagacccagtggaaggggttagagaccaagtaggggccagtttccaattcaccctgtcagggagtgagccggatctgacgttccttgtgacttaagggtccggcttgggaattaaagtttgtttctggcctttagccta

SEQ ID NO: 124445 - DNA, 759 bp, Homo sapiens
  Payload ID: 4439
  Gene Symbol: CYP2S1
  Gene Name: cytochrome P450, family 2, subfamily S, polypeptide 1
  ENST ID: ENST00000595590
  CDS Start-End: 231-413
accgaggctgaaagagacaggagtcctccagccgaggagaagctgatgcagctgggcttgtcccagagggagaggtagctggagccatacagctgagtaagaagtacggaccggtgttcaccatctacctgggaccctggcggcctgtggtggtcctggttgggcaggaggctgtgcgggaggccctgggaggtcaggctgaggagttcagcggccggggaaccgtagcgatgctggaagggacttttgatggccatggaggaacaaaacccaggcacagaattcaccaacaagaacatgctgatgacagtcatttatttgctgtttgctgggacgatgacggtcagcaccacggtcggctataccctcctgctcctgatgaaataccctcatgtccaaaagtgggtacgtgaggagctgaatcgggagctgggggctggccaggcaccaagcctaggggaccgtacccgcctcccttacaccgacgcggttctgcatgaggcgcagcggctgctggcgctggtgcccatgggaataccccgcaccctcatgcggaccacccgcttccgagggtacaccctgccccagggcacggaggtcttccccctccttggctccatcctgcatgaccccaacatcttcaagcacccagaagagttcaacccagaccgtttcctggatgcagatggacggttcaggaagcatgaggcgttcctgcccttctccttagggaagcgtgtctgccttggagagggcctg

SEQ ID NO: 124446 - DNA, 510 bp, Homo sapiens
  Payload ID: 4439
  Gene Symbol: CYP2S1
  Gene Name: cytochrome P450, family 2, subfamily S, polypeptide 1
  ENST ID: ENST00000593890
  CDS Start-End: 1-222
gctgtttgctgggacgatgacggtcagcaccacggtcggctataccctcctgctcctgatgaaataccctcatgtccaaaggcacggaggtcttccccctccttggctccatcctgcatgaccccaacatcttcaagcacccagaagagttcaacccagaccgtttcctggatgcagatggacggttcaggaagcatgaggcgttcctgcccttctccttagggaagcgtgtctgccttggagagggcctggcaaaagcggagctcttcctcttcttcaccaccatcctacaagccttctccctggagagcccgtgcccgccggacaccctgagcctcaagcccaccgtcagtggccttttcaacattcccccagccttccagctgcaagtccgtcccactgaccttcactccaccacgcagaccagatgaaggaaggcaacttggaagtggtgggtgcccaggacggtgcctccagcctcaacagtgggcatggacagggttaatgtct

SEQ ID NO: 124447 - DNA, 580 bp, Homo sapiens
  Payload ID: 4439
  Gene Symbol: CYP2S1
  Gene Name: cytochrome P450, family 2, subfamily S, polypeptide 1
  ENST ID: ENST00000600561
  CDS Start-End: 19-580
aggagccgacctgccgagatggaggcgaccggcacctgggcgctgctgctggcgctggcgctgctcctgctgctgacgctggcgctgtccgggaccagggcccgaggccacctgccccccgggcccacgccgctaccactgctgggaaacctcctgcagctacggcccggggcgctgtattcagggctcatgcggctgagtaagaagtacggaccggtgttcaccatctacctgggaccctggcggcctgtggtggtcctggttgggcaggaggctgtgcgggaggccctgggaggtcaggctgaggagttcagcggccggggaaccgtagcgatgctggaagggacttttgatggccatggggttttcttctccaacggggagcggtggaggcagctgaggaagtttaccatgcttgctctgcgggacctgggcatggggaagcgagaaggcgaggagctgatccaggcggaggcccggtgtctggtggagacattccaggggacagaaggaggaacaaaacccaggcacagaattcaccaacaagaacatgctgatgacagtcatttatttgctgttt

SEQ ID NO: 124448 - DNA, 580 bp, Homo sapiens
  Payload ID: 4439
  Gene Symbol: CYP2S1
  Gene Name: cytochrome P450, family 2, subfamily S, polypeptide 1
  ENST ID: ENST00000597754
  CDS Start-End: 56-580
aactagcccagccgcgcggagcgcctgggagaggagaaggagccgacctgccgagatggaggcgaccggcacctgggcgctgctgctggcgctggcgctgctcctgctgctgacgctggcgctgtccgggaccagggcccgaggccacctgccccccgggcccacgccgctaccactgctgggaaacctcctgcagctacggcccggggcgctgtattcagggctcatgcgggaggaacaaaacccaggcacagaattcaccaacaagaacatgctgatgacagtcatttatttgctgtttgctgggacgatgacggtcagcaccacggtcggctataccctcctgctcctgatgaaataccctcatgtccaaaagtgggtacgtgaggagctgaatcgggagctgggggctggccaggcaccaagcctaggggaccgtacccgcctcccttacaccgacgcggttctgcatgaggcgcagcggctgctggcgctggtgcccatgggaataccccgcaccctcatgcggaccacccgcttccgagggtacaccctgccccagggcacggaggtcttcccc

SEQ ID NO: 124449 - DNA, 1479 bp, Homo sapiens
  Payload ID: 4439
  Gene Symbol: CYP2S1
  Gene Name: cytochrome P450, family 2, subfamily S, polypeptide 1
  ENST ID: ENST00000593545
  CDS Start-End: 27-524
agaggagaaggagccgacctgccgagatggaggcgaccggcacctgggcgctgctgctggcgctggcgctgctcctgctgctgacgctggcgctgtccgggaccagggcccgaggccacctgccccccgggcccacgccgctaccactgctgggaaacctcctgcagctacggcccggggcgctgtattcagggctcatgcggctgagtaagaagtacggaccggtgttcaccatctacctgggaccctggcggcctgtggtggtcctggttgggcaggaggctgtgcgggaggccctgggaggtcaggctgaggagttcagcggccggggaaccgtagcgatgctggaagggacttttgatggccatggaggaacaaaacccaggcacagaattcaccaacaagaacatgctgatgacagtcatttatttgctgtttgctgggacgatgacggtcagcaccacggtcggctataccctcctgctcctgatgaaataccctcatgtccaaaagtgggtacgtgaggagctgaatcgggagctgggggctggccaggcaccaagcctaggggaccgtacccgcctcccttacaccgacgcggttctgcatgaggcgcagcggctgctggcgctggtgcccatgggaataccccgcaccctcatgcggaccacccgcttccgagggtacaccctgccccagggcacggaggtcttccccctccttggctccatcctgcatgaccccaacatcttcaagcacccagaagagttcaacccagaccgtttcctggatgcagatggacggttcaggaagcatgaggcgttcctgcccttctccttagggaagcgtgtctgccttggagagggcctggcaaaagcggagctcttcctcttcttcaccaccatcctacaagccttctccctggagagcccgtgcccgccggacaccctgagcctcaagcccaccgtcagtggccttttcaacattcccccagccttccagctgcaagtccgtcccactgaccttcactccaccacgcagaccagatgaaggaaggcaacttggaagtggtgggtgcccaggacggtgcctccagcctcaacagtgggcatggacagggttaatgtctccagagtgtacactgcaggcagccacatttacacgcctgcagttgttttccggagtctgtcccacggcccacacgctcacttgactcatgctgctaagatgcacaaccgcacacccatacacaactacaagggccacaaagcaactgctgggttagctttccacagacataaatatagtccatctgcaatcacaagcacatagccaggtaacccaccaactcccctggatctgcagcccacacgtgggagtctggctgtcaccttcacaagccacagaaacggccacacatgttcacagctcacacgccctctccattcatcgaacttctcagtgtccctgtccctggtg

SEQ ID NO: 124450 - DNA, 4944 bp, Homo sapiens
  Payload ID: 4440
  Gene Symbol: CYP2U1
  Gene Name: cytochrome P450, family 2, subfamily U, polypeptide 1
  Uniprot ID: Q7Z449
  ENST ID: ENST00000332884
  CDS Start-End: 276-1910
accggacttcggggcaaacttcaggtcccccgcctgctagcccgccaaccccctccgccaggcagccggcgcgcctccaggttccgcccaggcgtcgctgagtggcggcggcggggagaatgcgcgcggcgcagccaatccgggggcgttcctacaccccctgcccgcccccgaccttccagagcagagcaggacactggcgccgcgggtcaggcagctgcgtgcgcgtctcctccaggcagcaaggggaacccgaggccgccggcgcccggaccatgtcgtctccggggccgtcgcagccgccggccgaggacccgccctggcccgcgcgcctcctgcgtgcgcctctggggctgctgcggctggaccccagcgggggcgcgctgctgctatgcggcctcgtagcgctgctgggctggagctggctgcggaggcgccgggcgcggggcatcccgcccgggcccacgccctggcctctggtgggcaacttcggtcacgtgctgctgcctcccttcctccggcggcggagctggctgagcagcaggaccagggccgcagggattgatccctcggtcataggcccgcaggtgctcctggctcacctagcccgcgtgtacggcagcatcttcagcttctttatcggccactacctggtggtggtcctcagcgacttccacagcgtgcgcgaggcgctggtgcagcaggccgaggtcttcagcgaccgcccgcgggtgccgctcatctccatcgtgaccaaggagaagggggttgtgtttgcacattatggtcccgtctggagacaacaaaggaagttctctcattcaactcttcgtcattttgggttgggaaaacttagcttggagcccaagattattgaggagttcaaatatgtgaaagcagaaatgcaaaagcacggagaagaccccttctgccctttctccatcatcagcaatgccgtctctaacatcatttgctccttgtgctttggccagcgctttgattacactaatagtgagttcaagaaaatgcttggttttatgtcacgaggcctagaaatctgtctgaacagtcaagtcctcctggtcaacatatgcccttggctttattaccttccctttggaccatttaaggaattaagacaaattgaaaaggatataaccagtttccttaaaaaaatcatcaaagaccatcaagagtctctggatagagagaaccctcaggacttcatagacatgtaccttctccacatggaagaggagaggaaaaataatagtaacagcagttttgatgaagagtacttattttatatcattggggatctctttattgctgggactgataccacaactaactctttgctctggtgcctgctgtatatgtcgctgaaccccgatgtacaagaaaaggttcatgaagaaattgaaagagtcattggcgccaaccgagctccttccctcacagacaaggcccagatgccctacacagaagccaccatcatggaagtgcagaggctaactgtggtggtgccgcttgccattcctcatatgacctcagagaacacagtgctccaagggtataccattcctaaaggcacattgatcttacccaacctgtggtcagtacatagagacccagccatttgggagaaaccggaggatttctaccctaatcgatttctggatgaccaaggacaactaattaaaaaagaaacctttattccttttgggatagggaagcgggtgtgtatgggagaacaactggcaaagatggaattattcctaatgtttgtgagcctaatgcagagtttcgcatttgctttacctgaggattctaagaagcccctcctgactggaagatttggtctaactttagccccacatccatttaatataactatttcaaggagatgaagagcatctccaagaagagatggtaaaaagatatataaatacatatccttctaagcagattcttcctactgcaaaggacagtgaatccagcaactcagtggatccaagctgggctcagaggtcggaaggagggtagagcacactgggaggtttcatcttggaggattcctcagcaggatacttcagccattttagtaatgcaggtctgtgatttgggggatagaaaacaaagtacctatgaaacgggatatctggattttacttgcagtggcttccaccgatgggccaatcttctcatttcttagtgcctcagacatcccatatgtaaaatgagagtaataaaacttggcttctctctacctctcagcactaatgatggtcaaatgccttacatcttttctgatatctctaaaatgctgttaagttctggagaagaacttcaggagaagaagatctatcagctggcttttaaagacctatgacaacatgaaagtggtgttcagcctggaatgctttgtcagagatgggtgtggatttaggttatactgggggagaacttttctcagcacagattctatgccagcttctttgggcttgttctgtcactatctttttgtttatgattttagtttttactttttgtagatgtgggatgaagtggactctgtcgtgtatattgaggaaaaaagaaattataattttaaaaaatcccttgtaggattattatctaaatttatatgtctaacttctactacaactacaggaacagtgagccttgctacttctttagtagcttcttggcagaattcctttctactgagttatttgcaaagatgcagctctacctttttacttaaggcctgaatggtgagcatggggattttgatactgggactcatcaggaaaggattctgctttcaaactatactgaacattcctgtcctagcgtccctgccaccaggcccaatgcatctgatccttgaatatactctcaaagaattcactctctttttattaagagaactaaattgtttctaaatgtagatggtccctctggaaaagcagttttcagcaggggtggtaaccccttcagagggagtttggaaatgtgtgggtatgattcttggttatcataatgatgggggtgctactggccttctgctgccatgggaccaggatgctaaatgtcaaggtagtcctatacagtgaagaattgtcctgctcaagatgccaggatttcccccagtgagaacatgctctaaggaatgaccacccctttcttttattctcccacagtgctccatgtacagaagtaagcatagcagtcatatgagcaaccacattcctgaacctttcctcatgctggctctacacttaatcctttacttgtatgtttctgtaattcttacataaattctattaagagggtggcatactgtagtggatgaagctgaggcttatagtaggtaaggcacaaagttaaaaagtaacatcactgggtttcaaacctactggtctctgtgactaaagaacactttcagaaccacttcttgattctgccaccacttgatcccataacaggctaccccttggcctcatgctggagttgtgtgtgtctgtcttcatcccaggctgagctccttgaggtgaggatgttgtgctgtttgcctccctcacagtgccttggtcttagtggatgcccagttgtcttgtgaatgacttttaagaagtgtacttaagagaaaaatcctaccttatttgaataattacaagtcatgtttttgttgcttaaaggtgataaatcagtgtatattatttgttaatgtccattaaagccagtttttaaaaaaatcactggacttttgtgtttaccatttaaaacaaccattttaaacaaacttagaacgatgccttagctgtttataggtaacagaatgtaaactcccaccacctggagactaggccatatccagggacctcacactgactttcctaaaggagagaagcagctacgctgttcatactgatagagaagagggcaagaaaagatccagagtggctgttactttgaaaattaaacgaaagatgaaattctgaacttaaaacacttctgtttggccttctataactgatcacccttctttgctctgttttccagataaatggagacaccagatctccctaacctctgacttctgccgttagccatactctgtgtagttagatctcagtctgggaatggcattccagggcaattgtgaacatgaggctagatttttcctttgatttagcacattcctaggcagacttttgcaagctcaaaaaatgaaaataatatctgcttaaccaaaacataatcataggaagaagaaaaattttaaaatgattgatttttgactctacattctttatctaccatactgctcttttcctttttagaaatattactaagcactttccgtatagataaatgaaatacaggctaatctttaggtgtcttaggaatttttgctttttgaaaaagaaaagctaatagcctaactgcagaggaactgagtggatggggtagctgctgtatagatttttagatgagatgatacagtgtggattacactgtaccttgggcgggagagtttgttcttgatatggaattcatatgcttttgaattgcactaataactcagcattaacaagtatattactccttaaattatacatgcattttcaatattcctaaccaaatagtttatagcttattgagaagaagtctgttcttggagagatgttgaaattagatgtttattaaactttaaaatataatgccttaagctgtggcactttaaaaacatctttatatataaattgctaaaaggactgttaatgcttttctcagacacattggcattttacaattttgcacatggtttatttgaaatcaaaaaataactatactttgttttataagtctacctaatatctcatttttgattctcatcgttagcacagttttgttgcttttattaaactattttaa

SEQ ID NO: 124451 - DNA, 3125 bp, Homo sapiens
  Payload ID: 4440
  Gene Symbol: CYP2U1
  Gene Name: cytochrome P450, family 2, subfamily U, polypeptide 1
  ENST ID: ENST00000508453
  CDS Start-End: 874-1881
gtctcctccaggcagcaaggggaacccgaggccgccggcgcccggaccatgtcgtctccggggccgtcgcagccgccggccgaggacccgccctggcccgcgcgcctcctgcgtgcgcctctggggctgctgcggctggaccccagcgggggcgcgctgctgctatgcggcctcgtagcgctgctgggctggagctggctgcggaggcgccgggcgcggggcatcccgcccgggcccacgccctggcctctggtgggcaacttcggtcacgtgctgctgcctcccttcctccggcggcggagctggctgagcagcaggaccagggccgcagggattgatccctcggtcataggcccgcaggtgctcctggctcacctagcccgcgtgtacggcagcatcttcagcttctttatcggccactacctggtggtggtcctcagcgacttccacagcgtgcgcgaggcgctggtgcagcaggccgaggtcttcagcgaccgcccgcgggtgccgctcatctccatcgtgaccaaggagaaggcatgaaggcccttgccagatgccagtgctatcctcttggacttcccagccttcagaactcacctgttccttggacaagaatacctgcttcttctgaggaattccttttttctgacctcagtcccttttacccttaactgtggttgaacggcagatgccatatctttacataaactcaccttcttggccacagtgataagggttgtgtttgcacattatggtcccgtctggagacaacaaaggaagttctctcattcaactcttcgtcattttgggttgggaaaacttagcttggagcccaagattattgaggagttcaaatatgtgaaagcagaaatgcaaaagcacggagaagaccccttctgccctttctccatcatcagcaatgccgtctctaacatcatttgctccttgtgctttggccagcgctttgattacactaatagtgagttcaagaaaatgcttggttttatgtcacgaggcctagaaatctgtctgaacagtcaagtcctcctggtcaacatatgcccttggctttattaccttccctttggaccatttaaggaattaagacaaattgaaaaggatataaccagtttccttaaaaaaatcatcaaagaccatcaagagtctctggatagagagaaccctcaggacttcatagacatgtaccttctccacatggaagaggagaggaaaaataatagtaacagcagttttgatgaagagtacttattttatatcattggggatctctttattgctgggactgataccacaactaactctttgctctggtgcctgctgtatatgtcgctgaaccccgatgtacaagaaaaggttcatgaagaaattgaaagagtcattggcgccaaccgagctccttccctcacagacaaggcccagatgccctacacagaagccaccatcatggaagtgcagaggctaactgtggtggtgccgcttgccattcctcatatgacctcagagaacacagtgctccaagggtataccattcctaaaggcacattgatcttacccaacctgtggtcagtacatagagacccagccatttgggagaaaccggaggatttctaccctaatcgatttctggatgaccaaggacaactaattaaaaaagaaacctttattccttttgggatagggaagcgggtgtgtatgggagaacaactggcaaagatggaattattcctaatgtttgtgagcctaatgcagagtttcgcatttgctttacctgaggattctaagaagcccctcctgactggaagatttggtctaactttagccccacatccatttaatataactatttcaaggagatgaagagcatctccaagaagagatggtaaaaagatatataaatacatatccttctaagcagattcttcctactgcaaaggacagtgaatccagcaactcagtggatccaagctgggctcagaggtcggaaggagggtagagcacactgggaggtttcatcttggaggattcctcagcaggatacttcagccattttagtaatgcaggtctgtgatttgggggatagaaaacaaagtacctatgaaacgggatatctggattttacttgcagtggcttccaccgatgggccaatcttctcatttcttagtgcctcagacatcccatatgtaaaatgagagtaataaaacttggcttctctctacctctcagcactaatgatggtcaaatgccttacatcttttctgatatctctaaaatgctgttaagttctggagaagaacttcaggagaagaagatctatcagctggcttttaaagacctatgacaacatgaaagtggtgttcagcctggaatgctttgtcagagatgggtgtggatttaggttatactgggggagaacttttctcagcacagattctatgccagcttctttgggcttgttctgtcactatctttttgtttatgattttagtttttactttttgtagatgtgggatgaagtggactctgtcgtgtatattgaggaaaaaagaaattataattttaaaaaatcccttgtaggattattatctaaatttatatgtctaacttctactacaactacaggaacagtgagccttgctacttctttagtagcttcttggcagaattcctttctactgagttatttgcaaagatgcagctctacctttttacttaaggcctgaatggtgagcatggggattttgatactgggactcatcaggaaaggattctgctttcaaactatactgaacattcctgtcctagcgtccctgccaccaggcccaatgcatctgatccttgaatatactctcaaagaattcactctctttttattaagagaactaaattgtttctaaatgtagatggtccctctggaaaagcagttttcagcaggggtggtaaccccttcagagggagtttggaaatgtgtgggtatgattcttggttatcataatgatgggggtgctactggccttctgctgccatgggaccaggatgctaaatgtcaaggtagtcctatacagtgaagaattgtcctgctcaagatgccaggatttccccc

SEQ ID NO: 124452 - DNA, 2304 bp, Homo sapiens
  Payload ID: 4441
  Gene Symbol: CYP2W1
  Gene Name: cytochrome P450, family 2, subfamily W, polypeptide 1
  Uniprot ID: Q8TAV3
  ENST ID: ENST00000308919
  CDS Start-End: 14-1486
cagccacgtcctcatggccctgctgctcttgctgttcctgggcctcctggggctctgggggctgctctgcgcctgcgcccaagacccctccccagctgcccggtggcccccggggcctcgcccgctgccgctcgtcgggaacctgcacttgctgcgtctgtcgcaacaggaccggtccctgatggagctctcagaacgctacgggccggtgttcaccgtgcacctggggcgccagaagacggtggtgctgacggggttcgaggcggtcaaagaggcgctggcgggccccgggcaggagctggccgaccggcctcccatcgccatcttccagctcatccagcgaggtggaggcatcttcttctcatctggggcgcgctggagggctgcccgccagttcacggtgcgtgccctgcacagcctgggcgtgggccgggagccggtggctgacaagattctgcaggagctgaaatgcctctctgggcagctggatggctacagaggccggcccttcccgctggccctactgggctgggctccctccaatatcaccttcgcgctcctcttcggccgccgatttgactaccgggaccccgtgtttgtgtccctgctgggtctcatcgatgaggtcatggtcctcttggggtcccctggcctgcagctgttcaacgtctacccatggctcggggccctgctccagctgcaccggcccgtcctgcgcaagatcgaggaggtccgtgccattctgaggaccctcctggaggcgcggaggccccacgtgtgcccgggggaccccgtgtgcagctatgtggacgccctgatccagcagggacagggggatgaccccgagggcctgtttgctgaggccaacgcggtggcctgcaccctggacatggtcatggccgggacggagacgacctcggccacgctgcagtgggccgcacttctgatgggccggcacccggacgtgcagggccgggtgcaggaggagctagaccgcgtgctgggccctgggcggactccccggctggaggaccagcaggctctgccctacacaagcgccgtgctccacgaggtgcagcggttcatcacgctcctgccgcacgtgccccgctgcaccgcggccgacacacagctgggcggcttcctgctccccaagggcacgcccgtgattcccctgctgacctcggtgctcctggatgagacacagtggcagaccccaggccagttcaaccccggccatttcctggacgcgaatgggcactttgtgaagcgggaggccttcctgcctttctctgcaggccgccgcgtctgtgttggggagcgcctggccaggaccgagctcttcctgctgtttgccggcctcctgcagaggtaccgcctgctgcccccgcctggcgtcagtccggcctccctggacaccacgcccgcccgggcttttaccatgaggccgagggcccaggccctgtgtgcggtgcccaggccctaggagctcccccagcccccaggtcctcctgaccactcccctcccagccctgggtcctcccaccctctctcctcccaccccacagctcggactgctctgggagggccctgaggactcccaccctcacccccacccccacagggtcagcaactgcttccggttacacccaggactacccctgcccgaccctgtgggacccccacccctctgatgctgtctgcagctcagtccctgccagcccccaggagcgcctccagggccccgcccactctcccacccctgaagctgcactcccacccacctagctccccccagggccccccagcacctacagctggggctgcagggagacaacgggtggctgcatccagccagagacaggcgcaggtgggtgtcctcagcgtgcgagccctgcaccccccaggtcctgggactcctgcagaccccactccattcccgctcctggaacacttcctgcagctgtgcctggaggcagtcggcctgcagtgccagactctgagccaagccactggggccatgcgtatgactggtgcagggaggcaaggcccacattctccttcagagacaggcactggcgccagaggcttccttggggcggggggagggcacctcagcccctgaagacaagcagcactgcagtggcaaaaatggaaacactgacccggtgcggtggctcatgcctgtaatcccagcactttgggaggccgaggcaggcgaatcacgaggtcaggagttcgagaccagcctgcccaacatggtgaaaccctgtctctactaaaaatacaaaaaaattaaccgag

SEQ ID NO: 124453 - DNA, 2361 bp, Homo sapiens
  Payload ID: 4441
  Gene Symbol: CYP2W1
  Gene Name: cytochrome P450, family 2, subfamily W, polypeptide 1
  ENST ID: ENST00000340150
  CDS Start-End: 23-1249
gtcgcaacaggaccggtccctgatggagctctcagaacgctacgggccggtgttcaccgtgcacctggggcgccagaagacggtggtgctgacggggttcgaggcggtcaaagaggcgctggcgggccccgggcaggagctggccgaccggcctcccatcgccatcttccagctcatccagcgaggtggaggcatcttcttctcatctggggcgcgctggagggctgcccgccagttcacggtgcgtgccctgcacagcctgggcgtgggccgggagccggtggctgacaagattctgcaggagctgaaatgcctctctgggcagctggatggctacagaggccggcccttcccgctggccctactgggctgggctccctccaatatcaccttcgcgctcctcttcggccgccgatttgactaccgggaccccgtgtttgtgtccctgctgggtctcatcgatgaggtcatggtcctcttggggtcccctggcctgcagctgttcaacgtctacccatggctcggggccctgctccagctgcaccggcccgtcctgcgcaagatcgaggaggtccgtgccattctgaggaccctcctggaggcgcggaggccccacgtgtgcccgggggaccccgtgtgcagctatgtggacgccctgatccagcagggacagggggatgaccccgagggcctgtttgctgaggccaacgcggtggcctgcaccctggacatggtcatggccgggacggagacgacctcggccacgctgcagtgggccgcacttctgatgggccggcacccggacgtgcagggccgggtgcaggaggagctagaccgcgtgctgggccctgggcggactccccggctggaggaccagcaggctctgccctacacaagcgccgtgctccacgaggtgcagcggttcatcacgctcctgccgcacgtgccccgctgcaccgcggccgacacacagctgggcggcttcctgctccccaagggcacgcccgtgattcccctgctgacctcggtgctcctggatgagacacagtggcagaccccaggccagttcaaccccggccatttcctggacgcgaatgggcactttgtgaagcgggaggccttcctgcctttctctgcaggtcagcagccctcggggccggggtggggcggcacctccagggctccaggggtgggacggccccagctccgcctgccgcctctgcacccacctcctgatctcaggttctgaaggcggctgtggtggctgctcctgtgctcccctggggaggtccccacccctcccctccaggagcaggcctggtgcagcccactctgtgcctggacatcccccgcaggccgccgcgtctgtgttggggagcgcctggccaggaccgagctcttcctgctgtttgccggcctcctgcagaggtaccgcctgctgcccccgcctggcgtcagtccggcctccctggacaccacgcccgcccgggcttttaccatgaggccgagggcccaggccctgtgtgcggtgcccaggccctaggagctcccccagcccccaggtcctcctgaccactcccctcccagccctgggtcctcccaccctctctcctcccaccccacagctcggactgctctgggagggccctgaggactcccaccctcacccccacccccacagggtcagcaactgcttccggttacacccaggactacccctgcccgaccctgtgggacccccacccctctgatgctgtctgcagctcagtccctgccagcccccaggagcgcctccagggccccgcccactctcccacccctgaagctgcactcccacccacctagctccccccagggccccccagcacctacagctggggctgcagggagacaacgggtggctgcatccagccagagacaggcgcaggtgggtgtcctcagcgtgcgagccctgcaccccccaggtcctgggactcctgcagaccccactccattcccgctcctggaacacttcctgcagctgtgcctggaggcagtcggcctgcagtgccagactctgagccaagccactggggccatgcgtatgactggtgcagggaggcaaggcccacattctccttcagagacaggcactggcgccagaggcttccttggggcggggggagggcacctcagcccctgaagacaagcagcactgcagtggcaaaaatggaaacactgacccggtgcggtggctcatgcctgtaatcccagcactttgggaggccgaggcaggcgaatcacgaggtcaggagttcgagaccagcctgcccaacatggtgaaaccctgtctctactaaaaatacaaaaaaattaaccgag

SEQ ID NO: 124454 - DNA, 890 bp, Homo sapiens
  Payload ID: 4441
  Gene Symbol: CYP2W1
  Gene Name: cytochrome P450, family 2, subfamily W, polypeptide 1
  ENST ID: ENST00000415893
  CDS Start-End: 1-867
ctccagctgcaccggcccgtcctgcgcaagatcgaggaggtccgtgccattctgaggaccctcctggaggcgcggaggccccacgtgtgcccgggggaccccgtgtgcagctatgtggacgccctgatccagcagggacagggggatgaccccgagggcctgtttgctgaggccaacgcggtggcctgcaccctggacatggtcatggccgggacggagacgacctcggccacgctgcagtgggccgcacttctgatgggccggcacccggacgtgcagggccgggtgcaggaggagctagaccgcgtgctgggccctgggcggactccccggctggaggaccagcaggctctgccctacacaagcgccgtgctccacgaggtgcagcggttcatcacgctcctgccgcacgtgccccgctgcaccgcggccgacacacagctgggcggcttcctgctccccaagggcacgcccgtgattcccctgctgacctcggtgctcctggatgagacacagtggcagaccccaggccagttcaaccccggccatttcctggacgcgaatgggcactttgtgaagcgggaggccttcctgcctttctctgcaggttctgaaggcggctgtggtggctgctcctgtgctcccctggggaggtccccacccctcccctccaggagcaggcctggtgcagcccactctgtgcctggacatcccccgcaggccgccgcgtctgtgttggggagcgcctggccaggaccgagctcttcctgctgtttgccggcctcctgcagaggtaccgcctgctgcccccgcctggcgtcagtccggcctccctggacaccacgcccgcccgggcttttaccatgaggccgagggcccaggccctgtgt

SEQ ID NO: 124455 - DNA, 1949 bp, Homo sapiens
  Payload ID: 4442
  Gene Symbol: CYP20A1
  Gene Name: cytochrome P450, family 20, subfamily A, polypeptide 1
  Uniprot ID: Q6UW02
  ENST ID: ENST00000356079
  CDS Start-End: 124-1512
gcccgttggtttccgggtcccgcggggtgcccccgcccacacgctatgccttaaattgggccaggctgaggcgctgctgctggagcggccgatccgagacgtggctccctgggcggcagaaccatgttggacttcgcgatcttcgccgttaccttcttgctggcgttggtgggagccgtgctctacctctatccggcttccagacaagctgcaggaattccagggattactccaactgaagaaaaagatggtaatcttccagatattgtgaatagtggaagtttgcatgagttcctggttaatttgcatgagagatatgggcctgtggtctccttctggtttggcaggcgcctcgtggttagtttgggcactgttgatgtactgaagcagcatatcaatcccaataagacatcggacccttttgaaaccatgctgaagtcattattaaggtatcaatctggtggtggcagtgtgagtgaaaaccacatgaggaaaaaattgtatgaaaatggtgtgactgattctctgaagagtaactttgccctcctcctaaagctttcagaagaattattagataaatggctctcctacccagagacccagcacgtgcccctcagccagcatatgcttggttttgctatgaagtctgttacacagatggtaatgggtagtacatttgaagatgatcaggaagtcattcgcttccagaagaatcatggcacagtttggtctgagattggaaaaggctttctagatgggtcacttgataaaaacatgactcggaaaaaacaatatgaagatgccctcatgcaactggagtctgttttaaggaacatcataaaagaacgaaaaggaaggaacttcagtcaacatattttcattgactccttagtacaagggaaccttaatgaccaacagatcctagaagacagtatgatattttctctggccagttgcataataactgcaaaattgtgtacctgggcaatctgttttttaaccacctctgaagaagttcaaaaaaaattatatgaagagataaaccaagtttttggaaatggtcctgttactccagagaaaattgagcagctcagatattgtcagcatgtgctttgtgaaactgttcgaactgccaaactgactccagtttctgcccagcttcaagatattgaaggaaaaattgaccgatttattattcctagagagaccctcgtcctttatgcccttggtgtggtacttcaggatcctaatacttggccatctccacacaagtttgatccagatcggtttgatgatgaattagtaatgaaaactttttcctcacttggattctcaggcacacaggagtgtccagagttgaggtttgcatatatggtgaccacagtacttcttagtgtattggtgaagagactgcacctactttctgtggagggacaggttattgaaacaaagtatgaactggtaacatcatcaagggaagaagcttggatcactgtctcaaagagatattaaaattttatacatttaaaatcattgttaaattgattgaggaaaacaaccatttaaaaaaaatctatgttgaatccttttataaaccagtatcactttgtaatataaacacctatttgtacttaattttgtaaatttggatttttatatatcatattttcttaattcattgtacacatttgacttactgcacagtatattgatcattttaatgggaaactttagctttctactttttatttttgttttttcactttctatgccattatttttgtattctttttcttagtgtgagctctaaaatcaatgttcttgaaaaagaaattattttgcagaagttggggaatcatgtttgttgaatatgtataaaatagaaacataggctgggcgcggtggctcacacctgtaatccctacactttgggaggctgaggcaggtgg

SEQ ID NO: 124456 - DNA, 2636 bp, Homo sapiens
  Payload ID: 4442
  Gene Symbol: CYP20A1
  Gene Name: cytochrome P450, family 20, subfamily A, polypeptide 1
  ENST ID: ENST00000431118
  CDS Start-End: 37-171
gccgatccgagacgtggctccctgggcggcagaaccatgttggacttcgcgatcttcgccgttaccttcttgctggcgttggtgggagccgtgctctacctctatccggcttccagacaagctgcaggaattccagggattactccaactgaagaaaacggacccttttgaaaccatgctgaagtcattattaaggtatcaatctggtggtggcagtgtgagtgaaaaccacatgaggaaaaaattgtatgaaaatggtgtgactgattctctgaagagtaactttgccctcctcctaaagctttcagaagaattattagataaatggctctcctacccagagacccagcacgtgcccctcagccagcatatgcttggttttgctatgaagtctgttacacagatggtaatgggtagtacatttgaagatgatcaggaagtcattcgcttccagaagaatcatggcacagtttggtctgagattggaaaaggctttctagatgggtcacttgataaaaacatgactcggaaaaaacaatatgaagatgccctcatgcaactggagtctgttttaaggaacatcataaaagaacgaaaaggaaggaacttcagtcaacatattttcattgactccttagtacaagggaaccttaatgaccaacagatcctagaagacagtatgatattttctctggccagttgcataataactgcaaaattgtgtacctgggcaatctgttttttaaccacctctgaagaagttcaaaaaaaattatatgaagagataaaccaagtttttggaaatggtcctgttactccagagaaaattgagcagctcagatattgtcagcatgtgctttgtgaaactgttcgaactgccaaactgactccagtttctgcccagcttcaagatattgaaggaaaaattgaccgatttattattcctagagagaccctcgtcctttatgcccttggtgtggtacttcaggatcctaatacttggccatctccacacaagtttgatccagatcggtttgatgatgaattagtaatgaaaactttttcctcacttggattctcaggcacacaggagtgtccagagttgaggtttgcatatatggtgaccacagtacttcttagtgtattggtgaagagactgcacctactttctgtggagggacaggttattgaaacaaagtatgaactggtaacatcatcaagggaagaagcttggatcactgtctcaaagagatattaaaattttatacatttaaaatcattgttaaattgattgaggaaaacaaccatttaaaaaaaatctatgttgaatccttttataaaccagtatcactttgtaatataaacacctatttgtacttaattttgtaaatttggatttttatatatcatattttcttaattcattgtacacatttgacttactgcacagtatattgatcattttaatgggaaactttagctttctactttttatttttgttttttcactttctatgccattatttttgtattctttttcttagtgtgagctctaaaatcaatgttcttgaaaaagaaattattttgcagaagttggggaatcatgtttgttgaatatgtataaaatagaaacataggctgggcgcggtggctcacacctgtaatccctacactttgggaggctgaggcaggtggatcacctgaggtccagagtttgagaccagtctggccaacatgatgaaaccccatctctactaaaaatacaaaacattggccgggagtggtggctcatgcctgtaatcccagcactttgggatgctgaggcgggtggatcacctgaggtcaggagtttgcgaccagcctggccaacatgatgaaaccctgtctctactaaaaatacaaaaaaattggctgggtgtggtggcccacacctgtaatcccagcactttgggaggtcgaggcgggtggatcacctgaggtccgaagttcgaggccagcctggccaacaggatgaaaccctgtctctattaaaaatacagaaaattggccgggtgcggtggctcacccctgtaatcccagtactttgggaggctgaggcgggtggagcacctgaggtcaggaattcgagatcagcctggccaacatggtgaaaccccatctctactgaaaaacacacacaaaaaaattagctgggcatggtggcacatgcctgtaatcccagctactcaggaggctgaggcaggagaatcatttgaacctgggaggcggagcttgcagtgagccgagattgcacccctgcactccagcctgggccacagagcaagactctgtctcaagaaaaacaaaaaaaaagataaatggacaaaagacatgaacaaacagcttttataggatagtatggctaacaaacttttagaaaagtgtttagtctcactagtaagtaacaaaatattggggcagggcacagtggctcatgcgtataatcctagaactttggaaggccaaagctggtggattgcttgagcccaggagtttgagaccagcccaggcaacattgggagaccctgcctctacaaatatacaaaaaaattactgggcatggtgacacacacctgtagtcccagctgttctgaagg

SEQ ID NO: 124457 - DNA, 648 bp, Homo sapiens
  Payload ID: 4442
  Gene Symbol: CYP20A1
  Gene Name: cytochrome P450, family 20, subfamily A, polypeptide 1
  ENST ID: ENST00000428265
  CDS Start-End: 43-177
ggagcggccgatccgagacgtggctccctgggcggcagaaccatgttggacttcgcgatcttcgccgttaccttcttgctggcgttggtgggagccgtgctctacctctatccggcttccagacaagctgcaggaattccagggattactccaactgaagaaaacggacccttttgaaaccatgctgaagtcattattaaggtatcaatctggtggtggcagtgtgagtgaaaaccacatgaggaaaaaattgtatgaaaatggtgtgactgattctctgaagagtaactttgccctcctcctaaagctttcagaagaattattagataaatggctctcctacccagagacccagcacgtgcccctcagccagcatatgcttggttttgctatgaagtctgttacacagatggtaatgggtagtacatttgaagatgatcaggaagtcattcgcttccagaagaatcatggcacaccctcatgcaactggagtctgttttaaggaacatcataaaagaacgaaaaggaaggaacttcagtcaacatattttcattgactccttagtacaagggaaccttaatgaccaacagatcctagaagacagtatgatattttctctggccagttgcataataactgcaaaatgt

SEQ ID NO: 124458 - DNA, 1812 bp, Homo sapiens
  Payload ID: 4442
  Gene Symbol: CYP20A1
  Gene Name: cytochrome P450, family 20, subfamily A, polypeptide 1
  ENST ID: ENST00000429815
  CDS Start-End: 82-1494
gctatgccttaaattgggccaggctgaggcgctgctgctggagcggccgatccgagacgtggctccctgggcggcagaaccatgttggacttcgcgatcttcgccgttaccttcttgctggcgttggtgggagccgtgctctacctctatccggcttccagacaagctgcaggaattccagggattactccaactgaagaaaaagatggtaatcttccagatattgtgaatagtggaagtttgcatgagttcctggttaatttgcatgagagatatgggcctgtggtctccttctggtttggcaggcgcctcgtggttagtttgggcactgttgatgtactgaagcagcatatcaatcccaataagacatcggacccttttgaaaccatgctgaagtcattattaaggtatcaatctggtggtggcagtgtgagtgaaaaccacatgaggaaaaaattgtatgaaaatggtgtgactgattctctgaagagtaactttgccctcctcctaaagctttcagaagaattattagataaatggctctcctacccagagacccagcacgtgcccctcagccagcatatgcttggttttgctatgaagtctgttacacagatggtaatgggtagtacatttgaagatgatcaggaagtcattcgcttccagaagaatcatggcacattatgtatatttacctattttcaggtttggtctgagattggaaaaggctttctagatgggtcacttgataaaaacatgactcggaaaaaacaatatgaagatgccctcatgcaactggagtctgttttaaggaacatcataaaagaacgaaaaggaaggaacttcagtcaacatattttcattgactccttagtacaagggaaccttaatgaccaacagatcctagaagacagtatgatattttctctggccagttgcataataactgcaaaattgtgtacctgggcaatctgttttttaaccacctctgaagaagttcaaaaaaaattatatgaagagataaaccaagtttttggaaatggtcctgttactccagagaaaattgagcagctcagatattgtcagcatgtgctttgtgaaactgttcgaactgccaaactgactccagtttctgcccagcttcaagatattgaaggaaaaattgaccgatttattattcctagagagaccctcgtcctttatgcccttggtgtggtacttcaggatcctaatacttggccatctccacacaagtttgatccagatcggtttgatgatgaattagtaatgaaaactttttcctcacttggattctcaggcacacaggagtgtccagagttgaggtttgcatatatggtgaccacagtacttcttagtgtattggtgaagagactgcacctactttctgtggagggacaggttattgaaacaaagtatgaactggtaacatcatcaagggaagaagcttggatcactgtctcaaagagatattaaaattttatacatttaaaatcattgttaaattgattgaggaaaacaaccatttaaaaaaaatctatgttgaatccttttataaaccagtatcactttgtaatataaacacctatttgtacttaattttgtaaatttggatttttatatatcatattttcttaattcattgtacacatttgacttactgcacagtatattgatcattttaatgggaaactttagctttctactttttatttttgttttttcactttctatgccattatttttgtattctttttcttagtgtgagctctaaaatcaatgttcttgaaaaag

SEQ ID NO: 124459 - DNA, 804 bp, Homo sapiens
  Payload ID: 4442
  Gene Symbol: CYP20A1
  Gene Name: cytochrome P450, family 20, subfamily A, polypeptide 1
  ENST ID: ENST00000443941
  CDS Start-End: 29-804
gagacgtggctccctgggcggcagaaccatgttggacttcgcgatcttcgccgttaccttcttgctggcgttggtgggagccgtgctctacctctatccggcttccagacaagctgcaggaattccagggattactccaactgaagaaaaagatggtaatcttccagatattgtgaatagtggaagtttgcatgagttcctggttaatttgcatgagagatatgggcctgtggtctccttctggtttggcaggcgcctcgtggttagtttgggcactgttgatgtactgaagcagcatatcaatcccaataagacatcggacccttttgaaaccatgctgaagtcattattaaggtatcaatctggtggtggcagtgtgagtgaaaaccacatgaggaaaaaattgtatgaaaatggtgtgactgattctctgaagagtaactttgccctcctcctaaagctttcagaagaattattagataaatggctctcctacccagagacccagcacgtgcccctcagccagcatatgcttggttttgctatgaagtctgttacacagatggtaatgggtagtacatttgaagatgatcaggaagtcattcgcttccagaagaatcatggcacaatcctagaagacagtatgatattttctctggccagttgcataataactgcaaaattgtgtacctgggcaatctgttttttaaccacctctgaagaagttcaaaaaaaattatatgaagagataaaccaagtttttggaaatggtcctgttactccagagaaaattgagcagctcag

SEQ ID NO: 124460 - DNA, 1730 bp, Homo sapiens
  Payload ID: 4442
  Gene Symbol: CYP20A1
  Gene Name: cytochrome P450, family 20, subfamily A, polypeptide 1
  ENST ID: ENST00000449301
  CDS Start-End: 87-713
cacacgctatgccttaaattgggccaggctgaggcgctgctgctggagcggccgatccgagacgtggctccctgggcggcagaaccatgttggacttcgcgatcttcgccgttaccttcttgctggcgttggtgggagccgtgctctacctctatccggcttccagacaagctgcaggaattccagggattactccaactgaagaaaaagatggtaatcttccagatattgtgaatagtggaagtttgcatgagttcctggttaatttgcatgagagatatgggcctgtggtctccttctggtttggcaggcgcctcgtggttagtttgggcactgttgatgtactgaagcagcatatcaatcccaataagacatcggacccttttgaaaccatgctgaagtcattattaaggtatcaatctggtggtggcagtgtgagtgaaaaccacatgaggaaaaaattgtatgaaaatggtgtgactgattctctgaagagtaactttgccctcctcctaaagctttcagaagaattattagataaatggctctcctacccagagacccagcacgtgcccctcagccagcatatgcttggttttgctatgaagtctgttacacagatggtaatgggtagtacatttgaagatgatcaggaagtcattcgcttccagaagaatcatggcacaccctcatgcaactggagtctgttttaaggaacatcataaaagaacgaaaaggaaggaacttcagtcaacatattttcattgactccttagtacaagggaaccttaatgaccaacagatcctagaagacagtatgatattttctctggccagttgcataataactgcaaaattgtgtacctgggcaatctgttttttaaccacctctgaagaagttcaaaaaaaattatatgaagagataaaccaagtttttggaaatggtcctgttactccagagaaaattgagcagctcagatattgtcagcatgtgctttgtgaaactgttcgaactgccaaactgactccagtttctgcccagcttcaagatattgaaggaaaaattgaccgatttattattcctagagagaccctcgtcctttatgcccttggtgtggtacttcaggatcctaatacttggccatctccacacaagtttgatccagatcggtttgatgatgaattagtaatgaaaactttttcctcacttggattctcaggcacacaggagtgtccagagttgaggtttgcatatatggtgaccacagtacttcttagtgtattggtgaagagactgcacctactttctgtggagggacaggttattgaaacaaagtatgaactggtaacatcatcaagggaagaagcttggatcactgtctcaaagagatattaaaattttatacatttaaaatcattgttaaattgattgaggaaaacaaccatttaaaaaaaatctatgttgaatccttttataaaccagtatcactttgtaatataaacacctatttgtacttaattttgtaaatttggatttttatatatcatattttcttaattcattgtacacatttgacttactgcacagtatattgatcattttaatgggaaactttagctttctactttttatttttgttttttcactttctatgccattatttttgtattctttttcttagtgtgagctctaaaatcaatgttcttgaaaaagaaattattttgcagaa

SEQ ID NO: 124461 - DNA, 10854 bp, Homo sapiens
  Payload ID: 4442
  Gene Symbol: CYP20A1
  Gene Name: cytochrome P450, family 20, subfamily A, polypeptide 1
  Uniprot ID: Q6UW02
  ENST ID: ENST00000611416
  CDS Start-End: 615-1922
gtagagactggggtctcactatgttgcccacgctggtctcaaactcctgggctcaagcgatcctcccgcttcagcctcccaaggtgctgggattacaggtggagccaccgcgcccggcatcgataatctgaatctctaacgagctcccgggcgacgttgatgcagctggtaccgggaccactcttcgaaaatcatcggtttagaggttttaattctgaatccattgcgaaaactgttgggcggacagagcactactaactcctaacttttctcagaaagctgggctctgctttcgccagcaacccggtccgaagtcgcgggcatattctgtctgaaatcgtgtgcaccgaaatccccgccttgcggtggaggctggcgctaggcggcctcagcctcggcctgctgcgctcaggaacccgcgccccggctcctcggcgatccattgctctttcctctggcgccggccgcaggcctcggtcacgcccccagcggcccgttggtttccgggtcccgcggggtgcccccgcccacacgctatgccttaaattgggccaggctgaggcgctgctgctggagcggccgatccgagacgtggctccctgggcggcagaaccatgttggacttcgcgatcttcgccgttaccttcttgctggcgttggtgggagccgtgctctacctctatccggcttccagacaagctgcaggaattccagggattactccaactgaagaaaaagatggtaatcttccagatattgtgaatagtggaagtttgcatgagttcctggttaatttgcatgagagatatgggcctgtggtctccttctggtttggcaggcgcctcgtggttagtttgggcactgttgatgtactgaagcagcatatcaatcccaataagacatcggacccttttgaaaccatgctgaagtcattattaaggtatcaatctggtggtggcagtgtgagtgaaaaccacatgaggaaaaaattgtatgaaaatggtgtgactgattctctgaagagtaactttgccctcctcctaaagctttcagaagaattattagataaatggctctcctacccagagacccagcacgtgcccctcagccagcatatgcttggttttgctatgaagtctgttacacagatggtaatgggtagtacatttgaagatgatcaggaagtcattcgcttccagaagaatcatggcacaccctcatgcaactggagtctgtttaaggaacatcataaaagaacgaaaaggaaggaacttcagtcaacatatttcattgactccttagtacaagggaaccttaatgaccaacagatcctagaagacagtatgatattttctctggccagttgcataataactgcaaaattgtgtacctgggcaatctgttttttaaccacctctgaagaagttcaaaaaaaattatatgaagagataaaccaagtttttggaaatggtcctgttactccagagaaaattgagcagctcagatattgtcagcatgtgctttgtgaaactgttcgaactgccaaactgactccagtttctgcccagcttcaagatattgaaggaaaaattgaccgatttattattcctagagagaccctcgtcctttatgcccttggtgtggtacttcaggatcctaatacttggccatctccacacaagtttgatccagatcggtttgatgatgaattagtaatgaaaactttttcctcacttggattctcaggcacacaggagtgtccagagttgaggtttgcatatatggtgaccacagtacttcttagtgtattggtgaagagactgcacctactttctgtggagggacaggttattgaaacaaagtatgaactggtaacatcatcaagggaagaagcttggatcactgtctcaaagagatattaaaattttatacatttaaaatcattgttaaattgattgaggaaaacaaccatttaaaaaaaatctatgttgaatccttttataaaccagtatcactttgtaatataaacacctatttgtacttaattttgtaaatttggatttttatatatcatattttcttaattcattgtacacatttgacttactgcacagtatattgatcattttaatgggaaactttagctttctactttttatttttgttttttcactttctatgccattatttttgtattctttttcttagtgtgagctctaaaatcaatgttcttgaaaaagaaattattttgcagaagttggggaatcatgtttgttgaatatgtataaaatagaaacataggctgggcgcggtggctcacacctgtaatccctacactttgggaggctgaggcaggtggatcacctgaggtccagagtttgagaccagtctggccaacatgatgaaaccccatctctactaaaaatacaaaacattggccgggagtggtggctcatgcctgtaatcccagcactttgggatgctgaggcgggtggatcacctgaggtcaggagtttgcgaccagcctggccaacatgatgaaaccctgtctctactaaaaatacaaaaaaattggctgggtgtggtggcccacacctgtaatcccagcactttgggaggtcgaggcgggtggatcacctgaggtccgaagttcgaggccagcctggccaacaggatgaaaccctgtctctattaaaaatacagaaaattggccgggtgcggtggctcacccctgtaatcccagtactttgggaggctgaggcgggtggagcacctgaggtcaggaattcgagatcagcctggccaacatggtgaaaccccatctctactgaaaaacacacacaaaaaaattagctgggcatggtggcacatgcctgtaatcccagctactcaggaggctgaggcaggagaatcatttgaacctgggaggcggagcttgcagtgagccgagattgcacccctgcactccagcctgggccacagagcaagactctgtctcaagaaaaacaaaaaaaaagataaatggacaaaagacatgaacaaacagcttttataggatagtatggctaacaaacttttagaaaagtgtttagtctcactagtaagtaacaaaatattggggcagggcacagtggctcatgcgtataatcctagaactttggaaggccaaagctggtggattgcttgagcccaggagtttgagaccagcccaggcaacattgggagaccctgcctctacaaatatacaaaaaaattactgggcatggtgacacacacctgtagtcccagctgttctgaaggctgaggtgggaggatcacttgagaccaggagaggtcaaggctgcagtgatctgtgatcacaccactgcactccagcctgggcaacagagcaaaaccctgcctttaaaaaaacaaaaaacaaaaaaggccgggctcggtggctcatgcctataatactttgggaggccgaggcaggtggatcaattgaggtcaggtgttcgagaccagccaggccaacttggtgaaaccccgtctctactaaaaatacaaaaaaaaaaaaaaaaaattagccagatgtggtggtgcacatttgtaatcccagctactcaggaggctgaggcaggataatcgcttgaacctgggaggcagaggttgcagtgagccaagatcgcaccactgcactccagcctgggtgtcgagtgaaactcattctcaaaaaaaaaaaaaaaaggaggtggggagagctatttcaagaatattttaagtaggctgggcacggtagctcatgcctgttatcctaacactttgggaagccgacatgggcagatcacgaggtcaagagatttgagaccatcctggccaacatggtgaaaccccatctctactaaaaatacaaaaaattatctggacatgctggcgtgcgcctgtagtctcagctacttgggaggctgaggcaggagaatcgcttgaacctgggaggcggaggttgcagtgagctgatgttgtgctagtgcactccagcctgggcgacagggctgagaccttgtctcaaaaaaaaaaggagtatcttaagtgtctttcaaaattacactttagcacttataaattttatatataatactttactgatagcattgtatattagtccaacttttttggctacactatttgtgaaggattcctttttttctttaagacagccactgtaggaaatatgccaagtacagatagtgaggaaagaaaggaagaaaaatgataattgtctgcaagtgggcttatttttaacactgctgaatttcatttgtaattttactttcaagaatatactctggtagactgaggcgggaggatcacttgagcccaggagttggaggcttcagtgagctgtgatcacaccactgccctcagccaaacctgagtgataaagtgagaccctatctcttaaaaaaaaaaatccctttgttgttgagttattttatgtcatttattggtaaatacctaacattttagacctagtcattaccagttaacatagaatttaattggatgcagtctgtatttttgaaaaaaaaaattttttttggaataacttaaattctaaaactttggccgggcgtgatggctcatgcctgtaatcccagcactttgggaggccgaggcaggcagatcacctgaggtcaggcgttcaagaccagcctgaccaacatggagaaaccccgtctctactaaaaatacaaaattagccaggcttggtggtgcatgcctgtaataccagctactcgggaggctgaagcaggagaactgcttgaacctgggaggcagaggttgcggtgagccaagatcgcgccattgcactccagcctgggcaacaagagtgaaactccgtctcaaaaaaaaaagaaaaattctaaaactttaagtgaaatttattatcccttcccacttattttctgtggttttgtgtgtatagagcatcttcctttgttacccaagtacctcgaatgggttggaaactggcggtagaaggttagagtagccaattgatatgtaaaccaagtgtcagatcagatgagatgaaagaggtggagtttaaagcaagtgagatatgataaacaatgatgaaagcaaaaatagggcagttgaaccagagtcagccagttggcataactgccaataaatgaggcagtgtagaataactaataatgattggaatcaaggaaaagagagcatagaggaatcagctaaattagtatgttttatccatagttacatgactaacaaatgattaaaaagaagttattctctagataattttttaaataaaagtactgttaatatataaactaagttattcattcactgtttttcttcacagtaagaatgacaaaaatctgtgttctttgtacttatcaagtgactcaaattttggccacttcactgtcactgatggcttatagaatgattctagcaggactcaagttattgaactatcaaatgggtttttaattgatattgaagtaagtaagttttgtagcttttggagtttttaaaaactacttcagtgattttgatttatattctttttgatagttcagaagtgtattgttaaaaaacataagcatggccgggcacagtggctcacacctgtaatcccagctctttgggaggccaaggcgggtaaatcacctgaggttgggagtttgagaccagcctgaccaacatggagaaaccctgtctctaccaaaaatacaaaattagccgggcatgatggagcatccctgtaatcctagctacttgagacgctgaggcaggaaaattgcttgaacccgtgaggcagaggttgcgatgagccgagatcgtgccattgcactccagcctgggcaataagagcaaaactccgtctcagaaaaaaaaaaaaaaaaaaaaaacggccaggcgaggtggctcacacctgtaatcccagcactttgggaggctgaggcgggcagatcacctgaagtcaggagttcaagaccagcctgaccaacatggagaaacttcatctctactaaaaatacaaaattagccgggcgtggtggcacatgcctttaatcccagctactggggaggctgaaacaggagaatcgcttgaacccagtaggggaaggttgtggtgagccaagattgcaccattgcactccagcctgggcaagaagagtgaaactctatccaaaaaaaaaaaaaaaccatacgtacataactttttttctttttcttttctttctttcttttcttttcttttttttttttgaggcacagtcttgctttgttgaccaagctggagtgcattggcatgatcacagcttactgtagcctccacctcctgggctccagcgatctcacctcagcctctagaatagctgggactacatatgcatgccaccatgcccagctgtttttttgtttgcttgtttttggttttgtttttttgagacagggtctccctgcgtcgcccagtcttgtctcaaactcctaggctcaagcgatcctcccacctgggcctcccaaagtgttgagattgcaggtgtgagccacggcacctggtccataaaacatttttttatgaactaaagagctctctcaaacttgtgctaacaaaatttaaggcaatattaattctgtgcatgtgtttgggaaaattaaaaaaacttacatagtgcttatttggcccacaaaagtacagttccattttttatataaatagattctacctaacttataacccctatgtcaaaatttgtttatcttaaaatagtttgtataaaaagtctttactgctttattatgaaataataatgtttattgtagaaaaatctaggaaaacacaaaaatgtcaaactcagttaacagtcatagtttcactatttgaagttaaccactgttaagattcttttttttttttttttttttttgttttgagactgagtcccgctgtctattgcccaggctggagtgccatggcaccatctcggctcactgcaacctctgcttcccaggttcaagtgatcctcccgcctcagcctcccaagtagctgggattgcaaacatgtgccaccacacctggctaatttttgtgtttttagtacagatggggtttcaccatgttggccaggctggcctcgaactcctcaacctcaagtagtctgcccaccttgacctcccaaagtgctgggattacaggcatggggcaccatgcccagccccactgttaagattctaatgtaggccgggcacagtgactcatgcctataactcaagcactttgggagttcaaggcggccagattgcttgagcttttagaagtttgagaccagcctgggcaacgtggcaaaagcttgtttctataaaaaaatataaaaacttagccagccttggtggcaccacctgcagtcccaactattcaggaggctgaggcgagaggatggcttgagctcaggaagtcaaggctacagtgagctgtggtagtgccactgcactccctcatggttgacagagcaagaccctgtctcaaaagattctaatatagatactctttttatgcatatgtaatttatatatattatacaaaatattatttgcatttaacatattctgaaccaatagtcttttctacaagcagaacattagtattcttgtcactctgaatgtaggcacagatttttgtcattctttatcttttttgtgtgtgtgtgacagagtctcactgtcaccaggctggaatgcagtggcgtgatctcggctcactgcaacctctgcctcccaggttcaagcgattctcttgcctcagccttttgagtaactggggttacaggcgcgtgccatcacacccagctcatttttgtatttttagtagagatggggttttaccgtgttggtcaggctggtcctgaactcttgaccttgtgatctgcccaactcagcctcccagagtgctgggattacaagcatgagccaccgcgctcggtccctttctttttatttatttatttattttgagatggagtctcgctgtgtcacccaggctggagtgtggtggcacgatcttggctcactgcaacccctgcctcccaggttcaagcaattctcctgcctcagcctcctgagtagctgagactacgggtatgtgccactacactcagctaatttttgtatttttttttagtagagacagggtttcaccatgttggccaggctggtcttgaactcctaacctcaggtgattcacaccccttggcctcctgaagtgctgggattacaggcatgagccactgtgcccggccatttttttgtgtttttagtggagacaggttttcaccatgttggccagtagtgtatttagttatttaaggagggctcaatcaacaggtttaaatggtgtgctattcataattattgcaaaaataggccgggcctgtaattccagcactttgggaggccaaggcaggtgaatcacttgaggccaggagtttgagatcagcctggccaacgtggtgaaactccatctctactaaaaataccaaaagtagcgggcgtggtgacaggtgcctctaatcccagctactcgggaggctgaggcaggagaatcgcttgaacccaagagtcggaggttgcagtgagccgagatcgcgccattgcactccagtgtgggtgacgagcgaaaatccgtctcaaccaagaaaaaagaaaaaaagaaaaagaaaacttaactggcctttggggcacatgcctgtaatcccagcttcttgggaggctgaggcatgagaaaaaaaataaacctgggaggtggaggttgcagtgagttgagattgtgccactgcactccagcttaggcaataaaacaagactgtctcaaaaaaaaaaaaaaaaaaaacttattgagagaataatataccactaatatttaaagaaatttttggctggtgccgtggctcacacctgtaatcccagcactttgggagtccaaagtgggcgtataacttgaggtcaggagttcaagaacagcctggccaacatggggaaaccgcatctctactaaaaatacaaaaattagtgggtgtggaggcgggcgaatgtaatcccagctagttgagaggctgaggcaggagaatgtctgggaggtggaggttgcagtgtgccgagatcgcaccactgtactccagcctaggtgacagagtgagactccataggtctcagccagactctggaggtctcagcccaggcttgagtgcagtggcatgatctgggctcactacaacctccatctccccagttcaagcgattctcctgcctcagcctcccgagtagctgcgactacaggcgagtgcctccatgcccagctaattttttgtatttttagtagagacggggtttcaccatgttagccaggatggtcttgatctcctgaccttgtgatctgtccaccgcggcttcccaaagtgctgggattacaggtgtgagccacagcgcccggccaaaaaaaggaatttttaagaggaaaaagaatgctaccaacctaaacacatttctgtgactgtttatatttttccctgttccacatacatacatttttacatagtacgttcattgcagcatgagttacttttcacttaataaattttaaacattttccagctgggtgtggtggctcatgcctgtaatcccaacacttggagaggccaagtcaggcttattgggtgagtccaggtgtttgagactagcctaggcaacatggcgaaactgcatctctacaaaaaatacaaaaattagccaggtgtgctggcgcacacctgtagtcccaactactcaggaggctgaggtgggaggattgcttgagcccaggaggtagaggttgcagtgagccatgatcatgccactgcactccagcctaggtgacaaagcacaaccctcaaataaataaataaatacatgttaaacatatacctttattacttcatttttgtaagagcttcagggaataggcttttttaaagggaatagacttatagatcaattttaatatttgacttatagaattttatgacactaaatggataattgtaaagtttgagttgggacccattttttaagacattcaggctataaacaaggtaataaatcacactcttccagttctactcccaatttaattggtttacagttcggtggctgtctttttttttttttttttttttttttgagaccgagtctccctctgtcaccaggctggagtgcagtggtgcaatctcagctcactgcaacctccccctctcaggttcaagtaattctcctgcctcagcctgccgagtagctgggactacagtcgcacgccaaccacccccagctaatttttttatttttagtagagacaggatttcaccatgtttgccaggatggtctcgatctcttgtgctcataatctacctacctcggcctcccaaagtgctcggattacagacgtgagccactgcgcccggcccgttggcttgctttctagatactgggaatagatcttgttatagtatgtgataaatagatcttgttatagtatgtgataaaatgccatgatcaaataaattacttatatcctgtttggtgatttttagaaaaacatatttatctacatctaaaatacttattttaattttaaacacttgatggtatgaaatgaaattttgttactttaccattgtaactatgtcataaagtcataaagtacctgtccccaaaaaggcaaccagtaaatatttttgagtaaatgaatgaaatctttattgccggtgttctgtgcacatagaataaaggaaattattaatgtta

SEQ ID NO: 124462 - DNA, 1986 bp, Homo sapiens
  Payload ID: 4442
  Gene Symbol: CYP20A1
  Gene Name: cytochrome P450, family 20, subfamily A, polypeptide 1
  ENST ID: ENST00000613925
  CDS Start-End: 865-1443
ggcgctgctgctggagcggccgatccgagacgtggctccctgggcggcagaaccatgttggacttcgcgatcttcgccgttaccttcttgctggcgttggtgggagccgtgctctacctctatccggcttccagacaagctgcaggaattccagggattactccaactgaagaaaaagatggtaatcttccagatattgtgaatagtggaagtttgcatgagttcctggttaatttgcatgagagatatgggcctgtggtctccttctggtttggcaggcgcctcgtggttagtttgggcactgttgatgtactgaagcagcatatcaatcccaataagacatcggacccttttgaaaccatgctgaagtcattattaaggtatcaatctggtggtggcagtgtgagtgaaaaccacatgaggaaaaaattgtatgaaaatggtgtgactgattctctgaagagtaactttgccctcctcctaaagctttcagaagaattattagataaatggctctcctacccagagacccagcacgtgcccctcagccagcatatgcttggttttgctatgaagtctgttacacagatggtaatgggtagtacatttgaagatgatcaggaagtcattcgcttccagaagaatcatggcacagtttggtctgagattggaaaaggctttctagatgggtcacttgataaaaacatgactcggaaaaaacaatatgaagatgccctcatgcaactggagtctgttttaaggaacatcataaaagaacgaaaaggaaggaacttcagtcaacatattttcattgactccttagtacaagggaaccttaatgaccaacagatcctagaagacagtatgatattttctctggccagttgcataataactgcaaaattgtgtacctgggcaatctgttttttaaccacctctgaagaagttcaaaaaaaattatatgaagagataaaccaagtttttggaaatggtcctgttactccagagaaaattgagcagctcagatattgtcagcatgtgctttgtgaaactgttcgaactgccaaactgactccagtttctgcccagcttcaagatattgaaggaaaaattgaccgatttattattcctagagagaccctcgtcctttatgcccttggtgtggtacttcaggatcctaatacttggccatctccacacaagtttgatccagatcggtttgatgatgaattagtaatgaaaactttttcctcacttggattctcaggcacacaggagtgtccagagttgaggtttgcatatatggtgaccacagtacttcttagtgtattggtgaagagactgcacctactttctgtggagggacaggttattgaaacaaagtatgaactggtaacatcatcaagggaagaagcttggatcactgtctcaaagagatattaaaattttatacatttaaaatcattgttaaattgattgaggaaaacaaccatttaaaaaaaatctatgttgaatccttttataaaccagtatcactttgtaatataaacacctatttgtacttaattttgtaaatttggatttttatatatcatattttcttaattcattgtacacatttgacttactgcacagtatattgatcattttaatgggaaactttagctttctactttttatttttgttttttcactttctatgccattatttttgtattctttttcttagtgtgagctctaaaatcaatgttcttgaaaaagaaattattttgcagaagttggggaatcatgtttgttgaatatgtataaaatagaaacataggctcggcctcccaaagtgctcggattacagacgtgagccactgcgcccggcccgttggcttgctttctagatactgggaatagatcttgttatagtatgtgataaatagatcttgttatagtatgtgataaaatgccatgatcaaataaattacttatatcctg

SEQ ID NO: 124463 - DNA, 1942 bp, Homo sapiens
  Payload ID: 4443
  Gene Symbol: CYP21A2
  Gene Name: cytochrome P450, family 21, subfamily A, polypeptide 2
  Uniprot ID: P08686
  ENST ID: ENST00000383321
  CDS Start-End: 9-1406
gtctcgccatgctgctcctgggcctgctgctgctgctgcccctgctggctggcgcccgcctgctgtggaactggtggaagctccggagcctccacctcccgcctcttgccccgggcttcttgcacttgctgcagcccgacctcccaatctatctgcttggcctgactcagaaattcgggcccatctacaggctccaccttgggctgcaagacaagctggtgtctaggaactacccggacctgtccttgggagactactccctgctctggaaagcccacaagaagctcacccgctcagccctgctgctgggcatccgtgactccatggagccagtggtggagcagctgacccaggagttctgtgagcgcatgagagcccagcccggcacccctgtggccattgaggaggaattctctctcctcacctgcagcatcatctgttacctcaccttcggagacaagatcaaggacgacaacttaatgcctgcctattacaaatgtatccaggaggtgttaaaaacctggagccactggtccatccaaattgtggacgtgattccctttctcaggttcttccccaatccaggtctccggaggctgaagcaggccatagagaagagggatcacatcgtggagatgcagctgaggcagcacaaggagagcctcgtggcaggccagtggagggacatgatggactacatgctccaaggggtggcgcagccgagcatggaagagggctctggacagctcctggaagggcacgtgcacatggctgcagtggacctcctgatcggtggcactgagaccacagcaaacaccctctcctgggccgtggtttttttgcttcaccaccctgagattcagcagcgactgcaggaggagctagaccacgaactgggccctggtgcctccagctcccgggtcccctacaaggaccgtgcacggctgcccttgctcaatgccaccatcgccgaggtgctgcgcctgcggcccgttgtgcccttagccttgccccaccgcaccacacggcccagcagcatctccggctacgacatccctgagggcacagtcatcattccgaacctccaaggcgcccacctggatgagacggtctgggagaggccacatgagttctggcctgatcgcttcctggagccaggcaagaactccagagctctggccttcggctgcggtgcccgcgtgtgcctgggcgagccgctggcgcgcctggagctcttcgtggtgctgacccgactgctgcaggccttcacgctgctgccctccggggacgccctgccctccctgcagcccctgccccactgcagtgtcatcctcaagatgcagcctttccaagtgcggctgcagccccgggggatgggggcccacagcccgggccagagccagtgatggggcaggaccgatgccagccgggtacctcagtttctcctttattgctcctgtacgaacccctcccctcccccctgtaaacacagtgctgcgagatcgctggcagagaaggcttcctccagcggctgggtggtgaaggaccctggctcttctctcggggcgacccctcagtgctcggcagtcatactggggtgcgagagaggtgggcagcagctcagcctccccccgctggggagcgaaagtttcttggtctcagcttcatttccgtgaagggcaccgagaactcgaagcccttccagtggtaccagctcactccctgggaaaggggttgtcaagagagagtcaaagccggatgtcccatctgctcttcccgttccccttaaggaggtagctcccagcactcaaccaacctccccgcagagctcccttcctgaccctccgctgcagaggattgaggcttaattctgagctggccctttccagccaataaatcaactccagctccctctgcgaggctggcatgattgttccatttc

SEQ ID NO: 124464 - DNA, 2121 bp, Homo sapiens
  Payload ID: 4443
  Gene Symbol: CYP21A2
  Gene Name: cytochrome P450, family 21, subfamily A, polypeptide 2
  ENST ID: ENST00000383322
  CDS Start-End: 126-1613
gggtcggtgggagggtacctgaaggtggggtcaagggaggccccaaaacagtctacacagcaggagggatggctggggctcttgagctataagtggcacctcagggccctgacgggcgtctcgccatgctgctcctgggcctgctgctgctgctgcccctgctggctggcgcccgcctgctgtggaactggtggaagctccggagcctccacctcccgcctcttgccccgggcttcttgcacttgctgcagcccgacctcccaatctatctgcttggcctgactcagaaattcgggcccatctacaggctccaccttgggctgcaagatgtggtggtgctgaactccaagaggaccattgaggaagccatggtcaaaaagtgggcagactttgctggcagacctgagccacttacctacaagctggtgtctaggaactacccggacctgtccttgggagactactccctgctctggaaagcccacaagaagctcacccgctcagccctgctgctgggcatccgtgactccatggagccagtggtggagcagctgacccaggagttctgtgagcgcatgagagcccagcccggcacccctgtggccattgaggaggaattctctctcctcacctgcagcatcatctgttacctcaccttcggagacaagatcaaggacgacaacttaatgcctgcctattacaaatgtatccaggaggtgttaaaaacctggagccactggtccatccaaattgtggacgtgattccctttctcaggttcttccccaatccaggtctccggaggctgaagcaggccatagagaagagggatcacatcgtggagatgcagctgaggcagcacaaggagagcctcgtggcaggccagtggagggacatgatggactacatgctccaaggggtggcgcagccgagcatggaagagggctctggacagctcctggaagggcacgtgcacatggctgcagtggacctcctgatcggtggcactgagaccacagcaaacaccctctcctgggccgtggtttttttgcttcaccaccctgagattcagcagcgactgcaggaggagctagaccacgaactgggccctggtgcctccagctcccgggtcccctacaaggaccgtgcacggctgcccttgctcaatgccaccatcgccgaggtgctgcgcctgcggcccgttgtgcccttagccttgccccaccgcaccacacggcccagcagcatctccggctacgacatccctgagggcacagtcatcattccgaacctccaaggcgcccacctggatgagacggtctgggagaggccacatgagttctggcctgatcgcttcctggagccaggcaagaactccagagctctggccttcggctgcggtgcccgcgtgtgcctgggcgagccgctggcgcgcctggagctcttcgtggtgctgacccgactgctgcaggccttcacgctgctgccctccggggacgccctgccctccctgcagcccctgccccactgcagtgtcatcctcaagatgcagcctttccaagtgcggctgcagccccgggggatgggggcccacagcccgggccagagccagtgatggggcaggaccgatgccagccgggtacctcagtttctcctttattgctcctgtacgaacccctcccctcccccctgtaaacacagtgctgcgagatcgctggcagagaaggcttcctccagcggctgggtggtgaaggaccctggctcttctctcggggcgacccctcagtgctcggcagtcatactggggtgcgagagaggtgggcagcagctcagcctccccccgctggggagcgaaagtttcttggtctcagcttcatttccgtgaagggcaccgagaactcgaagcccttccagtggtaccagctcactccctgggaaaggggttgtcaagagagagtcaaagccggatgtcccatctgctcttcccgttccccttaaggaggtagctcccagcactcaaccaacctccccgcagagctcccttcctgaccctccgctgcagaggattgaggcttaattctgagctggccctttccagccaataaatcaactccagctccctc

SEQ ID NO: 124465 - DNA, 1939 bp, Homo sapiens
  Payload ID: 4443
  Gene Symbol: CYP21A2
  Gene Name: cytochrome P450, family 21, subfamily A, polypeptide 2
  ENST ID: ENST00000452708
  CDS Start-End: 9-1403
gtctcgccatgctgctcctgggcctgctgctgctgcccctgctggctggcgcccgcctgctgtggaactggtggaagctccggagcctccacctcccgcctcttgccccgggcttcttgcacttgctgcagcccgacctcccaatctatctgcttggcctgactcagaaattcgggcccatctacaggctccaccttgggctgcaagacaagctggtgtctaagaactacccggacctgtccttgggagactactccctgctctggaaagcccacaagaagctcacccgctcagccctgctgctgggcatccgtgactccatggagccagtggtggagcagctgacccaggagttctgtgagcgcatgagagcccagcccggcacccctgtggccattgaggaggaattctctctcctcacctgcagcatcatctgttacctcaccttcggagacaagatcaaggacgacaacttaatgcctgcctattacaaatgtatccaggaggtgttaaaaacctggagccactggtccatccaaattgtggacgtgattccctttctcaggttcttccccaatccaggtctccggaggctgaagcaggccatagagaagagggatcacatcgtggagatgcagctgaggcagcacaaggagagcctcgtggcaggccagtggagggacatgatggactacatgctccaaggggtggcgcagccgagcatggaagagggctctggacagctcctggaagggcacgtgcacatggctgcagtggacctcctgatcggtggcactgagaccacagcaaacaccctctcctgggccgtggtttttttgcttcaccaccctgagattcagcagcgactgcaggaggagctagaccacgaactgggccctggtgcctccagctcccgggtcccctacaaggaccgtgcacggctgcccttgctcaatgccaccatcgccgaggtgctgcgcctgcggcccgttgtgcccttagccttgccccaccgcaccacacggcccagcagcatctccggctacgacatccctgagggcacagtcatcattccgaacctccaaggcgcccacctggatgagacggtctgggagaggccacatgagttctggcctgatcgcttcctggagccaggcaagaactccagagctctggccttcggctgcggtgcccgcgtgtgcctgggcgagccgctggcgcgcctggagctcttcgtggtgctgacccgactgctgcaggccttcacgctgctgccctccggggacgccctgccctccctgcagcccctgccccactgcagtgtcatcctcaagatgcagcctttccaagtgcggctgcagccccgggggatgggggcccacagcccaggccagaaccagtgatggggcaggaccgatgccagccgggtacctcagtttctcctttattgctcccgtacgaacccctcccctcccccctgtaaacacagtgctgcgagatcgctggcagagaaggcttcctccagcggctgggtggtgaaggaccctggctcttctctcggggcgacccctcagtgctcggcagtcatactggggtgcgagagaggtgggcagcagctcagcctccccccgctggggagcgaaagtttcttggtctcagcttcatttccgtgaagggcaccgagaactcgaagcccttccagtggtaccagctcactccctgggaaaggggttgtcaagagagagtcaaagccggatgtcccatctgctcttcccgttccccttaaggaggtagctcccagcactcaaccaacctccccgcagagctcccttcctgaccctccgctgcagaggattgaggcttaattctgagctggccctttccagccaataaatcaactccagctccctctgcgaggctggcatgattgttccatttc

SEQ ID NO: 124466 - DNA, 1942 bp, Homo sapiens
  Payload ID: 4443
  Gene Symbol: CYP21A2
  Gene Name: cytochrome P450, family 21, subfamily A, polypeptide 2
  Uniprot ID: P08686
  ENST ID: ENST00000434026
  CDS Start-End: 9-1406
gtctcgccatgctgctcctgggcctgctgctgctgctgcccctgctggctggcgcccgcctgctgtggaactggtggaagctccggagcctccacctcccgcctcttgccccgggcttcttgcacttgctgcagcccgacctcccaatctatctgcttggcctgactcagaaattcgggcccatctacaggctccaccttgggctgcaagacaagctggtgtctaggaactacccggacctgtccttgggagactactccctgctctggaaagcccacaagaagctcacccgctcagccctgctgctgggcatccgtgactccatggagccagtggtggagcagctgacccaggagttctgtgagcgcatgagagcccagcccggcacccctgtggccattgaggaggaattctctctcctcacctgcagcatcatctgttacctcaccttcggagacaagatcaaggacgacaacttaatgcctgcctattacaaatgtatccaggaggtgttaaaaacctggagccactggtccatccaaattgtggacgtgattccctttctcaggttcttccccaatccaggtctccggaggctgaagcaggccatagagaagagggatcacatcgtggagatgcagctgaggcagcacaaggagagcctcgtggcaggccagtggagggacatgatggactacatgctccaaggggtggcgcagccgagcatggaagagggctctggacagctcctggaagggcacgtgcacatggctgcagtggacctcctgatcggtggcactgagaccacagcaaacaccctctcctgggccgtggtttttttgcttcaccaccctgagattcagcagcgactgcaggaggagctagaccacgaactgggccctggtgcctccagctcccgggtcccctacaaggaccgtgcacggctgcccttgctcaatgccaccatcgccgaggtgctgcgcctgcggcccgttgtgcccttagccttgccccaccgcaccacacggcccagcagcatctctggctacgacatccctgagggcacagtcatcattccgaacctccaaggcgcccacctggatgagacggtctgggagaggccacatgagttctggcctgatcgcttcctggagccaggcaagaactccagagctctggccttcggctgcggtgcccgcgtgtgcctgggcgagccgctggcgcgcctggagctcttcgtggtgctgacccgactgctgcaggccttcacgctgctgccctccggggacgccctgccctccctgcagcccctgccccactgcagtgtcatcctcaagatgcagcctttccaagtgcggctgcagccccgggggatgggggcccacagcccgggccagagccagtgatggggcaggaccgatgccagccgggtacctcagtttctcctttattgctcccgtacgaacccctcccctcccccctgtaaacacagtgctgcgagatcgctggcagagaaggcttcctccagcggctgggtggtgaaggaccctggctcttctctcggggcgacccctcagtgctcggcagtcatactggggtgcgagagaggtgggcagcagctcagcctccccccgctggggagcgaaagtttcttggtctcagcttcatttccgtgaagggcaccgagaactcgaagcccttccagtggtaccagctcactccctgggaaaggggttgtcaagagagagtcaaagccggatgtcccatctgctcctcccgttccccttaaggaggtggctcccagcactcaaccaacctccccgcagagctcccttcctgaccctctgccgcagaggattgaggcttaatcctgagctggtcctttccagccaataaatcaactccagctccctctgcgaggctggcatgattgttccatttc

SEQ ID NO: 124467 - DNA, 2121 bp, Homo sapiens; identical to SEQ ID NO: 124464
  Payload ID: 4443
  Gene Symbol: CYP21A2
  Gene Name: cytochrome P450, family 21, subfamily A, polypeptide 2
  ENST ID: ENST00000456152
  CDS Start-End: 126-1613

SEQ ID NO: 124468 - DNA, 2114 bp, Homo sapiens
  Payload ID: 4443
  Gene Symbol: CYP21A2
  Gene Name: cytochrome P450, family 21, subfamily A, polypeptide 2
  Uniprot ID: P08686
  ENST ID: ENST00000448314
  CDS Start-End: 126-1610
gggtcggtgggagggtacctgaaggtggggtcaagggaggccccaaaacagtctacacagcaggagggatggctggggctcttgagctataagtggcacctcagggccctgacgggcgtctcgccatgctgctcctgggcctgctgctgctgcccctgctggctggcgcccgcctgctgtggaactggtggaagctccggagcctccacctcccgcctcttgccccgggcttcttgcacttgctgcagcccgacctcccaatctatctgcttggcctgactcagaaattcgggcccatctacaggctccaccttgggctgcaagatgtggtggtgctgaactccaagaggaccattgaggaagccatggtcaaaaagtgggcagactttgctggcagacctgagccacttacctacaagctggtgtctaagaactacccggacctgtccttgggagactactccctgctctggaaagcccacaagaagctcacccgctcagccctgctgctgggcatccgtgactccatggagccagtggtggagcagctgacccaggagttctgtgagcgcatgagagcccagcccggcacccctgtggccattgaggaggaattctctctcctcacctgcagcatcatctgttacctcaccttcggagacaagatcaaggacgacaacttaatgcctgcctattacaaatgtatccaggaggtgttaaaaacctggagccactggtccatccaaattgtggacgtgattccctttctcaggttcttccccaatccaggtctccggaggctgaagcaggccatagagaagagggatcacatcgtggagatgcagctgaggcagcacaaggagagcctcgtggcaggccagtggagggacatgatggactacatgctccaaggggtggcgcagccgagcatggaagagggctctggacagctcctggaagggcacgtgcacatggctgcagtggacctcctgatcggtggcactgagaccacagcaaacaccctctcctgggccgtggtttttttgcttcaccaccctgagattcagcagcgactgcaggaggagctagaccacgaactgggccctggtgcctccagctcccgggtcccctacaaggaccgtgcacggctgcccttgctcaatgccaccatcgccgaggtgctgcgcctgcggcccgttgtgcccttagccttgccccaccgcaccacacggcccagcagcatctccggctacgacatccctgagggcacagtcatcattccgaacctccaaggcgcccacctggatgagacggtctgggagaggccacatgagttctggcctgatcgcttcctggagccaggcaagaactccagagctctggccttcggctgcggtgcccgcgtgtgcctgggcgagccgctggcgcgcctggagctcttcgtggtgctgacccgactgctgcaggccttcacgctgctgccctccggggacgccctgccctccctgcagcccctgccccactgcagtgtcatcctcaagatgcagcctttccaagtgcggctgcagccccgggggatgggggcccacagcccaggccagaaccagtgatggggcaggaccgatgccagccgggtacctcagtttctcctttattgctcccgtacgaacccctcccctcccccctgtaaacacagtgctgcgagatcgctggcagagaaggcttcctccagcggctgggtggtgaaggaccctggctcttctctcggggcgacccctcagtgctcggcagtcatactggggtgcgagagaggtgggcagcagctcagcctccccccgctggggagcgaaagtttcttggtctcagcttcatttccgtgaagggcaccgagaactcgaagcccttccagtggtaccagctcactccctgggaaaggggttgtcaagagagagtcaaagccggatgtcccatctgctcttcccgttccccttaaggaggtagctcccagcactcaaccaacctccccgcagagctcccttcctgaccctccgctgcagaggattgaggcttaattctgagctggccctttccagccaataaatcaactccagctc

SEQ ID NO: 124469 - DNA, 1942 bp, Homo sapiens; identical to SEQ ID NO: 124463
  Payload ID: 4443
  Gene Symbol: CYP21A2
  Gene Name: cytochrome P450, family 21, subfamily A, polypeptide 2
  Uniprot ID: P08686
  ENST ID: ENST00000452386
  CDS Start-End: 9-1406

SEQ ID NO: 124470 - DNA, 2118 bp, Homo sapiens
  Payload ID: 4443
  Gene Symbol: CYP21A2
  Gene Name: cytochrome P450, family 21, subfamily A, polypeptide 2
  Uniprot ID: P08686
  ENST ID: ENST00000436607
  CDS Start-End: 126-1610
gggtcggtgggagggtacctgaaggtggggtcaagggaggccccaaaacagtctacacagcaggagggatggctggggctcttgagctataagtggcacctcagggccctgacgggcgtctcgccatgctgctcctgggcctgctgctgctgcccctgctggctggcgcccgcctgctgtggaactggtggaagctccggagcctccacctcccgcctcttgccccgggcttcttgcacttgctgcagcccgacctcccaatctatctgcttggcctgactcagaaattcgggcccatctacaggctccaccttgggctgcaagatgtggtggtgctgaactccaagaggaccattgaggaagccatggtcaaaaagtgggcagactttgctggcagacctgagccacttacctacaagctggtgtctaagaactacccggacctgtccttgggagactactccctgctctggaaagcccacaagaagctcacccgctcagccctgctgctgggcatccgtgactccatggagccagtggtggagcagctgacccaggagttctgtgagcgcatgagagcccagcccggcacccctgtggccattgaggaggaattctctctcctcacctgcagcatcatctgttacctcaccttcggagacaagatcaaggacgacaacttaatgcctgcctattacaaatgtatccaggaggtgttaaaaacctggagccactggtccatccaaattgtggacgtgattccctttctcaggttcttccccaatccaggtctccggaggctgaagcaggccatagagaagagggatcacatcgtggagatgcagctgaggcagcacaaggagagcctcgtggcaggccagtggagggacatgatggactacatgctccaaggggtggcgcagccgagcatggaagagggctctggacagctcctggaagggcacgtgcacatggctgcagtggacctcctgatcggtggcactgagaccacagcaaacaccctctcctgggccgtggtttttttgcttcaccaccctgagattcagcagcgactgcaggaggagctagaccacgaactgggccctggtgcctccagctcccgggtcccctacaaggaccgtgcacggctgcccttgctcaatgccaccatcgccgaggtgctgcgcctgcggcccgttgtgcccttagccttgccccaccgcaccacacggcccagcagcatctccggctacgacatccctgagggcacagtcatcattccgaacctccaaggcgcccacctggatgagacggtctgggagaggccacatgagttctggcctgatcgcttcctggagccaggcaagaactccagagctctggccttcggctgcggtgcccgcgtgtgcctgggcgagccgctggcgcgcctggagctcttcgtggtgctgacccgactgctgcaggccttcacgctgctgccctccggggacgccctgccctccctgcagcccctgccccactgcagtgtcatcctcaagatgcagcctttccaagtgcggctgcagccccgggggatgggggcccacagcccaggccagaaccagtgatggggcaggaccgatgccagccgggtacctcagtttctcctttattgctcccgtacgaacccctcccctcccccctgtaaacacagtgctgcgagatcgctggcagagaaggcttcctccagcggctgggtggtgaaggaccctggctcttctctcggggcgacccctcagtgctcggcagtcatactggggtgcgagagaggtgggcagcagctcagcctccccccgctggggagcgaaagtttcttggtctcagcttcatttccgtgaagggcaccgagaactcgaagcccttccagtggtaccagctcactccctgggaaaggggttgtcaagagagagtcaaagccggatgtcccatctgctcttcccgttccccttaaggaggtagctcccagcactcaaccaacctccccgcagagctcccttcctgaccctccgctgcagaggattgaggcttaattctgagctggccctttccagccaataaatcaactccagctccctc

SEQ ID NO: 124471 - DNA, 1939 bp, Homo sapiens; identical to SEQ ID NO: 124465
  Payload ID: 4443
  Gene Symbol: CYP21A2
  Gene Name: cytochrome P450, family 21, subfamily A, polypeptide 2
  ENST ID: ENST00000448877
  CDS Start-End: 9-1403

SEQ ID NO: 124472 - DNA, 2182 bp, Homo sapiens
  Payload ID: 4443
  Gene Symbol: CYP21A2
  Gene Name: cytochrome P450, family 21, subfamily A, polypeptide 2
  ENST ID: ENST00000418967
  CDS Start-End: 159-1646
ggtgtcattccagaaaagggccactctgtgggcgggtcggtgggagggtacctgaaggtggggtcaagggaggccccaaaacagtctacacagcaggagggatggctggggctcttgagctataagtggcacctcagggccctgacgggcgtctcgccatgctgctcctgggcctgctgctgctgctgcccctgctggctggcgcccgcctgctgtggaactggtggaagctccggagcctccacctcccgcctcttgccccgggcttcttgcacctgctgcagcccgacctccccatctatctgcttggcctgactcagaaattcgggcccatctacaggctccaccttgggctgcaagatgtggtggtgctgaactccaagaggaccattgaggaagccatggtcaaaaagtgggcagactttgctggcagacctgagccacttacctacaagctggtgtctaggaactacccggacctgtccttgggagactactccctgctctggaaagcccacaagaagctcacccgctcagccctgctgctgggcatccgtgactccatggagccagtggtggagcagctgacccaggagttctgtgagcgcatgagagcccagcccggcacccctgtggccattgaggaggaattctctctcctcacctgcagcatcatctgttacctcaccttcggagacaagatcaaggacgacaacttaatgcctgcctattacaaatgtatccaggaggtgttaaaaacctggagccactggtccatccaaattgtggacgtgattccctttctcaggttcttccccaatccaggtctccggaggctgaagcaggccatagagaagagggatcacatcgtggagatgcagctgaggcagcacaaggagagcctcgtggcaggccagtggagggacatgatggactacatgctccaaggggtggcgcagccgagcatggaagagggctctggacagctcctggaagggcacgtgcacatggctgcagtggacctcctgatcggtggcactgagaccacagcaaacaccctctcctgggccgtggtttttttgcttcaccaccctgagattcagcagcgactgcaggaggagctagaccacgaactgggccctggtgcctccagctcccgggtcccctacaaggaccgtgcacggctgcccttgctcaatgccaccatcgccgaggtgctgcgcctgcggcccgttgtgcccttagccttgccccaccgcaccacacggcccagcagcatctccggctacgacatccctgagggcacagtcatcattccgaacctccaaggcgcccacctggatgagacggtctgggagaggccacatgagttctggcctgatcgcttcctggagccaggcaagaactccagagctctggccttcggctgcggtgcccgcgtgtgcctgggcgagccgctggcgcgcctggagctcttcgtggtgctgacccgactgctgcaggccttcacgctgctgccctccggggacgccctgccctccctgcagcccctgccccactgcagtgtcatcctcaagatgcagcctttccaagtgcggctgcagccccgggggatgggggcccacagcccgggccagagccagtgatggggcaggaccgatgccagccgggtacctcagtttctcctttattgctcccgtacgaacccctcccctcccccctgtaaacacagtgctgcgagatcgctggcagagaaggcttcctccagcggctgggtggtgaaggaccctggctcttctctcggggcgacccctcagtgctcggcagtcatactggggtgcgagagaggtgggcagcagctcagcctccccccgctggggagcgaaagtttcttggtctcagcttcatttccgtgaagggcaccgagaactcgaagcccttccagtggtaccagctcactccctgggaaaggggttgtcaagagagagtcaaagccggatgtcccatctgctcttcccgttccccttaaggaggtagctcccagcactcaaccaacctccccgcagagctcccttcctgaccctccgctgcagaggattgaggcttaattctgagctggccctttccagccaataaatcaactccagctccctctgcgaggctggcatgattgttccatttc

SEQ ID NO: 124473 - DNA, 1914 bp, Homo sapiens
  Payload ID: 4443
  Gene Symbol: CYP21A2
  Gene Name: cytochrome P450, family 21, subfamily A, polypeptide 2
  Uniprot ID: P08686
  ENST ID: ENST00000435122
  CDS Start-End: 9-1406
gtctcgccatgctgctcctgggcctgctgctgctgctgcccctgctggctggcgcccgcctgctgtggaactggtggaagctccggagcctccacctcccgcctcttgccccgggcttcttgcacctgctgcagcccgacctccccatctatctgcttggcctgactcagaaattcgggcccatctacaggctccaccttgggctgcaagacaagctggtgtctaggaactacccggacctgtccttgggagactactccctgctctggaaagcccacaagaagctcacccgctcagccctgctgctgggcatccgtgactccatggagccagtggtggagcagctgacccaggagttctgtgagcgcatgagagcccagcccggcacccctgtggccattgaggaggaattctctctcctcacctgcagcatcatctgttacctcaccttcggagacaagatcaaggacgacaacttaatgcctgcctattacaaatgtatccaggaggtgttaaaaacctggagccactggtccatccaaattgtggacgtgattccctttctcaggttcttccccaatccaggtctccggaggctgaagcaggccatagagaagagggatcacatcgtggagatgcagctgaggcagcacaaggagagcctcgtggcaggccagtggagggacatgatggactacatgctccaaggggtggcgcagccgagcatggaagagggctctggacagctcctggaagggcacgtgcacatggctgcagtggacctcctgatcggtggcactgagaccacagcaaacaccctctcctgggccgtggtttttttgcttcaccaccctgagattcagcagcgactgcaggaggagctagaccacgaactgggccctggtgcctccagctcccgggtcccctacaaggaccgtgcacggctgcccttgctcaatgccaccatcgccgaggtgctgcgcctgcggcccgttgtgcccttagccttgccccaccgcaccacacggcccagcagcatctccggctacgacatccctgagggcacagtcatcattccgaacctccaaggcgcccacctggatgagacggtctgggagaggccacatgagttctggcctgatcgcttcctggagccaggcaagaactccagagctctggccttcggctgcggtgcccgcgtgtgcctgggcgagccgctggcgcgcctggagctcttcgtggtgctgacccgactgctgcaggccttcacgctgctgccctccggggacgccctgccctccctgcagcccctgccccactgcagtgtcatcctcaagatgcagcctttccaagtgcggctgcagccccgggggatgggggcccacagcccgggccagagccagtgatggggcaggaccgatgccagccgggtacctcagtttctcctttattgctcccgtacgaacccctcccctcccccctgtaaacacagtgctgcgagatcgctggcagagaaggcttcctccagcggctgggtggtgaaggaccctggctcttctctcggggcgacccctcagtgctcggcagtcatactggggtgcgagagaggtgggcagcagctcagcctccccccgctggggagcgaaagtttcttggtctcagcttcatttccgtgaagggcaccgagaactcgaagcccttccagtggtaccagctcactccctgggaaaggggttgtcaagagagagtcaaagccggatgtcccatctgctcttcccgttccccttaaggaggtagctcccagcactcaaccaacctccccgcagagctcccttcctgaccctccgctgcagaggattgaggcttaattctgagctggccctttccagccaataaatcaactccagctccctc

SEQ ID NO: 124474 - DNA, 2121 bp, Homo sapiens
  Payload ID: 4443
  Gene Symbol: CYP21A2
  Gene Name: cytochrome P450, family 21, subfamily A, polypeptide 2
  ENST ID: ENST00000448478
  CDS Start-End: 126-1613
gggtcggtgggagggtacctgaaggtggggtcaagggaggccccaaaacagtctacacagcaggagggatggctggggctcttgagctataagtggcacctcagggccctgacgggcgtctcgccatgctgctcctgggcctgctgctgctgctgcccctgctggctggcgcccgcctgctgtggaactggtggaagctccggagcctccacctcccgcctcttgccccgggcttcttgcacttgctgcagcccgacctcccaatctatctgcttggcctgactcagaaattcgggcccatctacaggctccaccttgggctgcaagatgtggtggtgctgaactccaagaggaccattgaggaagccatggtcaaaaagtgggcagactttgctggcagacctgagccacttacctacaagctggtgtctaggaactacccggacctgtccttgggagactactccctgctctggaaagcccacaagaagctcacccgctcagccctgctgctgggcatccgtgactccatggagccagtggtggagcagctgacccaggagttctgtgagcgcatgagagcccagcccggcacccctgtggccattgaggaggaattctctctcctcacctgcagcatcatctgttacctcaccttcggagacaagatcaaggacgacaacttaatgcctgcctattacaaatgtatccaggaggtgttaaaaacctggagccactggtccatccaaattgtggacgtgattccctttctcaggttcttccccaatccaggtctccggaggctgaagcaggccatagagaagagggatcacatcgtggagatgcagctgaggcagcacaaggagagcctcgtggcaggccagtggagggacatgatggactacatgctccaaggggtggcgcagccgagcatggaagagggctctggacagctcctggaagggcacgtgcacatggctgcagtggacctcctgatcggtggcactgagaccacagcaaacaccctctcctgggccgtggtttttttgcttcaccaccctgagattcagcagcgactgcaggaggagctagaccacgaactgggccctggtgcctccagctcccgggtcccctacaaggaccgtgcacggctgcccttgctcaatgccaccatcgccgaggtgctgcgcctgcggcccgttgtgcccttagccttgccccaccgcaccacacggcccagcagcatctctggctacgacatccctgagggcacagtcatcattccgaacctccaaggcgcccacctggatgagacggtctgggagaggccacatgagttctggcctgatcgcttcctggagccaggcaagaactccagagctctggccttcggctgcggtgcccgcgtgtgcctgggcgagccgctggcgcgcctggagctcttcgtggtgctgacccgactgctgcaggccttcacgctgctgccctccggggacgccctgccctccctgcagcccctgccccactgcagtgtcatcctcaagatgcagcctttccaagtgcggctgcagccccgggggatgggggcccacagcccgggccagagccagtgatggggcaggaccgatgccagccgggtacctcagtttctcctttattgctcccgtacgaacccctcccctcccccctgtaaacacagtgctgcgagatcgctggcagagaaggcttcctccagcggctgggtggtgaaggaccctggctcttctctcggggcgacccctcagtgctcggcagtcatactggggtgcgagagaggtgggcagcagctcagcctccccccgctggggagcgaaagtttcttggtctcagcttcatttccgtgaagggcaccgagaactcgaagcccttccagtggtaccagctcactccctgggaaaggggttgtcaagagagagtcaaagccggatgtcccatctgctcctcccgttccccttaaggaggtggctcccagcactcaaccaacctccccgcagagctcccttcctgaccctctgccgcagaggattgaggcttaatcctgagctggtcctttccagccaataaatcaactccagctccctc

SEQ ID NO: 124475 - DNA, 842 bp, Homo sapiens
  Payload ID: 4443
  Gene Symbol: CYP21A2
  Gene Name: cytochrome P450, family 21, subfamily A, polypeptide 2
  ENST ID: ENST00000466779
  CDS Start-End: 97-423
gtcaagggaggccccaaaacagtctacacagcaggagggatggctggggctcttgagctataagtggcacctcagggccctgacgggcgtctcgccatgctgctcctgggcctgctgctgctgctgcccctgctggctggcgcccgcctgctgtggaactggtggaagctccggagcctccacctcccgcctcttgccccgggcttcttgcacctgctgcagcccgacctccccatctatctgcttggcctgactcagaaattcgggcccatctacaggctccaccttgggctgcaagatgtggtggtgctgaactccaagaggaccattgaggaagccatggtcaaaaagtgggcagactttgctggcagacctgagccacttacctcccccacctcctcctgcagacaagctggtgtctaggaactacccggacctgtccttgggagactactccctgctctggaaagcccacaagaagctcacccgctcagccctgctgctgggcatccgtgactccatggagccagtggtggagcagctgacccaggagttctgtgagcgcatgagagcccagcccggcacccctgtggccattgaggaggaattctctctcctcacctgcagcatcatctgttacctcaccttcggagacaagatcaaggacgacaacttaatgcctgcctattacaaatgtatccaggaggtgttaaaaacctggagccactggtccatccaaattgtggacgtgattccctttctcaggttcttccccaatccaggtctccggaggctgaagcaggccatagagaagagggatcacatcgtggagatgcagctga

SEQ ID NO: 124476 - DNA, 580 bp, Homo sapiens
  Payload ID: 4443
  Gene Symbol: CYP21A2
  Gene Name: cytochrome P450, family 21, subfamily A, polypeptide 2
  ENST ID: ENST00000469053
  CDS Start-End: 8-244
tctcgccatgctgctcctgggcctgctgctgctgctgcccctgctggctggcgcccgcctgctgtggaactggtggaagctccggagcctccacctcccgcctcttgccccgggcttcttgcacctgctgcagcccgacctccccatctatctgcttggcctgactcagaaattcgggcccatctacaggctccaccttgggctgcaagcccccacctcctcctgcagacaagctggtgtctaggaactacccggacctgtccttgggagactactccctgctctggaaagcccacaagaagctcacccgctcagccctgctgctgggcatccgtgactccatggagccagtggtggagcagctgacccaggagttctgtgagcgcatgagagcccagcccggcacccctgtggccattgaggaggaattctctctcctcacctgcagcatcatctgttacctcaccttcggagacaagatcaaggacgacaacttaatgcctgcctattacaaatgtatccaggaggtgttaaaaacctggagccactggtccatccaaattgtggacgtgattccctt

SEQ ID NO: 124477 - DNA, 579 bp, Homo sapiens
  Payload ID: 4443
  Gene Symbol: CYP21A2
  Gene Name: cytochrome P450, family 21, subfamily A, polypeptide 2
  ENST ID: ENST00000471671
  CDS Start-End: 9-579
gtctcgccatgctgctcctgggcctgctgctgctgctgcccctgctggctggcgcccgcctgctgtggaactggtggaagctccggagcctccacctcccgcctcttgccccgggcttcttgcacctgctgcagcccgacctccccatctatctgcttggcctgactcagaaattcgggcccatctacaggctccaccttgggctgcaagatgtggtggtgctgaactccaagaggaccattgaggaagccatggtcaaaaagtgggcagactttgctggcagacctgagccacttacctacaagctggtgtctaggaactacccggacctgtccttgggagactactccctgctctggaaagcccacaagaagctcacccgctcagccctgctgctgggcatccgtgactccatggagccagtggtggagcagctgacccaggagttctgtgagcgcatgagagcccagcccggcacccctgtggccattgaggaggaattctctctcctcacctgcagcatcatctgttacctcaccttcggagacaagatcaaggaggtgttaaaaacctggagcc

SEQ ID NO: 124478 - DNA, 599 bp, Homo sapiens
  Payload ID: 4443
  Gene Symbol: CYP21A2
  Gene Name: cytochrome P450, family 21, subfamily A, polypeptide 2
  ENST ID: ENST00000478281
  CDS Start-End: 42-599
agctataagtggcacctcagggccctgacgggcgtctcgccatgctgctcctgggcctgctgctgctgctgcccctgctggctggcgcccgcctgctgtggaactggtggaagctccggagcctccacctcccgcctcttgccccgggcttcttgcacctgctgcagcccgacctccccatctatctgcttggcctgactcagaaattcgggcccatctacaggctccaccttgggctgcaagatgtggtggtgctgaactccaagaggaccattgaggaagccatggtcaaaaagtgggcagactttgctggcagacctgagccacttacctttcccaccctccagcccccacctcctcctgcagacaagctggtgtctaggaactacccggacctgtccttgggagactactccctgctctggaaagcccacaagaagctcacccgctcagccctgctgctgggcatccgtgactccatggagccagtggtggagcagctgacccaggagttctgtgagcgcatgagagcccagcccggcacccctgtggccattgaggaggaattctctctcctcacctgcagcatcatctgttac

SEQ ID NO: 124479 - DNA, 3262 bp, Homo sapiens
  Payload ID: 4444
  Gene Symbol: CYP24A1
  Gene Name: cytochrome P450, family 24, subfamily A, polypeptide 1
  Uniprot ID: Q07973
  ENST ID: ENST00000216862
  CDS Start-End: 395-1939
ggaggaaacgcagcgccagcagcatctcatctaccctccttgacacctccccgtggctccagccagaccctagaggtcagccttgcggaccaacaggaggactcccagctttcccttttcaagaggtccccagacaccggccaccctcttccagcccctgcggccagtgcaaggaggcaccaatgctctgaggctgtcgcgtggtgcagcgtcgagcatcctcgccgaggtcctttctgctgcctgtcccgcctcaccccgctccatcacaccagctggccctctttgcttccttttcccagaatcgttaagccccgactcccactagcacctcgtaccaacctcgccccaccccatcctcctgccttcccgcgctccggtgtcccccgctgccatgagctcccccatcagcaagagccgctcgcttgccgccttcctgcagcagctgcgcagtccgaggcagcccccgagactggtgacatctacggcgtacacgtcccctcagccgcgagaggtgccagtctgcccgctgacagctggtggcgagactcagaacgcggccgccctgccgggccccaccagctggccactgctgggcagcctgctgcagattctctggaaagggggtctcaagaaacagcacgacaccctggtggagtaccacaagaagtatggcaagattttccgcatgaagttgggttcctttgagtcggtgcacctgggctcgccatgcctgctggaagcgctgtaccgcaccgagagcgcgtacccgcagcggctggagatcaaaccgtggaaggcctatcgcgactaccgcaaagaaggctacgggctgctgatcctggaaggggaagactggcagcgggtccggagtgcctttcaaaagaaactaatgaaaccaggggaagtgatgaagctggacaacaaaatcaatgaggtcttggccgattttatgggcagaatagatgagctctgtgatgaaagaggccacgttgaagacttgtacagcgaactgaacaaatggtcgtttgaaagtatctgcctcgtgttgtatgagaagagatttgggcttctccagaagaatgcaggggatgaagctgtgaacttcatcatggccatcaaaacaatgatgagcacgtttgggaggatgatggtcactccagtcgagctgcacaagagcctcaacaccaaggtctggcaggaccacactctggcctgggacaccattttcaaatcagtcaaagcttgtatcgacaaccggttagagaagtattctcagcagcctagtgcagatttcctttgtgacatttatcaccagaatcggctttcaaagaaagaattgtatgctgctgtcacagagctccagctggctgcggtggaaacgacagcaaacagtctaatgtggattctctacaatttatcccgtaatccccaagtgcaacaaaagcttcttaaggaaattcaaagtgtattacctgagaatcaggtgccacgggcagaagatttgaggaatatgccgtatttaaaagcctgtctgaaagaatctatgaggcttacgccgagtgtaccatttacaactcggactcttgacaaggcaacagttctgggtgaatatgctttacccaaaggaacagtgctcatgctaaatacccaggtgttgggatccagtgaagacaattttgaagattcaagtcagtttagacctgaacgttggcttcaggagaaggaaaaaattaatccttttgcgcatcttccatttggcgttggaaaaagaatgtgcattggtcgccgattagcagagcttcaactgcatttggctctttgttggattgtccgcaaatacgacatccaggccacagacaatgagcctgttgagatgctacactcaggcaccctggtgcccagccgggaactccccatcgcgttttgccagcgataatacgcctcagatggtggtatttgctaacatcatatccaactcagggaagcggactgagtgctgggatccaaggcattctacagggttcactgctggtttacacttcacctgtgtcagcaccatcttcaggtgcttagaatggcctgggagcctgttctgtcttgcatcttccatgacatgaaagggaggctggcacttgtcagtcaggtagaggttacaaaccgtttcaggccctgcctaccacattcactgtttgaatctttaattcccaagaataagtttacatttcacaatgaatgacctacaacagctaaattttctggggctgggagtaatactgacaatccatttactgtagctctgcttaatgtactacttaggaaaatgtccctgcttaataatgtaagccaagctaaatgatggttaaagttatcaggcctcccatgaaattgcgttcttcctgcattgaaataaaaacattattgggaaactagagaacacctctatttttaaaaggactttaacgaagtcaaacaacttataagactagtgattcactggggcattattttgttagaggaccttaaaattgtttattttttaaatgtgattcctttatggcattagggtaaagatgaagcaataatttttaaattgtgtatgtgcatatgaagcacagacatgcatgtgtgtgtgtgtctgtgtgtgtgtgtccgtgtatgtgtgtgtgggttctaatggtaatttgcctcagtcatttttttaatatttgcagtacttgatttaggatctgtggtgcagggcaatgtttcaaagtttagtcacagcttaaaaacattcagtgtgactttaatattataaaatgatttcccatgccataatttttctgtctattaaatgggacaagtgtaaagcatgcaaaagttagagatctgttatataacatttgttttgtgatttgaactcctaggaaaaatatgatttcataaatgtaaaatgcacagaaatgcatgcaatacttataagacttaaaaattgtgtttacagatggtttatttgtgcatatttttactactgcttttcctaaatgcatactgtatataattctgtgtatttgataaatatttcttcctacattatatttttagaatatttcagaaatatacatttatgtctttatattgtaataaatatgtacatatctaggtatatgctttctctctgctgtgaaattatttttagaattataaattcacgtcttgtcagatttcatctgtataccttcaaattctctgaaagtaaaaataaaagtttttaaatatt

SEQ ID NO: 124480 - DNA, 1438 bp, Homo sapiens
  Payload ID: 4444
  Gene Symbol: CYP24A1
  Gene Name: cytochrome P450, family 24, subfamily A, polypeptide 1
  Uniprot ID: Q07973
  ENST ID: ENST00000395954
  CDS Start-End: 261-1379
ggacacctcaaaatccctgaacccaaattatctggacttcaactttttggtgcaatctttgactaggaggaaaggtgctttttcatcctattgtcaaactattgtcaaaagatgatcactattttatcccaaatattctgatgctaatattctctggctatttcttggcatgattctcagtgtttgtttgattttatggttcctgaagttgcagctggagtatttctgcatctccttcttttcttttcagtgtgctctaaatgtattcctgcttctctcacagggaaggggaagactggcagcgggtccggagtgcctttcaaaagaaactaatgaaaccaggggaagtgatgaagctggacaacaaaatcaatgaggtcttggccgattttatgggcagaatagatgagctctgtgatgaaagaggccacgttgaagacttgtacagcgaactgaacaaatggtcgtttgaaagtatctgcctcgtgttgtatgagaagagatttgggcttctccagaagaatgcaggggatgaagctgtgaacttcatcatggccatcaaaacaatgatgagcacgtttgggaggatgatggtcactccagtcgagctgcacaagagcctcaacaccaaggtctggcaggaccacactctggcctgggacaccattttcaaatcagtcaaagcttgtatcgacaaccggttagagaagtattctcagcagcctagtgcagatttcctttgtgacatttatcaccagaatcggctttcaaagaaagaattgtatgctgctgtcacagagctccagctggctgcggtggaaacgacagcaaacagtctaatgtggattctctacaatttatcccgtaatccccaagtgcaacaaaagcttcttaaggaaattcaaagtgtattacctgagaatcaggtgccacgggcagaagatttgaggaatatgccgtatttaaaagcctgtctgaaagaatctatgaggcttacgccgagtgtaccatttacaactcggactcttgacaaggcaacagttctgggtgaatatgctttacccaaaggaacagtgctcatgctaaatacccaggtgttgggatccagtgaagacaattttgaagattcaagtcagtttagacctgaacgttggcttcaggagaaggaaaaaattaatccttttgcgcatcttccatttggcgttggaaaaagaatgtgcattggtcgccgattagcagagcttcaactgcatttggctctttgttggattgtccgcaaatacgacatccaggccacagacaatgagcctgttgagatgctacactcaggcaccctggtgcccagccgggaactccccatcgcgttttgccagcgataatacgcctcagatggtggtatttgctaacatcatatccaactcagggaagcggactgagt

SEQ ID NO: 124481 - DNA, 2227 bp, Homo sapiens
  Payload ID: 4444
  Gene Symbol: CYP24A1
  Gene Name: cytochrome P450, family 24, subfamily A, polypeptide 1
  Uniprot ID: Q07973
  ENST ID: ENST00000395955
  CDS Start-End: 71-1417
ctagcacctcgtaccaacctcgccccaccccatcctcctgccttcccgcgctccggtgtcccccgctgccatgagctcccccatcagcaagagccgctcgcttgccgccttcctgcagcagctgcgcagtccgaggcagcccccgagactggtgacatctacggcgtacacgtcccctcagccgcgagaggtgccagtctgcccgctgacagctggtggcgagactcagaacgcggccgccctgccgggccccaccagctggccactgctgggcagcctgctgcagattctctggaaagggggtctcaagaaacagcacgacaccctggtggagtaccacaagaagtatggcaagattttccgcatgaagttgggttcctttgagtcggtgcacctgggctcgccatgcctgctggaagcgctgtaccgcaccgagagcgcgtacccgcagcggctggagatcaaaccgtggaaggcctatcgcgactaccgcaaagaaggctacgggctgctgatcctggaaggggaagactggcagcgggtccggagtgcctttcaaaagaaactaatgaaaccaggggaagtgatgaagctggacaacaaaatcaatgaggtcttggccgattttatgggcagaatagatgagctctgtgatgaaagaggccacgttgaagacttgtacagcgaactgaacaaatggtcgtttgaaagtatctgcctcgtgttgtatgagaagagatttgggcttctccagaagaatgcaggggatgaagctgtgaacttcatcatggccatcaaaacaatgatgagcacgtttgggaggatgatggtcactccagtcgagctgcacaagagcctcaacaccaaggtctggcaggaccacactctggcctgggacaccattttcaaatcagtcaaagcttgtatcgacaaccggttagagaagtattctcagcagcctagtgcagatttcctttgtgacatttatcaccagaatcggctttcaaagaaagaattgtatgctgctgtcacagagctccagctggctgcggtggaaacgacagcaaacagtctaatgtggattctctacaatttatcccgtaatccccaagtgcaacaaaagcttcttaaggaaattcaaagtgtattacctgagaatcaggtgccacgggcagaagatttgaggaatatgccgtatttaaaagcctgtctgaaagaatctatgaggcttacgccgagtgtaccatttacaactcggactcttgacaaggcaacagttctgggtgaatatgctttacccaaaggaattgtccgcaaatacgacatccaggccacagacaatgagcctgttgagatgctacactcaggcaccctggtgcccagccgggaactccccatcgcgttttgccagcgataatacgcctcagatggtggtatttgctaacatcatatccaactcagggaagcggactgagtgctgggatccaaggcattctacagggttcactgctggtttacacttcacctgtgtcagcaccatcttcaggtgcttagaatggcctgggagcctgttctgtcttgcatcttccatgacatgaaagggaggctggcacttgtcagtcaggtagaggttacaaaccgtttcaggccctgcctaccacattcactgtttgaatctttaattcccaagaataagtttacatttcacaatgaatgacctacaacagctaaattttctggggctgggagtaatactgacaatccatttactgtagctctgcttaatgtactacttaggaaaatgtccctgcttaataatgtaagccaagctaaatgatggttaaagttatcaggcctcccatgaaattgcgttcttcctgcattgaaataaaaacattattgggaaactagagaacacctctatttttaaaaggactttaacgaagtcaaacaacttataagactagtgattcactggggcattattttgttagaggaccttaaaattgtttattttttaaatgtgattcctttatggcattagggtaaagatgaagcaataatttttaaattgtgtatgtgcatatgaagcacagacatgcatgtgtgtgtgtgtctgtgtgtgtgtgtccgtgtatgtgtgtgtgggttctaatggtaatttgcctcagtcatttttttaatatttgcagtacttgatttaggatctgtggtgcagggcaatgtt

SEQ ID NO: 124482 - DNA, 2125 bp, Homo sapiens
  Payload ID: 4445
  Gene Symbol: CYP26A1
  Gene Name: cytochrome P450, family 26, subfamily A, polypeptide 1
  Uniprot ID: O43174
  ENST ID: ENST00000224356
  CDS Start-End: 46-1539
agcgctggcggcggcggcaggtggcgcgggaggtcgcggcgcgccatggggctcccggcgctgctggccagtgcgctctgcaccttcgtgctgccgctgctgctcttcctggctgcgatcaagctctgggacctgtactgcgtgagcggccgcgaccgcagttgtgccctcccattgccccccgggactatgggcttccccttctttggggaaaccttgcagatggtactgcagcggaggaagttcctgcagatgaagcgcaggaaatacggcttcatctacaagacgcatctgttcgggcggcccaccgtacgggtgatgggcgcggacaatgtgcggcgcatcttgctcggagagcaccggctggtgtcggtccactggccagcgtcggtgcgcaccattctgggatctggctgcctctctaacctgcacgactcctcgcacaagcagcgcaagaaggtgattatgcgggccttcagccgcgaggcactcgaatgctacgtgccggtgatcaccgaggaagtgggcagcagcctggagcagtggctgagctgcggcgagcgcggcctcctggtctaccccgaggtgaagcgcctcatgttccgaatcgccatgcgcatcctactgggctgcgaaccccaactggcgggcgacggggactccgagcagcagcttgtggaggccttcgaggaaatgacccgcaatctcttctcgctgcccatcgacgtgcccttcagcgggctgtaccggggcatgaaggcgcggaacctcattcacgcgcgcatcgagcagaacattcgcgccaagatctgcgggctgcgggcatccgaggcgggccagggctgcaaagacgcgctgcagctgttgatcgagcactcgtgggagaggggagagcggctggacatgcaggcactaaagcaatcttcaaccgaactcctctttggaggacacgaaaccacggccagtgcagccacatctctgatcacttacctggggctctacccacatgttctccagaaagtgcgagaagagctgaagagtaagggtttactttgcaagagcaatcaagacaacaagttggacatggaaattttggaacaacttaaatacatcgggtgtgttattaaggagacccttcgactgaatcccccagttccaggagggtttcgggttgctctgaagacttttgaattaaatggataccagattcccaagggctggaatgttatctacagtatctgtgatactcatgatgtggcagagatcttcaccaacaaggaagaatttaatcctgaccgattcatgctgcctcacccagaggatgcatccaggttcagcttcattccatttggaggaggccttaggagctgtgtaggcaaagaatttgcaaaaattcttctcaaaatatttacagtggagctggccaggcattgtgactggcagcttctaaatggacctcctacaatgaaaaccagtcccaccgtgtatcctgtggacaatctccctgcaagattcacccatttccatggggaaatctgatgagcttgaatgttcaaacctgagacttattggaagtgtacatatgagtttttaaggagtgttgtgttgactttatatttaatttctaaatgtatattataatatttatgtgttttgactatactaccacaatctttaaatattaaaataatgaatttgtatcatttccaaataaagtaaaatttgaaggtacttttctggtattttaagattcctgttgggtaaaactcaccagtttagtattttcttagtgtatttaaccagattttacaatgcctacctggacttatttgtcatctttgcatctgttttctgtgagaagaaatcttagctgttttttatgttaacagttattagaaaatatatgtctgtgtgtgttattccagacgtatctctgtaaattcttctacagtcacttagattccctatttggaaaattgatccaagttaatttaatttttttttggtttgctgtactttagggaaagatgaacctgaaaaggtaacactgagaactgtcactctaacctctccagcttatctaacatgtcataaacataataaatctgtgttgtccaatagtgcc

SEQ ID NO: 124483 - DNA, 2245 bp, Homo sapiens
  Payload ID: 4445
  Gene Symbol: CYP26A1
  Gene Name: cytochrome P450, family 26, subfamily A, polypeptide 1
  Uniprot ID: O43174
  ENST ID: ENST00000371531
  CDS Start-End: 379-1665
cggcacctggaaatggaaagccagtgaaggctgctttgggccggggcagcgggtgggaccgggcgggagggattccaaagagaccgccgggaaggctagagcttggaattccggctcctcggagtcctggccctcccccaccgccgcctcggagctcagcacaccttggatgggggaggcgggcagctcctagccccgcaccccaggaggcgcgctcggagggaagccgccaccgcgccgcctctgcctcggcgcggaacaaacggttaaagattttgggcagcgcctcgcggggggaggagccaggggcccaatccgcaattaaagatgaactttgggtgaactaattgtctgaccaagcggaggaagttcctgcagatgaagcgcaggaaatacggcttcatctacaagacgcatctgttcgggcggcccaccgtacgggtgatgggcgcggacaatgtgcggcgcatcttgctcggagagcaccggctggtgtcggtccactggccagcgtcggtgcgcaccattctgggatctggctgcctctctaacctgcacgactcctcgcacaagcagcgcaagaaggtgattatgcgggccttcagccgcgaggcactcgaatgctacgtgccggtgatcaccgaggaagtgggcagcagcctggagcagtggctgagctgcggcgagcgcggcctcctggtctaccccgaggtgaagcgcctcatgttccgaatcgccatgcgcatcctactgggctgcgaaccccaactggcgggcgacggggactccgagcagcagcttgtggaggccttcgaggaaatgacccgcaatctcttctcgctgcccatcgacgtgcccttcagcgggctgtaccggggcatgaaggcgcggaacctcattcacgcgcgcatcgagcagaacattcgcgccaagatctgcgggctgcgggcatccgaggcgggccagggctgcaaagacgcgctgcagctgttgatcgagcactcgtgggagaggggagagcggctggacatgcaggcactaaagcaatcttcaaccgaactcctctttggaggacacgaaaccacggccagtgcagccacatctctgatcacttacctggggctctacccacatgttctccagaaagtgcgagaagagctgaagagtaagggtttactttgcaagagcaatcaagacaacaagttggacatggaaattttggaacaacttaaatacatcgggtgtgttattaaggagacccttcgactgaatcccccagttccaggagggtttcgggttgctctgaagacttttgaattaaatggataccagattcccaagggctggaatgttatctacagtatctgtgatactcatgatgtggcagagatcttcaccaacaaggaagaatttaatcctgaccgattcatgctgcctcacccagaggatgcatccaggttcagcttcattccatttggaggaggccttaggagctgtgtaggcaaagaatttgcaaaaattcttctcaaaatatttacagtggagctggccaggcattgtgactggcagcttctaaatggacctcctacaatgaaaaccagtcccaccgtgtatcctgtggacaatctccctgcaagattcacccatttccatggggaaatctgatgagcttgaatgttcaaacctgagacttattggaagtgtacatatgagtttttaaggagtgttgtgttgactttatatttaatttctaaatgtatattataatatttatgtgttttgactatactaccacaatctttaaatattaaaataatgaatttgtatcatttccaaataaagtaaaatttgaaggtacttttctggtattttaagattcctgttgggtaaaactcaccagtttagtattttcttagtgtatttaaccagattttacaatgcctacctggacttatttgtcatctttgcatctgttttctgtgagaagaaatcttagctgttttttatgttaacagttattagaaaatatatgtctgtgtgtgttattccagacgtatctctgtaaattcttctacagtcacttagattccctatttggaaaattgatccaagttaatttaatttttttttggtttgctgtactttagggaaagatgaacctgaaaaggtaacactgagaactgtcactctaacctctccagcttatctaacatgtcataaacataataaatctgtgttgtccaat

SEQ ID NO: 124484 - DNA, 1456 bp, Homo sapiens
  Payload ID: 4445
  Gene Symbol: CYP26A1
  Gene Name: cytochrome P450, family 26, subfamily A, polypeptide 1
  ENST ID: ENST00000624589
  CDS Start-End: 15-785
ggaagttcctgcagatgaagcgcaggaaatacggcttcatctacaagacgcatctgttcgggcggcccaccgtacgggtgatgggcgcggacaatgtgcggcgcatcttgctcggagagcaccggctggtgtcggtccactggccagcgtcggtgcgcaccattctgggatctggctgcctctctaacctgcacgactcctcgcacaagcagcgcaagaagccgcgaggcactcgaatgctacgtgccggtgatcaccgaggaagtgggcagcagcctggagcagtggctgagctgcggcgagcgcggcctcctggtctaccccgaggtgaagcgcctcatgttccgaatcgccatgcgcatcctactgggctgcgaaccccaactggcgggcgacggggactccgagcagcagcttgtggaggccttcgaggaaatgacccgcaatctcttctcgctgcccatcgacgtgcccttcagcgggctgtaccggggcatgaaggcgcggaacctcattcacgcgcgcatcgagcagaacattcgcgccaagatctgcgggctgcgggcatccgaggcgggccagggctgcaaagacgcgctgcagctgttgatcgagcactcgtgggagaggggagagcggctggacatgcaggcactaaagcaatcttcaaccgaactcctctttggaggacacgaaaccacggccagtgcagccacatctctgatcacttacctggggctctacccacatgttctccagaaagtgcgagaagagctgaagagtaagggtttactttgcaagagcaatcaagacaacaagttggacatggaaattttggaacaacttaaatacatcgggtgtgttattaaggagacccttcgactgaatcccccagttccaggagggtttcgggttgctctgaagacttttgaattaaatggataccagattcccaagggctggaatgttatctacagtatctgtgatactcatgatgtggcagagatcttcaccaacaaggaagaatttaatcctgaccgattcatgctgcctcacccagaggatgcatccaggttcagcttcattccatttggaggaggccttaggagctgtgtaggcaaagaatttgcaaaaattcttctcaaaatatttacagtggagctggccaggcattgtgactggcagcttctaaatggacctcctacaatgaaaaccagtcccaccgtgtatcctgtggacaatctccctgcaagattcacccatttccatggggaaatctgatgagcttgaatgttcaaacctgagacttattggaagtgtacatatgagtttttaaggagtgttgtgttgactttatatttaatttctaaatgtatattataatatttatgtgttttgactatactaccacaatctttaaatattaaaataatgaatttgtatcatttccaaataa

SEQ ID NO: 124485 - DNA, 4732 bp, Homo sapiens
  Payload ID: 4446
  Gene Symbol: CYP26B1
  Gene Name: cytochrome P450, family 26, subfamily B, polypeptide 1
  Uniprot ID: Q9NR63
  ENST ID: ENST00000001146
  CDS Start-End: 205-1743
aggcaatttttttcctccctctctccgctcccctcgcagcctccactccctttcccttggccccttcctccttctctgtttcggctggaggtgccaggacccccggccgcagcctcccctcccccgccgctccggtcccctcccgtcgggccctcccctcccccgccgcggccggcacagccaatcccccgagcggccgccaacatgctctttgagggcttggatctggtgtcggcgctggccaccctcgccgcgtgcctggtgtccgtgacgctgctgctggccgtgtcgcagcagctgtggcagctgcgctgggccgccactcgcgacaagagctgcaagctgcccatccccaagggatccatgggcttcccgctcatcggagagaccggccactggctgctgcagggttctggcttccagtcgtcgcggagggagaagtatggcaacgtgttcaagacgcatttgttggggcggccgctgatacgcgtgaccggcgcggagaacgtgcgcaagatcctcatgggcgagcaccacctcgtgagcaccgagtggcctcgcagcacccgcatgttgctgggccccaacacggtgtccaattccattggcgacatccaccgcaacaagcgcaaggtcttctccaagatcttcagccacgaggccctggagagttacctgcccaagatccagctggtgatccaggacacactgcgcgcctggagcagccaccccgaggccatcaacgtgtaccaggaggcgcagaagctgaccttccgcatggccatccgggtgctgctgggcttcagcatccctgaggaggaccttgggcacctctttgaggtctaccagcagtttgtggacaatgtcttctccctgcctgtcgacctgcccttcagtggctaccggcggggcattcaggctcggcagatcctgcagaaggggctggagaaggccatccgggagaagctgcagtgcacacagggcaaggactacttggacgccctggacctcctcattgagagcagcaaggagcacgggaaggagatgaccatgcaggagctgaaggacgggaccctggagctgatctttgcggcctatgccaccacggccagcgccagcacctcactcatcatgcagctgctgaagcaccccactgtgctggagaagctgcgggatgagctgcgggctcatggcatcctgcacagtggcggctgcccctgcgagggcacactgcgcctggacacgctcagtgggctgcgctacctggactgcgtcatcaaggaggtcatgcgcctgttcacgcccatttccggcggctaccgcactgtgctgcagaccttcgagcttgatggtttccagatccccaaaggctggagtgtcatgtatagcatccgggacacccatgacacagcgcccgtgttcaaagacgtgaacgtgttcgaccccgatcgcttcagccaggcgcggagcgaggacaaggatggccgcttccattacctcccgttcggtggcggtgtccggacctgcctgggcaagcacctggccaagctgttcctgaaggtgctggcggtggagctggctagcaccagccgctttgagctggccacacggaccttcccccgcatcaccttggtccccgtcctgcaccccgtggatggcctcagcgtcaagttctttggcctggactccaaccagaacgagatcctgccggagacggaggccatgctgagcgccacagtctaacccaagacccacccgcctcagcccagcccaggcagcggggtggtggttgtgggaggtagaaacctgtgtgtgggagggggccggaacggggagggcgagtggcccccatacttgccctcccttgctccccctccctggcaaaccctacccaaagccagtgggccccattcctagggctgggctccccttctggctccagcttccctccagccactccccatttaccatcagctcagcccctgggaagggcgtggcaggggctctgcatgcccgtgacagtgttaggtgtcagcgcgtgctacagtgtttttgtgatgttctgaactgctcccttccctccgttcctttcggacccttttagctggggttgggggacgggaagagccgtgcccccttgggcgcactcttcagcgtctcctcctcctgcgcccccactgcgtctgcccaggaacagcatcctgggtagcagaacaggagtcaaccttggcggggcgggggctgcgtccaacctggagattgcccttccctatgccacggttcccaccctccctcaccagtttggacaatttgaaattacctattgctgctacttgttctgtcctctgaccttggggcaaaggagccccaggccctgtctccccagcatcctccctggtggccctgggcaggtgcactgacacccccaccttcccatcccctgctgaaccaggccctgttacacacagccgcctaaggcccgcggctcatgtgctgcccgcccccatatttattcactgatagagaatcttggggatgctggggtctggagtgaacatctcctccccttcatgccctagcctgtgttctagctgtcctggcgagacttctgtgagtgaagaggaaggggtctctggtcaaacccagcccccagggcctagggttgaaagccttccccggctccgggcattatttgggtttaatctcggagcctcactcctggactgaagtccggtgcctctgccttatccctggtggagatggaatgtggcccattgcctcctccctctcctgtcaaaaaccctgatcaggtagatttggaggcggccacgatttcctgtttggcccctgttcaccccagtgcactggccctgactccaggcgtgagtatggggaaggatacgggttcttctgacggggagcaagggcctccgtcttcccttccttaactctccccctttgccctccgccctgaaaaaggtgtccttgaagtcccttccacctctatgccactgtctgcttagcccagctcaggggtggggaagaggcgaaagcgtgggggaggtgagcgcagcggcagttctgcctcggagctgattgcagggccctgtgtggtctccggacagctgcgggaaggctgccgcagctgaagctgaagaggcggctacgtgcggtttgtcagggggattgggttgaaaactggccagtcgggatgactgggtgaaagaggagtagctcctgccactggcgttttgagtgttggcaatttgggatgcctcctggggaaggtttccgggcgtttggtgagtctctagatttttccttgctttctgtgtttattggtttttgatgttgtaaaagcaatgaatcccctttacaagaaaatcgaaaacacagaagaatgaaggacatgccagtccccgatcgctgctgtgagcacctcagtggctccctcagaccagatcccgtaggcagccccacagaccgaccctgaccccactcacagccaccctgaagatagactataggaacgggcccataccacacagactgctctccaatccctgagtctcagatgtttcatttatttcctacttttccactactaaaaaacagtgtggaatagacattattggcaaaattgctcatccctaatcctgaaaaacaggccagaatgggtaaagacttgtcaaagcttgcaacatagctacatggtgcacccggacctgtaccccctccccccaacacaaaaccagtgtctgggaggttcattttcctttaaactgatccagctggccctgaaccaattgtttttgactgagtatctaggagagcagtaagtggaacttcagacaagcccactgggtctggtccaggtgaggggcagggggcatggggctgggaggtctcaggggccttccctgggggtggccagcctggtagggggcagagaaggaaaagctgaggggggtccctgtgagggaggaaagaaggatcatttgccccgctgggtctcaaaggcagtgagaagagagctgaagaaagctctggctggctgacaggatccctgtgttgtaattggtccctcctttcagctctctagtgagatgcccgtgtctgtgcgtgtgcgtgtgtgtttcatacagctagcattagatgggtgatgtttcttacttatcatccctaactattgcaacttgaccttaaaaagacaaaaccccacaaaactcttcctgccacgggcttgcagattgaagcactttcgatgttgggcgctggcgtttgtgttctgggcaccaccgtgaccctgcccagatggctataatattattttatacacaaaccttttttttcataaatgttataattttgtgtctgtctttataaactattataagtactatttttgttataattcaaaatagatatttagtataaagtttttgctgttaaatatttgttatttagtaaaatatgaattttgctctattgtaaacatggttcaaaatattaatatgtttttatcacagtcgttttaatattgaaaaagcacttgtgtgttttgttttgatatgaaactggtaccgtgtgagtgtttttgctgtcgtggttttaatctgtatataatattccatgttgcatattaaaaacatgaatgttgtgcattttgtgattttggaaatactcaatgtggctcttctataggcttctagaataaaccgtggggacccgc

SEQ ID NO: 124486 - DNA, 4025 bp, Homo sapiens
  Payload ID: 4446
  Gene Symbol: CYP26B1
  Gene Name: cytochrome P450, family 26, subfamily B, polypeptide 1
  ENST ID: ENST00000412253
  CDS Start-End: 226-1191
tccctgagcggtggcagaccggggaggtggggaggcggactccctccgtcaggggccgcatgtgctgtggtcttggcgaaggtcttctccaagatcttcagccacgaggccctggagagttacctgcccaagatccagctggtgatccaggacacactgcgcgcctggagcagccaccccgaggccatcaacgtgtaccaggaggcgcagaagctgaccttccgcatggccatccgggtgctgctgggcttcagcatccctgaggaggaccttgggcacctctttgaggtctaccagcagtttgtggacaatgtcttctccctgcctgtcgacctgcccttcagtggctaccggcggggcattcaggctcggcagatcctgcagaaggggctggagaaggccatccgggagaagctgcagtgcacacagggcaaggactacttggacgccctggacctcctcattgagagcagcaaggagcacgggaaggagatgaccatgcaggagctgaaggacgggaccctggagctgatctttgcggcctatgccaccacggccagcgccagcacctcactcatcatgcagctgctgaagcaccccactgtgctggagaagctgcgggatgagctgcgggctcatggcatcctgcacagtggcggctgcccctgcgagggcacactgcgcctggacacgctcagtgggctgcgctacctggactgcgtcatcaaggaggtcatgcgcctgttcacgcccatttccggcggctaccgcactgtgctgcagaccttcgagcttgatggtttccagatccccaaaggctggagtgtcatgtatagcatccgggacacccatgacacagcgcccgtgttcaaagacgtgaacgtgttcgaccccgatcgcttcagccaggcgcggagcgaggacaaggatggccgcttccattacctcccgttcggtggcggtgtccggacctgcctgggcaagcacctggccaagctgttcctgaaggtgctggcggtggagctggctagcaccagccgctttgagctggccacacggaccttcccccgcatcaccttggtccccgtcctgcaccccgtggatggcctcagcgtcaagttctttggcctggactccaaccagaacgagatcctgccggagacggaggccatgctgagcgccacagtctaacccaagacccacccgcctcagcccagcccaggcagcggggtggtggttgtgggaggtagaaacctgtgtgtgggagggggccggaacggggagggcgagtggcccccatacttgccctcccttgctccccctccctggcaaaccctacccaaagccagtgggccccattcctagggctgggctccccttctggctccagcttccctccagccactccccatttaccatcagctcagcccctgggaagggcgtggcaggggctctgcatgcccgtgacagtgttaggtgtcagcgcgtgctacagtgtttttgtgatgttctgaactgctcccttccctccgttcctttcggacccttttagctggggttgggggacgggaagagccgtgcccccttgggcgcactcttcagcgtctcctcctcctgcgcccccactgcgtctgcccaggaacagcatcctgggtagcagaacaggagtcaaccttggcggggcgggggctgcgtccaacctggagattgcccttccctatgccacggttcccaccctccctcaccagtttggacaatttgaaattacctattgctgctacttgttctgtcctctgaccttggggcaaaggagccccaggccctgtctccccagcatcctccctggtggccctgggcaggtgcactgacacccccaccttcccatcccctgctgaaccaggccctgttacacacagccgcctaaggcccgcggctcatgtgctgcccgcccccatatttattcactgatagagaatcttggggatgctggggtctggagtgaacatctcctccccttcatgccctagcctgtgttctagctgtcctggcgagacttctgtgagtgaagaggaaggggtctctggtcaaacccagcccccagggcctagggttgaaagccttccccggctccgggcattatttgggtttaatctcggagcctcactcctggactgaagtccggtgcctctgccttatccctggtggagatggaatgtggcccattgcctcctccctctcctgtcaaaaaccctgatcaggtagatttggaggcggccacgatttcctgtttggcccctgttcaccccagtgcactggccctgactccaggcgtgagtatggggaaggatacgggttcttctgacggggagcaagggcctccgtcttcccttccttaactctccccctttgccctccgccctgaaaaaggtgtccttgaagtcccttccacctctatgccactgtctgcttagcccagctcaggggtggggaagaggcgaaagcgtgggggaggtgagcgcagcggcagttctgcctcggagctgattgcagggccctgtgtggtctccggacagctgcgggaaggctgccgcagctgaagctgaagaggcggctacgtgcggtttgtcagggggattgggttgaaaactggccagtcgggatgactgggtgaaagaggagtagctcctgccactggcgttttgagtgttggcaatttgggatgcctcctggggaaggtttccgggcgtttggtgagtctctagatttttccttgctttctgtgtttattggtttttgatgttgtaaaagcaatgaatcccctttacaagaaaatcgaaaacacagaagaatgaaggacatgccagtccccgatcgctgctgtgagcacctcagtggctccctcagaccagatcccgtaggcagccccacagaccgaccctgaccccactcacagccaccctgaagatagactataggaacgggcccataccacacagactgctctccaatccctgagtctcagatgtttcatttatttcctacttttccactactaaaaaacagtgtggaatagacattattggcaaaattgctcatccctaatcctgaaaaacaggccagaatgggtaaagacttgtcaaagcttgcaacatagctacatggtgcacccggacctgtaccccctccccccaacacaaaaccagtgtctgggaggttcattttcctttaaactgatccagctggccctgaaccaattgtttttgactgagtatctaggagagcagtaagtggaacttcagacaagcccactgggtctggtccaggtgaggggcagggggcatggggctgggaggtctcaggggccttccctgggggtggccagcctggtagggggcagagaaggaaaagctgaggggggtccctgtgagggaggaaagaaggatcatttgccccgctgggtctcaaaggcagtgagaagagagctgaagaaagctctggctggctgacaggatccctgtgttgtaattggtccctcctttcagctctctagtgagatgcccgtgtctgtgcgtgtgcgtgtgtgtttcatacagctagcattagatgggtgatgtttcttacttatcatccctaactattgcaacttgaccttaaaaagacaaaaccccacaaaactcttcctgccacgggcttgcagattgaagcactttcgatgttgggcgctggcgtttgtgttctgggcaccaccgtgaccctgcccagatggctataatattattttatacacaaaccttttttttcataaatgttataattttgtgtctgtctttataaactattataagtactatttttgttataattcaaaatagatatttagtataaagtttttgctgttaaatatttgttatttagtaaaatatgaattttgctctattgtaaacatggttcaaaatattaatatgtttttatcacagtcgttttaatattgaaaaagcacttgtgtgttttgttttgatatgaaa

SEQ ID NO: 124487 - DNA, 567 bp, Homo sapiens
  Payload ID: 4446
  Gene Symbol: CYP26B1
  Gene Name: cytochrome P450, family 26, subfamily B, polypeptide 1
  ENST ID: ENST00000461519
  CDS Start-End: 50-567
gcattatttattatcctctaggccctacttcgcagttcttgtgcacgctatgaaaaataaaacctgcgtgctcgtctgtgtgagtgtgtttggtggggagagggggcaggtgactgtaccccgggttggggtccgccgcccctccctcgcgggccctctgcagaagtgcaccctgagagagacccgggtgtggctcccgcagggttctggcttccagtcgtcgcggagggagaagtatggcaacgtgttcaagacgcatttgttggggcggccgctgatacgcgtgaccggcgcggagaacgtgcgcaagatcctcatgggcgagcaccacctcgtgagcaccgagtggcctcgcagcacccgcatgttgctgggccccaacacggtgtccaattccattggcgacatccaccgcaacaagcgcaaggtcttctccaagatcttcagccacgaggccctggagagttacctgcccaagatccagctggtgatccaggacacactgcgcgcctggagcagccaccccgaggccatcaacgtgtaccaggaggcgcagaagctgacctt

SEQ ID NO: 124488 - DNA, 574 bp, Homo sapiens
  Payload ID: 4446
  Gene Symbol: CYP26B1
  Gene Name: cytochrome P450, family 26, subfamily B, polypeptide 1
  ENST ID: ENST00000474509
  CDS Start-End: 29-574
acagccaatcccccgagcggccgccaacatgctctttgagggcttggatctggtgtcggcgctggccaccctcgccgcgtgcctggtgtccgtgacgctgctgctggccgtgtcgcagcagctgtggcagctgcgctgggccgccactcgcgacaagagctgcaagctgcccatccccaagggatccatgggcttcccgctcatcggagagaccggccactggctgctgcaggtcttctccaagatcttcagccacgaggccctggagagttacctgcccaagatccagctggtgatccaggacacactgcgcgcctggagcagccaccccgaggccatcaacgtgtaccaggaggcgcagaagctgaccttccgcatggccatccgggtgctgctgggcttcagcatccctgaggaggaccttgggcacctctttgaggtctaccagcagtttgtggacaatgtcttctccctgcctgtcgacctgcccttcagtggctaccggcggggcattcaggctcggcagatcctgcagaaggggctggagaaggccatccgggagaagctgcagtgc

SEQ ID NO: 124489 - DNA, 4331 bp, Homo sapiens
  Payload ID: 4446
  Gene Symbol: CYP26B1
  Gene Name: cytochrome P450, family 26, subfamily B, polypeptide 1
  Uniprot ID: Q9NR63
  ENST ID: ENST00000546307
  CDS Start-End: 29-1342
acagccaatcccccgagcggccgccaacatgctctttgagggcttggatctggtgtcggcgctggccaccctcgccgcgtgcctggtgtccgtgacgctgctgctggccgtgtcgcagcagctgtggcagctgcgctgggccgccactcgcgacaagagctgcaagctgcccatccccaagggatccatgggcttcccgctcatcggagagaccggccactggctgctgcaggtcttctccaagatcttcagccacgaggccctggagagttacctgcccaagatccagctggtgatccaggacacactgcgcgcctggagcagccaccccgaggccatcaacgtgtaccaggaggcgcagaagctgaccttccgcatggccatccgggtgctgctgggcttcagcatccctgaggaggaccttgggcacctctttgaggtctaccagcagtttgtggacaatgtcttctccctgcctgtcgacctgcccttcagtggctaccggcggggcattcaggctcggcagatcctgcagaaggggctggagaaggccatccgggagaagctgcagtgcacacagggcaaggactacttggacgccctggacctcctcattgagagcagcaaggagcacgggaaggagatgaccatgcaggagctgaaggacgggaccctggagctgatctttgcggcctatgccaccacggccagcgccagcacctcactcatcatgcagctgctgaagcaccccactgtgctggagaagctgcgggatgagctgcgggctcatggcatcctgcacagtggcggctgcccctgcgagggcacactgcgcctggacacgctcagtgggctgcgctacctggactgcgtcatcaaggaggtcatgcgcctgttcacgcccatttccggcggctaccgcactgtgctgcagaccttcgagcttgatggtttccagatccccaaaggctggagtgtcatgtatagcatccgggacacccatgacacagcgcccgtgttcaaagacgtgaacgtgttcgaccccgatcgcttcagccaggcgcggagcgaggacaaggatggccgcttccattacctcccgttcggtggcggtgtccggacctgcctgggcaagcacctggccaagctgttcctgaaggtgctggcggtggagctggctagcaccagccgctttgagctggccacacggaccttcccccgcatcaccttggtccccgtcctgcaccccgtggatggcctcagcgtcaagttctttggcctggactccaaccagaacgagatcctgccggagacggaggccatgctgagcgccacagtctaacccaagacccacccgcctcagcccagcccaggcagcggggtggtggttgtgggaggtagaaacctgtgtgtgggagggggccggaacggggagggcgagtggcccccatacttgccctcccttgctccccctccctggcaaaccctacccaaagccagtgggccccattcctagggctgggctccccttctggctccagcttccctccagccactccccatttaccatcagctcagcccctgggaagggcgtggcaggggctctgcatgcccgtgacagtgttaggtgtcagcgcgtgctacagtgtttttgtgatgttctgaactgctcccttccctccgttcctttcggacccttttagctggggttgggggacgggaagagccgtgcccccttgggcgcactcttcagcgtctcctcctcctgcgcccccactgcgtctgcccaggaacagcatcctgggtagcagaacaggagtcaaccttggcggggcgggggctgcgtccaacctggagattgcccttccctatgccacggttcccaccctccctcaccagtttggacaatttgaaattacctattgctgctacttgttctgtcctctgaccttggggcaaaggagccccaggccctgtctccccagcatcctccctggtggccctgggcaggtgcactgacacccccaccttcccatcccctgctgaaccaggccctgttacacacagccgcctaaggcccgcggctcatgtgctgcccgcccccatatttattcactgatagagaatcttggggatgctggggtctggagtgaacatctcctccccttcatgccctagcctgtgttctagctgtcctggcgagacttctgtgagtgaagaggaaggggtctctggtcaaacccagcccccagggcctagggttgaaagccttccccggctccgggcattatttgggtttaatctcggagcctcactcctggactgaagtccggtgcctctgccttatccctggtggagatggaatgtggcccattgcctcctccctctcctgtcaaaaaccctgatcaggtagatttggaggcggccacgatttcctgtttggcccctgttcaccccagtgcactggccctgactccaggcgtgagtatggggaaggatacgggttcttctgacggggagcaagggcctccgtcttcccttccttaactctccccctttgccctccgccctgaaaaaggtgtccttgaagtcccttccacctctatgccactgtctgcttagcccagctcaggggtggggaagaggcgaaagcgtgggggaggtgagcgcagcggcagttctgcctcggagctgattgcagggccctgtgtggtctccggacagctgcgggaaggctgccgcagctgaagctgaagaggcggctacgtgcggtttgtcagggggattgggttgaaaactggccagtcgggatgactgggtgaaagaggagtagctcctgccactggcgttttgagtgttggcaatttgggatgcctcctggggaaggtttccgggcgtttggtgagtctctagatttttccttgctttctgtgtttattggtttttgatgttgtaaaagcaatgaatcccctttacaagaaaatcgaaaacacagaagaatgaaggacatgccagtccccgatcgctgctgtgagcacctcagtggctccctcagaccagatcccgtaggcagccccacagaccgaccctgaccccactcacagccaccctgaagatagactataggaacgggcccataccacacagactgctctccaatccctgagtctcagatgtttcatttatttcctacttttccactactaaaaaacagtgtggaatagacattattggcaaaattgctcatccctaatcctgaaaaacaggccagaatgggtaaagacttgtcaaagcttgcaacatagctacatggtgcacccggacctgtaccccctccccccaacacaaaaccagtgtctgggaggttcattttcctttaaactgatccagctggccctgaaccaattgtttttgactgagtatctaggagagcagtaagtggaacttcagacaagcccactgggtctggtccaggtgaggggcagggggcatggggctgggaggtctcaggggccttccctgggggtggccagcctggtagggggcagagaaggaaaagctgaggggggtccctgtgagggaggaaagaaggatcatttgccccgctgggtctcaaaggcagtgagaagagagctgaagaaagctctggctggctgacaggatccctgtgttgtaattggtccctcctttcagctctctagtgagatgcccgtgtctgtgcgtgtgcgtgtgtgtttcatacagctagcattagatgggtgatgtttcttacttatcatccctaactattgcaacttgaccttaaaaagacaaaaccccacaaaactcttcctgccacgggcttgcagattgaagcactttcgatgttgggcgctggcgtttgtgttctgggcaccaccgtgaccctgcccagatggctataatattattttatacacaaaccttttttttcataaatgttataattttgtgtctgtctttataaactattataagtactatttttgttataattcaaaatagatatttagtataaagtttttgctgttaaatatttgttatttagtaaaatatgaattttgctctattgtaaacatggttcaaaatattaatatgtttttatcacagtcgttttaatattgaaaaagcacttgtgtgttttgttttgatatgaaactggtaccgtgtgagtgtttttgctgtcgtggttttaatctgtatataatattccatgttgcatattaaaaacatgaatgttgtgcattttgtgattttggaaatactcaatgtggctcttctataggcttctagaataaaccgtggggacccgc

SEQ ID NO: 124490 - DNA, 1569 bp, Homo sapiens
  Payload ID: 4447
  Gene Symbol: CYP26C1
  Gene Name: cytochrome P450, family 26, subfamily C, polypeptide 1
  Uniprot ID: Q6V0L0
  ENST ID: ENST00000285949
  CDS Start-End: 1-1569
atgttcccttgggggctgagctgcctgtcagtgctgggggcggcgggcactgctctcctgtgcgcgggcctgctgctcagcctggcccagcacctctggaccctccgctggatgctgagccgggaccgggcctccaccctgcctctgcccaagggctccatggggtggcccttcttcggcgaaacgctgcactggttagttcagggctcgcgcttccacagttctcgccgagagcgctatgggacagtgttcaagacgcacctgctgggcaggccagtgatccgcgtgagcggcgcggagaacgtgcgcaccatcctgctgggcgagcaccgcctggtgcgcagccagtggccgcagagtgcgcacatcctgctgggctcgcacacactgctaggtgcggtcggcgagccgcaccggcggcggcgcaaggtcctggcgcgcgtgttcagccgcgccgcgctggagcgctacgtgccgcgcctgcagggggcgctgcggcatgaggtgcgctcctggtgcgcggcgggcgggccggtctcagtctacgacgcctccaaagcgctcaccttccgcatggccgcgcgcatcctgctggggttgcggctggacgaggcgcagtgcgccacgctggcccggaccttcgagcagctcgtggagaacctcttctcactgcctctggacgttcccttcagtggcctacgcaagggcatccgggcaagggaccagctgcatcggcacctggagggggccatttctgagaagcttcacgaggacaaggctgcagagccgggtgatgccctcgacctaatcattcacagtgcaagggagctgggccatgagccctccatgcaggagctgaaggagtcggctgtggagctcctcttcgccgccttcttcaccacggccagtgccagcacctcgctcgtcctgctgctactgcagcatccggcggccatcgccaagattcgggaggagctggtggcgcaggggctggggcgcgcgtgcggctgcgcgcccggggccgctgggggcagcgaggggcccccgcccgactgcggctgcgagcccgacctcagcctcgcggcgctgggccgtctgcgctacgtcgactgcgtggtcaaggaggtgctgcgcctcctgccgccagtgtccgggggctaccgcaccgccctgcgcaccttcgagctcgacggctaccagatccccaagggctggagcgtgatgtatagcatccgggacacgcacgagacggctgcggtgtaccgcagccctcccgaaggcttcgatccagagcgcttcggcgcagcgcgcgaagattcccggggcgcctccagccgcttccattacatcccgttcggcggcggtgcgcgcagctgcctcggccaggagctggcgcaagccgtgctccagctgctagctgtggagctagtgcgcaccgcgcgctgggaactggccacacccgccttccccgccatgcagacggtgcccatcgtgcacccagtggacgggctgcggctctttttccaccccctcacgccttcggttgcggggaatgggctatgcctctga

SEQ ID NO: 124491 - DNA, 4208 bp, Homo sapiens
  Payload ID: 4447
  Gene Symbol: CYP26C1
  Gene Name: cytochrome P450, family 26, subfamily C, polypeptide 1
  ENST ID: ENST00000624358
  CDS Start-End: 457-1365
gactggaggagggacaggtggggcgggggtctgcagaccaggttggcaacactggtgagttgctcttctttcgccctccttcccttcttctatccaaagggtgctgagcccgggaggaggtgggaggtgccccgcggagccgggagtgagcgttcccgaggcagcaggcaccttcgagagggactggcatttgggcccaggagccaggaaaaagtcctgagcgtgccggcctcgaggaaggcacgttccctaagggcgcacggtcactgcagtctttcaccgtccgtctgtttttagaacagagttctggcctgagcttataaatctcgggctttgcccccaaaccccaggccttttgcggacggaacaggtgagcactgcgcactgctcgcgccccggttcttgcgtcccctgctctccctgcgctctgagcggcctggcccccgcgggctcatcatgttcccttgggggctgagctgcctgtcagtgctgggggcggcgggcactgctctcctgtgcgcgggcctgctgctcagcctggcccagcacctctggaccctccgctggatgctgagccgggaccgggcctccaccctgcctctgcccaagggctccatggggtggcccttcttcggcgaaacgctgcactggttagttcagggctcgcgcttccacagttctcgccgagagcgctatgggacagtgttcaagacgcacctgctgggcaggccagtgatccgcgtgagcggcgcggagaacgtgcgcaccatcctgctgggcgagcaccgcctggtgcgcagccagtggccgcagagtgcgcacatcctgctgggctcgcacacactgctaggtgcggtcggcgagccgcaccggcggcggcgcaaggtcctggcgcgcgtgttcagccgcgccgcgctggagcgctacgtgccgcgcctgcagggggcgctgcggcatgaggtgcgctcctggtgcgcggcgggcgggccggtctcagtctacgacgcctccaaagcgctcaccttccgcatggccgcgcgcatcctgctggggttgcggctggacgaggcgcagtgcgccacgctggcccggaccttcgagcagctcgtggagaacctcttctcactgcctctggacgttcccttcagtggcctacgcaaggtacggccgccccggctccagaccttcctccgaggctccgcggcgcgggcgggcctcccagacccagacgggacgccctcggcgcaccccgcgcgtccgtcacctctgctgggaacggcggcagggcccgggggtgggaggcgttgtggcggtggcgtggcggtgggctctgggcctggcctctgtgctggttcgctggtgtgacctggggctggccacacgacctccgtgggacgcgcctgccgcgacgcgctccagcctgagcaagcgcgggccgccagagtttggggtctcggtggcaggcgtcctgccagtcggtcggactccttcccacagcggcgcccctggggccggcctccatcacctcttcggaagcccagatggctgcggaaccgaggagagcgtgagggctgcagatgagccccggtccagcccagcgccagccccggacccaggggtgtgggcgtcagctccaccagccctggacccgctaggtttcgggatcagagaactgctgcttctccagacttcagaacaatgggcaggacccggagagcagctaggatgccccatcccgccttttggtccccctattctgggacttcccactgtttgattccctggttttcagtcacctgcataaaaataatatgtgtaaaggatcatgctataggctgatcaccgtggatacgttttctgatctaatcctcgcagcctgcaaagtgttatgattctcattttattggccaaacttattttattgacttacccaagatcacaccgttagtaggggcacgaacaggactttaacctcatctcctccgactatggaactcaagtgctgaattacagtgctttccccgggggaatgcttttgctgcggctattccctgaactctggagaggcatcccctattgcccacgctcttacagaggctaatgcttacaaatccaatagtgtcctctaagtcagagctttgctgggtgcatcaaggtaccccagcctgagcctagtacagggaaagggcaatgggctgaccctagccgcactgggctctgtgccaggcatggacatggacagctgtgtgactctgggcaattgcttgacctctctgaacttcagcatcctctcctcaggatgacagtaactctgctgtggctcagagggggattgtgataatcaagacagaatgatgtttgtggacagtggacatatccccgaccatttactgagcccagccatatgccaggccaggagctaagctgggaagctgttaacacaaggatgttggcagagccagtgctgagaaggttttctggcaggtccctacaccaatgctgcatccccagagccacatcttgtgtggccccactttgaggcacaggcagtcctcaagatgaggggcaagaggagacctgggttccagtaatgactcagccacactcactacctctgcagccttcagcctccagccagccttgtcagtaggagaactgaaggagtcggctgtggagctcctcttcgccgccttcttcaccacggccagtgccagcacctcgctcgtcctgctgctactgcagcatccggcggccatcgccaagattcgggaggagctggtggcgcaggggctggggcgcgcgtgcggctgcgcgcccggggccgctgggggcagcgaggggcccccgcccgactgcggctgcgagcccgacctcagcctcgcggcgctgggccgtctgcgctacgtcgactgcgtggtcaaggaggtgctgcgcctcctgccgccagtgtccgggggctaccgcaccgccctgcgcaccttcgagctcgacggctaccagatccccaagggctggagcgtgatgtatagcatccgggacacgcacgagacggctgcggtgtaccgcagccctcccgaaggcttcgatccagagcgcttcggcgcagcgcgcgaagattcccggggcgcctccagccgcttccattacatcccgttcggcggcggtgcgcgcagctgcctcggccaggagctggcgcaagccgtgctccagctgctagctgtggagctagtgcgcaccgcgcgctgggaactggccacacccgccttccccgccatgcagacggtgcccatcgtgcacccagtggacgggctgcggctctttttccaccccctcacgccttcggttgcggggaatgggctatgcctctgacatgcttgcgctctaggacacggcttggccggtggctatggcgcgcacgcagcgccacccatctgccgctccccattgtagcgtcgcgcgcccactctttcactcgttcaacaatctttcaacaaatgttcgccaaacgcggatgtgtgccggactcgaggaaggaggagggcgagccaccgctgccgcgccagagaagcatctaagcccatgggaagatgccttctgcgctccgcgcccagaggaaggaaaatgtcgtgggccaagcaggaatggagggaatagatagatccccacgaggtgctgcttggcttccccttcccgagccaatccagggagggtgcatggatgggggaaggcgaggtaggggtggcaggggagtgggaatattgcaactcggggacattgcagagacccgacgcacgcggtgggacctgcaacccttgtaaggaagcgggcacgccgtgggcgcaaccctggcctggctttgggccatagaaaaaacacgcagaggatgcctgacggaaggccctctggcagctggcgtctggcttcgtgcgccttggccactctgccggtctcggcggaaactagcaactgtgggcacttccaggctcgaaagggctcaaggtcaccggattctgctggccacttcttaaaaggaaaaattcctaccttaagaaggcatttactcttgtcatgtatacagaggagaataggcacaccaacacgtctccaacgctggattattttcatgggaggttgagacataattagagaggtttgagatatttgtaccaaaaataggaaggccaagaaataaagtgtcttgggagcgg

SEQ ID NO: 124492 - DNA, 2286 bp, Homo sapiens
  Payload ID: 4448
  Gene Symbol: CYP27A1
  Gene Name: cytochrome P450, family 27, subfamily A, polypeptide 1
  Uniprot ID: Q02318
  ENST ID: ENST00000258415
  CDS Start-End: 428-2023
gccgagggcagcttagccacggccggttcccgttccctccaggacgcgagggtcgccttgggtggggaaccgcgaccgggcgaggacctatcccggtgtggggcttcccgatttcgaaagaatctcgctgcacccccgcccagagttcagaccaagcgaaaagttatttgagaggcctcgggggcgcggggtgaggagtcgtggcggaggccttggtcggggcgccgtggatatccccgagtcaccgcgtccctctcctgcagctcccgcgtcgctgggaggagcgagggagcgagcgggaaggggtctagctggcctttgctcggccctccccagcgcccggctttgaacccgccctgcactgctgtctgggcgggtccggggactcagcactcgacccaaaggtgcaggcgcgcgagcacaacccatggctgcgctgggctgcgcgaggctgaggtgggcgctgcgaggggccggccgtggcctctgcccccacggggccagagccaaggccgcgatccctgccgccctcccctcggacaaggccaccggagctcccggagccgggcctggtgtccggcggcggcaacggagcttagaggagattccacgtctaggacagctgcgcttcttctttcagctgttcgttcaaggctatgccctgcaactgcaccagttacaggtgctttacaaggccaagtacggtccaatgtggatgtcctacttagggcctcagatgcacgtgaacctggccagtgccccgctcttggagcaagtgatgcggcaagagggcaagtacccagtacggaacgacatggagctatggaaggagcaccgggaccagcacgacctgacctatgggccgttcaccacggaaggacaccactggtaccagctgcgccaggctctgaaccagcggttgctgaagccagcggaagcagcgctctatacggatgctttcaatgaggtgattgatgactttatgactcgactggaccagctgcgggcagagagtgcttcggggaaccaggtgtcggacatggctcaactcttctactactttgccttggaagctatttgctacatcctgttcgagaaacgcattggctgcctgcagcgatccatccccgaggacaccgtgaccttcgtcagatccatcgggttaatgttccagaactcactctatgccaccttcctccccaagtggactcgccccgtgctgcctttctggaagcgatacctggatggttggaatgccatcttttcctttgggaagaagctgattgatgagaagctcgaagatatggaggcccaactgcaggcagcagggccagatggcatccaggtgtctggctacctgcacttcttactggccagtggacagctcagtcctcgggaggccatgggcagcctgcctgagctgctcatggctggagtggacacgacatccaacacgctgacatgggccctgtaccacctctcaaaggaccctgagatccaggaggccttgcacgaggaagtggtgggtgtggtgccagccgggcaagtgccccagcacaaggactttgcccacatgccgttgctcaaagctgtgcttaaggagactctgcgtctctaccctgtggtccccacaaactcccggatcatagaaaaggaaattgaagttgatggcttcctcttccccaagaacacccagtttgtgttctgccactatgtggtgtcccgggaccccactgccttctctgagcctgaaagcttccagccccaccgctggctgagaaacagccagcctgctacccccaggatccagcacccatttggctctgtgccctttggctatggggtccgggcctgcctgggccgcaggattgcagagctggagatgcagctactcctcgcaaggctgatccagaagtacaaggtggtcctggccccggagacgggggagttgaagagtgtggcccgcattgtcctggttcccaataagaaagtgggcctgcagttcctgcagagacagtgctgagctgagtctccgccttgctggggcttgtcctagaggctccagctctggcacagtggttcctggctgctgccatgtctcagatgaggagggagagaaggaggccgccagactcgagaggtgggaggaactccttgcacacaccctgagcttttgccacttctatcatttttgagcaactccctctcagctaaaaggccacccctttatcgcattgctgtccttgggtagaatataaaataaagggacttttatttcttattgga

SEQ ID NO: 124493 - DNA, 799 bp, Homo sapiens
  Payload ID: 4448
  Gene Symbol: CYP27A1
  Gene Name: cytochrome P450, family 27, subfamily A, polypeptide 1
  ENST ID: ENST00000411688
  CDS Start-End: 136-799
catgaaggaagaaggcatggcttagctaaaaggagaaatgtcccagaaacctccatactgacagccaggaagtagtctcagaggctttggattccaggaaagaagctggtgctttacaaggccaagtacggtccaatgtggatgtcctacttagggcctcagatgcacgtgaacctggccagtgccccgctcttggagcaagtgatgcggcaagagggcaagtacccagtacggaacgacatggagctatggaaggagcaccgggaccagcacgacctgacctatgggccgttcaccacggaaggacaccactggtaccagctgcgccaggctctgaaccagcggttgctgaagccagcggaagcagcgctctatacggatgctttcaatgaggtgattgatgactttatgactcgactggaccagctgcgggcagagagtgcttcggggaaccaggtgtcggacatggctcaactcttctactactttgccttggaagctatttgctacatcctgttcgagaaacgcattggctgcctgcagcgatccatccccgaggacaccgtgaccttcgtcagatccatcgggttaatgttccagaactcactctatgccaccttcctccccaagtggactcgccccgtgctgcctttctggaagcgatacctggatggttggaatgccatcttttcctttgggaagaagctgattgatgagaagctcgaagatatggaggcccaactgcaggcagcagggccagatggcatccaggtgtctggctacctgcacttcttactgg

SEQ ID NO: 124494 - DNA, 903 bp, Homo sapiens
  Payload ID: 4448
  Gene Symbol: CYP27A1
  Gene Name: cytochrome P450, family 27, subfamily A, polypeptide 1
  ENST ID: ENST00000445971
  CDS Start-End: 31-378
cccaaaggtgcaggcgcgcgagcacaacccatggctgcgctgggctgcgcgaggctgaggtgggcgctgcgaggggccggccgtggcctctgcccccacggggccagagccaaggccgcgatccctgccgccctcccctcggacaaggccaccggagctcccggagccgggcctggtgtccggcggcggcaacggagcttagaggagattccacgtctaggacagctgcgcttcttctttcagctgttcgttcaaggctatgccctgcaactgcaccagttacagggaaggacaccactggtaccagctgcgccaggctctgaaccagcggttgctgaagccagcggaagcagcgctctatacggatgctttcaatgaggtgattgatgactttatgactcgactggaccagctgcgggcagagagtgcttcggggaaccaggtgtcggacatggctcaactcttctactactttgccttggaagctatttgctacatcctgttcgagaaacgcattggctgcctgcagcgatccatccccgaggacaccgtgaccttcgtcagatccatcgggttaatgttccagaactcactctatgccaccttcctccccaagtggactcgccccgtgctgcctttctggaagcgatacctggatggttggaatgccatcttttcctttgggaagaagctgattgatgagaagctcgaagatatggaggcccaactgcaggcagcagggccagatggcatccaggtgtctggctacctgcacttcttactggccagtggacagctcagtcctcgggaggccatgggcagcctgcctgagctgctcatggctggagtggacacgacatccaacacgctgacatgggccctgtaccacctctcaaaggaccc

SEQ ID NO: 124495 - DNA, 2540 bp, Homo sapiens
  Payload ID: 4449
  Gene Symbol: CYP27B1
  Gene Name: cytochrome P450, family 27, subfamily B, polypeptide 1
  Uniprot ID: O15528
  ENST ID: ENST00000228606
  CDS Start-End: 211-1737
ttgcaacatgagacccaagggagttgtgaagtcagccccagccccgcctactgttcctgggtgctaatccccagcacagaccactcaggaggagggattggctgaggagcttggagagggggcgtcatcacctcacccaaaggttaaataggggttgagatatgatgctcaggagaagcgctttctttcgcgagcaccctgaaccagaccatgacccagaccctcaagtacgcctccagagtgttccatcgcgtccgctgggcgcccgagttgggcgcctccctaggctaccgagagtaccactcagcacgccggagcttggcagacatcccaggcccctctacgcccagctttctggccgaacttttctgcaagggggggctgtcgaggctacacgagctgcaggtgcagggcgccgcgcacttcgggccggtgtggctagccagctttgggacagtgcgcaccgtgtacgtggctgcccctgcactcgtcgaggagctgctgcgacaggagggaccccggcccgagcgctgcagcttctcgccctggacggagcaccgccgctgccgccagcgggcttgcggactgctcactgcggaaggcgaagaatggcaaaggctccgcagtctcctggccccgctcctcctccggcctcaagcggccgcccgctacgccggaaccctgaacaacgtagtctgcgaccttgtgcggcgtctgaggcgccagcggggacgtggcacggggccgcccgccctggttcgggacgtggcgggggaattttacaagttcggactggaaggcatcgccgcggttctgctcggctcgcgcttgggctgcctggaggctcaagtgccacccgacacggagaccttcatccgcgctgtgggctcggtgtttgtgtccacgctgttgaccatggcgatgccccactggctgcgccaccttgtgcctgggccctggggccgcctctgccgagactgggaccagatgtttgcatttgctcagaggcacgtggagcggcgagaggcagaggcagccatgaggaacggaggacagcccgagaaggacctggagtctggggcgcacctgacccacttcctgttccgggaagagttgcctgcccagtccatcctgggaaatgtgacagagttgctattggcgggagtggacacggtgtccaacacgctctcttgggctctgtatgagctctcccggcaccccgaagtccagacagcactccactcagagatcacagctgccctgagccctggctccagtgcctacccctcagccactgttctgtcccagctgcccctgctgaaggcggtggtcaaggaagtgctaagactgtaccctgtggtacctggaaattctcgtgtcccagacaaagacattcatgtgggtgactatattatccccaaaaatacgctggtcactctgtgtcactatgccacttcaagggaccctgcccagttcccagagccaaattcttttcgtccagctcgctggctgggggagggtcccaccccccacccatttgcatctcttccctttggctttggcaagcgcagctgtatggggagacgcctggcagagcttgaattgcaaatggctttggcccagatcctaacacattttgaggtgcagcctgagccaggtgcggccccagttagacccaagacccggactgtcctggtacctgaaaggagcatcaacctacagtttttggacagatagtcccatggaaagagactgtcatcatcaccctttcattcatcatagggataagattttttgtaggcacaagaccaaggtatacatcttcccctaatgcctatctgaccaaactggatagaaccaccatagtgaagtgtgaggcggccctgaccaatgtgtgaagtatgcacttggcctgactcaggaagccaggtgagaaaaccatggtctctctgcttgcttggcccttctgatcatgtatgcatcccccaaggatgaaatcagattttaactaataatgctggatggcctgaggaaagattcaactgcctctctttttgggctttcatagtgttcattgatgctgctggctaagcatttatcaaagcataagctcagtaactgtgcatctggtctgtacctggttggtccttcgtctttgcatgtaagctctttgagaggaagggtgaagccttatttgttttttatgtcccctgccagggcctgtctctgactaggtgtcaccatacacattcttagattgaatctgaaccatgtggcagaagggataagcagcttacttagtaggctctgtctacccccttccttctttgtcttgcccctaggaaggtgaatctgccctagcctggtttacggtttcttataactctcctttgctctctggccactattaagtgggtttgccccatcacttagttctcaggcagagacatctttgggcctgtccctgcccaggcctctggctttttatattgaaaatttttaaatattcacaaattttagaataaatcaaatattccatt

SEQ ID NO: 124496 - DNA, 976 bp, Homo sapiens
  Payload ID: 4449
  Gene Symbol: CYP27B1
  Gene Name: cytochrome P450, family 27, subfamily B, polypeptide 1
  ENST ID: ENST00000546567
  CDS Start-End: 506-976
ggcaggaaatgagtaaagaggaagggggctggaagacaggcgcaggccggtgcaggtttccgtaccccaagggggcagacgcaatccctctcctggccaccgcagccgaacgcgctccttcactgcagccagtcccgtcgagccgtccccaccttcccgatgcgcactctctcctcaaccctgcagggaaggcgaagaatggcaaaggctccgcagtctcctggccccgctcctcctccggcctcaagcggccgcccgctacgccggaaccctgaacaacgtagtctgcgaccttgtgcggcgtctgaggcgccagcggggacgtggcacggggccgcccgccctggttcgggacgtggcgggggaattttacaagttcggactggaaggcatcgccgcggttctgctcggctcgcgcttgggctgcctggaggctcaagtgccacccgacacggagaccttcatccgcgctgtgggctcggtgtttgtgtccacgctgttgaccatggcgatgccccactggctgcgccaccttgtgcctgggccctggggccgcctctgccgagactgggaccagatgtttgcatttgctcagaggcacgtggagcggcgagaggcagaggcagccatgaggaacggaggacagcccgagaaggacctggagtctggggcgcacctgacccacttcctgttccgggaagagttgcctgcccagtccatcctgggaaatgtgacagagttgctattggcgggagtggacacggtgtccaacacgctctcttgggctctgtatgagctctcccggcaccccgaagtccagacagcactccactcagagatcacagctgccctgagccctggctccagtgcctacccctcagccactgttctgtcccagctgcccctgctgaaggcggtggtcaaggaagtgctaagactgtaccctgtggtacctggaaattctcgtgtcccagac

SEQ ID NO: 124497 - DNA, 702 bp, Homo sapiens
  Payload ID: 4449
  Gene Symbol: CYP27B1
  Gene Name: cytochrome P450, family 27, subfamily B, polypeptide 1
  ENST ID: ENST00000546609
  CDS Start-End: 1-702
ctaccttagctggacctcgtctcccagggattagagaaaagagcaggagtcctgggtcttcccagttgagactgctggagctgagacacagtactctcttaaagaaggtgcagggcgccgcgcacttcgggccggtgtggctagccagctttgggacagtgcgcaccgtgtacgtggctgcccctgcactcgtcgaggagctgctgcgacaggagggaccccggcccgagcgctgcagcttctcgccctggacggagcaccgccgctgccgccagcgggcttgcggactgctcactgcggaaggcgaagaatggcaaaggctccgcagtctcctggccccgctcctcctccggcctcaagcggccgcccgctacgccggaaccctgaacaacgtagtctgcgaccttgtgcggcgtctgaggcgccagcggggacgtggcacggggccgcccgccctggttcgggacgtggcgggggaattttacaagttcggactggaaggcatcgccgcggttctgctcggctcgcgcttgggctgcctggaggctcaagtgccacccgacacggagaccttcatccgcgctgtgggctcggtgtttgtgtccacgctgttgaccatggcgatgccccactggctgcgccaccttgtgcctgggccctggggccgcctctgccgagactgggaccagatgtttgcatttg

SEQ ID NO: 124498 - DNA, 4401 bp, Homo sapiens
  Payload ID: 4450
  Gene Symbol: CYP27C1
  Gene Name: cytochrome P450, family 27, subfamily C, polypeptide 1
  Uniprot ID: Q4G0S4
  ENST ID: ENST00000335247
  CDS Start-End: 132-1250
agtctccttgtgcgatctcccagacatgagagccctgctgggctttctggctcctcctccgtgcagagttgtcccgtcaggagccaggaggggcgacgctggctccgtgggagggtgaacagtggctcaagatgagaagcgtattgagacaaagaattctgaaaccgaaagatgtggccatttattctggagaagtcaaccaagttattgctgacttaattaaaagaatctacctcctcaggagccaggcagaagatggagaaaccgtgaccaatgtcaatgatcttttcttcaaatattcaatggaaggagtggccaccatcctttatgagagtcgtttgggctgcctggaaaacagcatcccacagctgactgtggaatacatcgaggccctggagctcatgtttagcatgttcaagacctccatgtatgcaggcgccatccccagatggcttcgccccttcatcccaaagccctggcgggaattctgcaggtcctgggatggactcttcaaattcagccaaattcatgttgacaacaagttgagggacatacagtaccaaatggaccgaggccggagggtgagcgggggacttctcacatacctcttccttagccaggctctgacgctgcaggagatctacgccaacgtgactgagatgctgctggccggcgtcgacacgacgtccttcaccttgtcttggactgtgtacctcctggcaaggcacccagaagtgcagcagacggtgtaccgggagattgtgaagaatttaggggaaaggcatgttccaactgcagctgatgtccccaaggtcccgctggtcagagctctccttaaggaaaccctgaggctgtttccagtgctgccagggaacggccgggtcacccaggaagacctggttattggcgggtatctgattccgaaaggcacccagctggccctttgccactatgccacatcgtaccaggatgagaacttccctcgggccaaggagttccggcctgagcgctggctgcggaaaggagacttagatagagttgacaattttggatccatcccctttggtcatggggttcgcagctgcatagggcggagaattgcagaactggagattcacctcgtcgtgatccagttgcttcaacattttgagatcaaaacatcttctcagaccaatgctgttcatgcaaaaacccacgggctcctgacgccaggggggcccatccacgtgcgatttgttaacagaaagtaagcctagattttaaacctgggctgatgtagcagaccagctcgccgacacacagtgggtatttgtgttcgctgatcaccgtggagaaggaaagcgatgtcgctaaaggctgtcttgttatagactggcctcccaggtcctgggacacttgtaaatctttatgcaaagtaatgtaaaaaggttgctattttactggtgcataccagaagttgccctttctttgggggaaacagctgtttaaaaaccagtggcagtgaatttttatgcttcatacattgtgctagactcaatatttaatgactggcagtatcctgtgcatttacttgtacagggaaatggtggtttacttacaaattcagttcttcaatatatgttctctaatactggcatctgggctcaaattgccatcaacagtaagttgaaggcaatttcaacttactgtttctaatttgaagagggaacattaagaatgcctctgtaatactgtaattatgggaagaaagcaccagaggcaacattttatcctgagcaccagatttagatcctgttaaagggctcaaacttaaaagggctggccgggtgcggtggctcacgcctgtaatcccagcactttgggaggtcaaggtgggaggattgcttgagccagaagttcgagaccagcctgagcaacatggtgaaaccctgtctctaccaaaaatacaaaaattagccgggcgtggtggtgcacacctatggtcctagttactcggaagactgaggcaggaggatcgtttgagctcaggaggttgggtctgcagtgagctatctatgatggcaccactgcacttcagcctgggtgacagagtgagaccctttctcaaaaataaaataaaataaaataaaataaaataaaataaaataaaatggctgtataagaatacttttctctccacaacgagtgcttaattttctagtcataatgcctaatgaagttgactattagtttttatttggaagaaataaataataaataaataataaataaataaaaaagaaagctcctggtgaaatcaagaataatcagattttctaaccaaatctaaatacagagtagagcagacgtataagaactggaaatatgatgacgtaaaattttgttgcctaagttgtgagaagtaataaaacaggcagcatggaaaacaatgtaactttagaacatttttatttcaagggaaaataaatacataaatagagatgctacagatacaacaatatttttatcttgatggtgttgttttaaatatccacacaagaaccctcacccagttgtgtgcctgtgccaggctctctgggaagccgtggctccgggagtgctgggtcctgaggagttctgttgcctttcctgctgctcaccggttgctaagaggaaacaccgtgatttcctgatgctcttgccttgtcatcatgcctgaaacagcttattcccaattctgtaattccttttacataatccttctccaaaaattactttcttactaatatagaccatacagttttttttccatttagtaagtcactctgcaaaataacccttaagtaaatagacataatatccatttcacataccatttttgttaaagtatataataaagttgaaatctctgtgtggtagcagaataactctagtatgaatgctgtaaatgtacaggtaaatgtgaaattaggtcatattaactggccaagtgttggattgattactttgaggtagcagtatacgtatattaagttttataaactagatgaaattgcattctgtttgagactgaaatttaaaaatattgagaataactaagcgacttgaagtgacctcttattccctgggtatacatacagtgtgaccctctcgtgaagtgtggctctgcctggggatcagcacagggtgaatagcaaagtgcgggctgggggtagcacctgtgcccgctgctgagtctcactgaacaggaagggaagcagccagacacgggggcctcctggtgtgatgtagcaggaagtgcagggcgccacccaggaagcatccacgccaaagaaatggagattcagctggacaagtttctaggttcgctactggtttataggaaatatgtggtatacagggagatgtcaaaactccatgggggctgggcgtggtggctcacacctgtaatttcagcactctggggaggttgaggcaggaggattgcttgaggccaggagtttgagacaagcttgggcaacacagtgagatcctgtctactaaaaatcaaaaaacttagctgagtgtggtggtgcatgcctgtagtcctagctatttgggaggctgaggctggaggattgcttaagtctgggaggttgaggctgcagtgagctgtgatccgccattacactccagcctgggtgacagagcaagacttcataacaaacaaacacacaaacaaactccatggggatgcagtcagcaaaatccagaatagagtgaggtctataggaccaatgtctcgggtttccaacaaaacaaatacgtgacaggcaaaaaacaagaggaggggccaggcgaggtggctcatgcctgtaatcccagcactttgggaggccaaggcgggcggataacctgaggtcaggggttccagaccagcctggccaacatggtgaaaccccatctctactaaaaatacagaaattatccaggcatggtggcgggcttctgtaattccagctacttgggaggctgaggcaggagaattgcttgaacctgggaggcagtttgcagtgagctgagatcacgccactgcactccacctgggcaacaagaacgaaactccgtatctaaaaaaaacaaaaaccaaaaagcaaaaaaaaaaccaaggggagaggagaactgttacagatgaagcaatataggagacatattaaccaagtacaatgctggacttcgtttgaatcagattcaaataaaccacttgtaaaaagacatttaagagataatttttaaaaataaaataaaagccaaaaatattaattcttccaatgcatgaaaaaaagagagcaactcggggaaatttgaatgctgactgtgtgtatttgatgatatttgggaattactgttaatttttttgttgtgataatggtagttatgttt

SEQ ID NO: 124499 - DNA, 2092 bp, Homo sapiens
  Payload ID: 4450
  Gene Symbol: CYP27C1
  Gene Name: cytochrome P450, family 27, subfamily C, polypeptide 1
  Uniprot ID: Q4G0S4
  ENST ID: ENST00000409327
  CDS Start-End: 113-1231
agcctcgccgccatgccggggccgaggaccctcgccaacctggcggagttcttctgcagggacggcttcagccgcatccacgagatccagggagggtgaacagtggctcaagatgagaagcgtattgagacaaagaattctgaaaccgaaagatgtggccatttattctggagaagtcaaccaagttattgctgacttaattaaaagaatctacctcctcaggagccaggcagaagatggagaaaccgtgaccaatgtcaatgatcttttcttcaaatattcaatggaaggagtggccaccatcctttatgagagtcgtttgggctgcctggaaaacagcatcccacagctgactgtggaatacatcgaggccctggagctcatgtttagcatgttcaagacctccatgtatgcaggcgccatccccagatggcttcgccccttcatcccaaagccctggcgggaattctgcaggtcctgggatggactcttcaaattcagccaaattcatgttgacaacaagttgagggacatacagtaccaaatggaccgaggccggagggtgagcgggggacttctcacatacctcttccttagccaggctctgacgctgcaggagatctacgccaacgtgactgagatgctgctggccggcgtcgacacgacgtccttcaccttgtcttggactgtgtacctcctggcaaggcacccagaagtgcagcagacggtgtaccgggagattgtgaagaatttaggggaaaggcatgttccaactgcagctgatgtccccaaggtcccgctggtcagagctctccttaaggaaaccctgaggctgtttccagtgctgccagggaacggccgggtcacccaggaagacctggttattggcgggtatctgattccgaaaggcacccagctggccctttgccactatgccacatcgtaccaggatgagaacttccctcgggccaaggagttccggcctgagcgctggctgcggaaaggagacttagatagagttgacaattttggatccatcccctttggtcatggggttcgcagctgcatagggcggagaattgcagaactggagattcacctcgtcgtgatccagttgcttcaacattttgagatcaaaacatcttctcagaccaatgctgttcatgcaaaaacccacgggctcctgacgccaggggggcccatccacgtgcgatttgttaacagaaagtaagcctagattttaaacctgggctgatgtagcagaccagctcgccgacacacagtgggtatttgtgttcgctgatcaccgtggagaaggaaagcgatgtcgctaaaggctgtcttgttatagactggcctcccaggtcctgggacacttgtaaatctttatgcaaagtaatgtaaaaaggttgctattttactggtgcataccagaagttgccctttctttgggggaaacagctgtttaaaaaccagtggcagtgaatttttatgcttcatacattgtgctagactcaatatttaatgactggcagtatcctgtgcatttacttgtacagggaaatggtggtttacttacaaattcagttcttcaatatatgttctctaatactggcatctgggctcaaattgccatcaacagtaagttgaaggcaatttcaacttactgtttctaatttgaagagggaacattaagaatgcctctgtaatactgtaattatgggaagaaagcaccagaggcaacattttatcctgagcaccagatttagatcctgttaaagggctcaaacttaaaagggctggccgggtgcggtggctcacgcctgtaatcccagcactttgggaggtcaaggtgggaggattgcttgagccagaagttcgagaccagcctgagcaacatggtgaaaccctgtctctaccaaaaatacaaaaattagccgggcgtggtggtgcacacctatggtcctagttactcggaagactgaggcaggaggatcgtttgagctcaggaggttgggtctgcagtgagctatctatgatggcaccactgcacttcagcctgggtgacagagtgagaccctttctcaaaaat

SEQ ID NO: 124500 - DNA, 2153 bp, Homo sapiens
  Payload ID: 4451
  Gene Symbol: CYP3A4
  Gene Name: cytochrome P450, family 3, subfamily A, polypeptide 4
  Uniprot ID: P08684
  ENST ID: ENST00000336411
  CDS Start-End: 185-1696
acaggtggccctgctactggctgcagctccagccctgcctccttctctagcatataaacaatccaacagcctcactgaatcactgctgtgcagggcaggaaagctccatgcacatagcccagcaaagagcaacacagagctgaaaggaagactcagaggagagagataagtaaggaaagtagtgatggctctcatcccagacttggccatggaaacctggcttctcctggctgtcagcctggtgctcctctatctatatggaacccattcacatggactttttaagaagcttggaattccagggcccacacctctgccttttttgggaaatattttgtcctaccataagggcttttgtatgtttgacatggaatgtcataaaaagtatggaaaagtgtggggcttttatgatggtcaacagcctgtgctggctatcacagatcctgacatgatcaaaacagtgctagtgaaagaatgttattctgtcttcacaaaccggaggccttttggtccagtgggatttatgaaaagtgccatctctatagctgaggatgaagaatggaagagattacgatcattgctgtctccaaccttcaccagtggaaaactcaaggagatggtccctatcattgcccagtatggagatgtgttggtgagaaatctgaggcgggaagcagagacaggcaagcctgtcaccttgaaagacgtctttggggcctacagcatggatgtgatcactagcacatcatttggagtgaacatcgactctctcaacaatccacaagacccctttgtggaaaacaccaagaagcttttaagatttgattttttggatccattctttctctcaataacagtctttccattcctcatcccaattcttgaagtattaaatatctgtgtgtttccaagagaagttacaaattttttaagaaaatctgtaaaaaggatgaaagaaagtcgcctcgaagatacacaaaagcaccgagtggatttccttcagctgatgattgactctcagaattcaaaagaaactgagtcccacaaagctctgtccgatctggagctcgtggcccaatcaattatctttatttttgctggctatgaaaccacgagcagtgttctctccttcattatgtatgaactggccactcaccctgatgtccagcagaaactgcaggaggaaattgatgcagttttacccaataaggcaccacccacctatgatactgtgctacagatggagtatcttgacatggtggtgaatgaaacgctcagattattcccaattgctatgagacttgagagggtctgcaaaaaagatgttgagatcaatgggatgttcattcccaaaggggtggtggtgatgattccaagctatgctcttcaccgtgacccaaagtactggacagagcctgagaagttcctccctgaaagattcagcaagaagaacaaggacaacatagatccttacatatacacaccctttggaagtggacccagaaactgcattggcatgaggtttgctctcatgaacatgaaacttgctctaatcagagtccttcagaacttctccttcaaaccttgtaaagaaacacagatccccctgaaattaagcttaggaggacttcttcaaccagaaaaacccgttgttctaaaggttgagtcaagggatggcaccgtaagtggagcctgaattttcctaaggacttctgctttgctcttcaagaaatctgtgcctgagaacaccagagacctcaaattactttgtgaatagaactctgaaatgaagatgggcttcatccaatggactgcataaataaccggggattctgtacatgcattgagctctctcattgtctgtgtagagtgttatacttgggaatataaaggaggtgaccaaatcagtgtgaggaggtagatttggctcctctgcttctcacgggactatttccaccacccccagttagcaccattaactcctcctgagctctgataagagaatcaacatttctcaataatttcctccacaaattattaatgaaaataagaattattttgatggctctaacaatgacatttatatcacatgttttctctggagtattctataagttttatgttaaatcaataaagaccactttacaaaagta

SEQ ID NO: 124501 - DNA, 2342 bp, Homo sapiens
  Payload ID: 4451
  Gene Symbol: CYP3A4
  Gene Name: cytochrome P450, family 3, subfamily A, polypeptide 4
  ENST ID: ENST00000354593
  CDS Start-End: 108-1169
aatcactgctgtgcagggcaggaaagctccatgcacatagcccagcaaagagcaacacagagctgaaaggaagactcagaggagagagataagtaaggaaagtagtgatggctctcatcccagacttggccatggaaacctggcttctcctggctgtcagcctggtgctcctctatctcgtctttggggcctacagcatggatgtgatcactagcacatcatttggagtgaacatcgactctctcaacaatccacaagacccctttgtggaaaacaccaagaagcttttaagatttgattttttggatccattctttctctcaataacagtctttccattcctcatcccaattcttgaagtattaaatatctgtgtgtttccaagagaagttacaaattttttaagaaaatctgtaaaaaggatgaaagaaagtcgcctcgaagatacacaaaagcaccgagtggatttccttcagctgatgattgactctcagaattcaaaagaaactgagtcccacaaagctctgtccgatctggagctcgtggcccaatcaattatctttatttttgctggctatgaaaccacgagcagtgttctctccttcattatgtatgaactggccactcaccctgatgtccagcagaaactgcaggaggaaattgatgcagttttacccaataaggcaccacccacctatgatactgtgctacagatggagtatcttgacatggtggtgaatgaaacgctcagattattcccaattgctatgagacttgagagggtctgcaaaaaagatgttgagatcaatgggatgttcattcccaaaggggtggtggtgatgattccaagctatgctcttcaccgtgacccaaagtactggacagagcctgagaagttcctccctgaaagattcagcaagaagaacaaggacaacatagatccttacatatacacaccctttggaagtggacccagaaactgcattggcatgaggtttgctctcatgaacatgaaacttgctctaatcagagtccttcagaacttctccttcaaaccttgtaaagaaacacagatccccctgaaattaagcttaggaggacttcttcaaccagaaaaacccgttgttctaaaggttgagtcaagggatggcaccgtaagtggagcctgaattttcctaaggacttctgctttgctcttcaagaaatctgtgcctgagaacaccagagacctcaaattactttgtgaatagaactctgaaatgaagatgggcttcatccaatggactgcataaataaccggggattctgtacatgcattgagctctctcattgtctgtgtagagtgttatacttgggaatataaaggaggtgaccaaatcagtgtgaggaggtagatttggctcctctgcttctcacgggactatttccaccacccccagttagcaccattaactcctcctgagctctgataagagaatcaacatttctcaataatttcctccacaaattattaatgaaaataagaattattttgatggctctaacaatgacatttatatcacatgttttctctggagtattctataagttttatgttaaatcaataaagaccactttacaaaagtattatcagatgctttcctgcacattaaggagaaatctatagaactgaatgagaaccaacaagtaaatatttttggtcattgtaatcactgttggcgtggggcctttgtcagaactagaatttgattattaacataggtgaaagttaatccactgtgactttgcccattgtttagaaagaatattcatagtttaattatgccttttttgatcaggcacagtggctcacgcctgtaatcctagcagtttgggaggctgagccgggtggatcgcctgaggtcaggagttcaagacaagcctggcctacatggttgaaaccccatctctactaaaaatacacaaattagctaggcatggtggactcgcctgtaatctcactacacaggaggctgaggcaggagaatcacttgaacctgggaggcggatgttgaagtgagctgagattgcaccactgcactccagtctgggtgagagtgagactcagtcttaaaaaaatatgcctttttgaagcacgtacattttgtaacaaagaactgaagctcttattatattattagttttgatttaatgttttcagcccatctcctttcatatttctgggagacagaaaacatgtttccctacacctcttgcattccatcctcaacacccaactgtctcgatgcaatgaacacttaataaaaaacagtcgattggtcaattgattgagcaataagcct

SEQ ID NO: 124502 - DNA, 564 bp, Homo sapiens
  Payload ID: 4451
  Gene Symbol: CYP3A4
  Gene Name: cytochrome P450, family 3, subfamily A, polypeptide 4
  ENST ID: ENST00000415003
  CDS Start-End: 104-564
actgctgtgcagggcaggaaagctccatgcacatagcccagcaaagagcaacacagagctgaaaggaagactcagaggagagagataagtaaggaaagtagtgatggctctcatcccagacttggccatggaaacctggcttctcctggctgtcagcctggtgctcctctatcttcacaatcgctgtgacttgatttctgtttcactttgtagatatggaacccattcacatggactttttaagaagcttggaattccagggcccacacctctgccttttttgggaaatattttgtcctaccataagggcttttgtatgtttgacatggaatgtcataaaaagtatggaaaagtgtggggcttttatgatggtcaacagcctgtgctggctatcacagatcctgacatgatcaaaacagtgctagtgaaagaatgttattctgtcttcacaaaccggaggccttttggtccagtgggatttatgaaaagtgccatctctatagctgaggatgaagaatggaagagattacgatcattgctgtctccaaccttcaccagtggaaa

SEQ ID NO: 124503 - DNA, 1515 bp, Homo sapiens
  Payload ID: 4452
  Gene Symbol: CYP3A43
  Gene Name: cytochrome P450, family 3, subfamily A, polypeptide 43
  Uniprot ID: Q9HB55
  ENST ID: ENST00000222382
  CDS Start-End: 1-1515
atggatctcattccaaactttgccatggaaacatgggttcttgtggctaccagcctggtactcctctatatttatgggacccattcacataaactttttaagaagctgggaattcctgggccaacccctctgccttttctgggaactattttgttctaccttaggggtctttggaattttgacagagaatgtaatgaaaaatacggagaaatgtgggggctgtatgaggggcaacagcccatgctggtcatcatggatcccgacatgatcaaaacagtgttagtgaaagaatgttactctgtcttcacaaaccagatgcctttaggtccaatgggatttctgaaaagtgccttaagttttgctgaagatgaagaatggaagagaatacgaacattgctatctccagctttcaccagtgtaaaattcaaggaaatggtccccatcatttcccaatgtggagatatgttggtgagaagcctgaggcaggaagcagagaacagcaagtccatcaacttgaaagatttctttggggcctacaccatggatgtaatcactggcacattatttggagtgaacttggattctctcaacaatccacaagatccctttctgaaaaatatgaagaagcttttaaaattggattttttggatccctttttactcttaatatcactctttccatttcttaccccagtttttgaagccctaaatatcggtttgtttccaaaagatgttacccattttttaaaaaattccattgaaaggatgaaagaaagtcgcctcaaagataaacaaaagcatcgagtagatttctttcaacagatgatcgactcccagaattccaaagaaacaaagtcccataaagctctgtctgatctggagcttgtggcccagtcaattatcatcatttttgctgcctatgacacaactagcaccactctccccttcattatgtatgaactggccactcaccctgatgtccagcagaaactgcaggaggagattgacgcagttttacccaataaggcacctgtcacctacgatgccctggtacagatggagtaccttgacatggtggtgaatgaaacgctcagattattcccagttgttagtagagttacgagagtctgcaagaaagatattgaaatcaatggagtgttcattcccaaagggttagcagtgatggttccaatctatgctcttcaccatgacccaaagtactggacagagcctgagaagttctgccctgaaagtaggttcagtaagaagaacaaggacagcatagatctttacagatacataccttttggagctggaccccgaaactgcattggcatgaggtttgctctcacaaacataaaacttgctgtcattagagcactgcagaacttctccttcaaaccttgtaaagagactcagatcccactgaaattagacaatctaccaattcttcaaccagaaaaacctattgttctaaaagtgcacttaagagatgggattacaagtggaccctga

SEQ ID NO: 124504 - DNA, 1349 bp, Homo sapiens
  Payload ID: 4452
  Gene Symbol: CYP3A43
  Gene Name: cytochrome P450, family 3, subfamily A, polypeptide 43
  Uniprot ID: Q9HB55
  ENST ID: ENST00000312017
  CDS Start-End: 1-1263
atggatctcattccaaactttgccatggaaacatgggttcttgtggctaccagcctggtactcctctatatttatgggacccattcacataaactttttaagaagctgggaattcctgggccaacccctctgccttttctgggaactattttgttctaccttaggggtctttggaattttgacagagaatgtaatgaaaaatacggagaaatgtgggggctgtatgaggggcaacagcccatgctggtcatcatggatcccgacatgatcaaaacagtgttagtgaaagaatgttactctgtcttcacaaaccagatgcctttaggtccaatgggatttctgaaaagtgccttaagttttgctgaagatgaagaatggaagagaatacgaacattgctatctccagctttcaccagtgtaaaattcaaggaaatggtccccatcatttcccaatgtggagatatgttggtgagaagcctgaggcaggaagcagagaacagcaagtccatcaacttgaaagatttctttggggcctacaccatggatgtaatcactggcacattatttggagtgaacttggattctctcaacaatccacaagatccctttctgaaaaatatgaagaagcttttaaaattggattttttggatccctttttactcttaatatcactctttccatttcttaccccagtttttgaagccctaaatatcggtttgtttccaaaagatgttacccattttttaaaaaattccattgaaaggatgaaagaaagtcgcctcaaagataaacaaaagcatcgagtagatttctttcaacagatgatcgactcccagaattccaaagaaacaaagtcccataaagctctgtctgatctggagcttgtggcccagtcaattatcatcatttttgctgcctatgacacaactagcaccactctccccttcattatgtatgaactggccactcaccctgatgtccagcagaaactgcaggaggagattgacgcagttttacccaataaggcacctgtcacctacgatgccctggtacagatggagtaccttgacatggtggtgaatgaaacgctcagattattcccagttgttagtagagttacgagagtctgcaagaaagatattgaaatcaatggagtgttcattcccaaagggttagcagtgatggttccaatctatgctcttcaccatgacccaaagtactggacagagcctgagaagttctgccctgaaagatcccactgaaattagacaatctaccaattcttcaaccagaaaaacctattgttctaaaagtgcacttaagagatgggattacaagtggaccctga

SEQ ID NO: 124505 - DNA, 1396 bp, Homo sapiens
  Payload ID: 4452
  Gene Symbol: CYP3A43
  Gene Name: cytochrome P450, family 3, subfamily A, polypeptide 43
  ENST ID: ENST00000342499
  CDS Start-End: 104-484
acctctgggcagagaaacaaagctctatatgcacagcccagcaaagagcagcacacagctgaaagaaaaactcagaagacagagctgaaaaagaaaactggtgatggatctcattccaaactttgccatggaaacatgggttcttgtggctaccagcctggtactcctctatatttatgggacccattcacataaactttttaagaagctgggaattcctgggccaacccctctgccttttctgggaactattttgttctaccttaggggtctttggaattttgacagagaatgtaatgaaaaatttctttggggcctacaccatggatgtaatcactggcacattatttggagtgaacttggattctctcaacaatccacaagatccctttctgaaaaatatgaagaagcttttaaaattggattttttggatccctttttactcttaatatcactctttccatttcttaccccagtttttgaagccctaaatatcggtttgtttccaaaagatgttacccattttttaaaaaattccattgaaaggatgaaagaaagtcgcctcaaagataaacaaaagcatcgagtagatttctttcaacagatgatcgactcccagaattccaaagaaacaaagtcccataaagctctgtctgatctggagcttgtggcccagtcaattatcatcatttttgctgcctatgacacaactagcaccactctccccttcattatgtatgaactggccactcaccctgatgtccagcagaaactgcaggaggagattgacgcagttttacccaataaggcacctgtcacctacgatgccctggtacagatggagtaccttgacatggtggtgaatgaaacgctcagattattcccagttgttagtagagttacgagagtctgcaagaaagatattgaaatcaatggagtgttcattcccaaagggttagcagtgatggttccaatctatgctcttcaccatgacccaaagtactggacagagcctgagaagttctgccctgaaaggttcagtaagaagaacaaggacagcatagatctttacagatacataccttttggagctggaccccgaaactgcattggcatgaggtttgctctcacaaacataaaacttgctgtcattagagcactgcagaacttctccttcaaaccttgtaaagagactcagatcccactgaaattagacaatctaccaattcttcaaccagaaaaacctattgttctaaaagtgcacttaagagatgggattacaagtggaccctgactttccctaaggacttccactttgttcaagaaagctgtatcccagaacactagacacttcaaattgttttgtgaataaaactcagaaatgaagatgagctt

SEQ ID NO: 124506 - DNA, 1709 bp, Homo sapiens
  Payload ID: 4452
  Gene Symbol: CYP3A43
  Gene Name: cytochrome P450, family 3, subfamily A, polypeptide 43
  Uniprot ID: Q9HB55
  ENST ID: ENST00000354829
  CDS Start-End: 104-1615
acctctgggcagagaaacaaagctctatatgcacagcccagcaaagagcagcacacagctgaaagaaaaactcagaagacagagctgaaaaagaaaactggtgatggatctcattccaaactttgccatggaaacatgggttcttgtggctaccagcctggtactcctctatatttatgggacccattcacataaactttttaagaagctgggaattcctgggccaacccctctgccttttctgggaactattttgttctaccttaggggtctttggaattttgacagagaatgtaatgaaaaatacggagaaatgtgggggctgtatgaggggcaacagcccatgctggtcatcatggatcccgacatgatcaaaacagtgttagtgaaagaatgttactctgtcttcacaaaccagatgcctttaggtccaatgggatttctgaaaagtgccttaagttttgctgaagatgaagaatggaagagaatacgaacattgctatctccagctttcaccagtgtaaaattcaaggaaatggtccccatcatttcccaatgtggagatatgttggtgagaagcctgaggcaggaagcagagaacagcaagtccatcaacttgaaagatttctttggggcctacaccatggatgtaatcactggcacattatttggagtgaacttggattctctcaacaatccacaagatccctttctgaaaaatatgaagaagcttttaaaattggattttttggatccctttttactcttaatatcactctttccatttcttaccccagtttttgaagccctaaatatcggtttgtttccaaaagatgttacccattttttaaaaaattccattgaaaggatgaaagaaagtcgcctcaaagataaacaaaagcatcgagtagatttctttcaacagatgatcgactcccagaattccaaagaaacaaagtcccataaagctctgtctgatctggagcttgtggcccagtcaattatcatcatttttgctgcctatgacacaactagcaccactctccccttcattatgtatgaactggccactcaccctgatgtccagcagaaactgcaggaggagattgacgcagttttacccaataaggcacctgtcacctacgatgccctggtacagatggagtaccttgacatggtggtgaatgaaacgctcagattattcccagttgttagtagagttacgagagtctgcaagaaagatattgaaatcaatggagtgttcattcccaaagggttagcagtgatggttccaatctatgctcttcaccatgacccaaagtactggacagagcctgagaagttctgccctgaaaggttcagtaagaagaacaaggacagcatagatctttacagatacataccttttggagctggaccccgaaactgcattggcatgaggtttgctctcacaaacataaaacttgctgtcattagagcactgcagaacttctccttcaaaccttgtaaagagactcagatcccactgaaattagacaatctaccaattcttcaaccagaaaaacctattgttctaaaagtgcacttaagagatgggattacaagtggaccctgactttccctaaggacttccactttgttcaagaaagctgtatcccagaacactagacacttcaaattgttttgtgaataaaactcagaaatgaaga

SEQ ID NO: 124507 - DNA, 1313 bp, Homo sapiens
  Payload ID: 4452
  Gene Symbol: CYP3A43
  Gene Name: cytochrome P450, family 3, subfamily A, polypeptide 43
  ENST ID: ENST00000433277
  CDS Start-End: 68-358
cccagcaaagagcagcacacagctgaaagaaaaactcagaagacagagctgaaaaagaaaactggtgatggatctcattccaaactttgccatggaaacatgggttcttgtggctaccagcctggtactcctctatatttatgggacccattcacataaactttttaagaagctgggaattcctgggccaacccctctgccttttctgggaactattttgttctaccttaggcctttaggtccaatgggatttctgaaaagtgccttaagttttgctgaagatgaagaatggaagagaatacgaacattgctatctccagctttcaccagtgtaaaattcaaggaagtaagaaaataagatggtccccatcatttcccaatgtggagatatgttggtgagaagcctgaggcaggaagcagagaacagcaagtccatcaacttgaaagatttctttggggcctacaccatggatgtaatcactggcacattatttggagtgaacttggattctctcaacaatccacaagatccctttctgaaaaatatgaagaagcttttaaaattggattttttggatccctttttactcttaatatacagagtctcgctgtgttgcctaggccggagtgcatggtgcgatctgggctcactgaaacctccacctcctgggttcgagtgattctcctgcctcagcctcctgaggagctgggattacagcatcgagtagatttctttcaacagatgatcgactcccagaattccaaagaaacaaagtcccataaagctctgtctgatctggagcttgtggcccagtcaattatcatcatttttgctgcctatgacacaactagcaccactctccccttcattatgtatgaactggccactcaccctgatgtccagcagaaactgcaggaggagattgacgcagttttacccaataaggcacctgtcacctacgatgccctggtacagatggagtaccttgacatggtggtgaatgaaacgctcagattattcccagttgttagtagagttacgagagtctgcaagaaagatattgaaatcaatggagtgttcattcccaaagggttagcagtgatggttccaatctatgctcttcaccatgacccaaagtactggacagagcctgagaagttctgccctgaaagatcccactgaaattagacaatctaccaattcttcaaccagaaaaacctattgttctaaaagtgcacttaagagatgggattacaagtggaccctgactttccctaaggacttccactttgttcaagaaagctgtatccca

SEQ ID NO: 124508 - DNA, 990 bp, Homo sapiens
  Payload ID: 4452
  Gene Symbol: CYP3A43
  Gene Name: cytochrome P450, family 3, subfamily A, polypeptide 43
  ENST ID: ENST00000415413
  CDS Start-End: 68-946
cccagcaaagagcagcacacagctgaaagaaaaactcagaagacagagctgaaaaagaaaactggtgatggatctcattccaaactttgccatggaaacatgggttcttgtggctaccagcctggtactcctctatatttatgggacccattcacataaactttttaagaagctgggaattcctgggccaacccctctgccttttctgggaactattttgttctaccttaggcatcgagtagatttctttcaacagatgatcgactcccagaattccaaagaaacaaagtcccataaagctctgtctgatctggagcttgtggcccagtcaattatcatcatttttgctgcctatgacacaactagcaccactctccccttcattatgtatgaactggccactcaccctgatgtccagcagaaactgcaggaggagattgacgcagttttacccaataaggcacctgtcacctacgatgccctggtacagatggagtaccttgacatggtggtgaatgaaacgctcagattattcccagttgttagtagagttacgagagtctgcaagaaagatattgaaatcaatggagtgttcattcccaaagggttagcagtgatggttccaatctatgctcttcaccatgacccaaagtactggacagagcctgagaagttctgccctgaaaggttcagtaagaagaacaaggacagcatagatctttacagatacataccttttggagctggaccccgaaactgcattggcatgaggtttgctctcacaaacataaaacttgctgtcattagagcactgcagaacttctccttcaaaccttgtaaagagactcagatcccactgaaattagacaatctaccaattcttcaaccagaaaaacctattgttctaaaagtgcacttaagagatgggattacaagtggaccctgactttccctaaggacttccactttgttcaagaaagctgtatccca

SEQ ID NO: 124509 - DNA, 733 bp, Homo sapiens
  Payload ID: 4452
  Gene Symbol: CYP3A43
  Gene Name: cytochrome P450, family 3, subfamily A, polypeptide 43
  ENST ID: ENST00000444905
  CDS Start-End: 100-603
cccagcaaagagcagcacacagctgaaagaaaaactcagaagacagagctgaaaaagaaaactggtgatggatctcattccaaactttgccatggaaacatgggttcttgtggctaccagcctggtactcctctatatcatcgagtagatttctttcaacagatgatcgactcccagaattccaaagaaacaaagtcccataaagctctgtctgatctggagcttgtggcccagtcaattatcatcatttttgctgcctatgacacaactagcaccactctccccttcattatgtatgaactggccactcaccctgatgtccagcagaaactgcaggaggagattgacgcagttttacccaataaggcacctgtcacctacgatgccctggtacagatggagtaccttgacatggtggtgaatgaaacgctcagattattcccagttgttagtagagttacgagagtctgcaagaaagatattgaaatcaatggagtgttcattcccaaagggttagcagtgatggttccaatctatgctcttcaccatgacccaaagtactggacagagcctgagaagttctgccctgaaagatcccactgaaattagacaatctaccaattcttcaaccagaaaaacctattgttctaaaagtgcacttaagagatgggattacaagtggaccctgactttccctaaggacttccactttgttcaagaaagctgtatccca

SEQ ID NO: 124510 - DNA, 1633 bp, Homo sapiens
  Payload ID: 4452
  Gene Symbol: CYP3A43
  Gene Name: cytochrome P450, family 3, subfamily A, polypeptide 43
  Uniprot ID: Q9HB55
  ENST ID: ENST00000434806
  CDS Start-End: 1-753
atggatctcattccaaactttgccatggaaacatgggttcttgtggctaccagcctggtactcctctatatttatgggacccattcacataaactttttaagaagctgggaattcctgggccaacccctctgccttttctgggaactattttgttctaccttaggggtctttggaattttgacagagaatgtaatgaaaaatacggagaaatgtgggggctgtatgaggggcaacagcccatgctggtcatcatggatcccgacatgatcaaaacagtgttagtgaaagaatgttactctgtcttcacaaaccagatgcctttaggtccaatgggatttctgaaaagtgccttaagttttgctgaagatgaagaatggaagagaatacgaacattgctatctccagctttcaccagtgtaaaattcaaggaaatggtccccatcatttcccaatgtggagatatgttggtgagaagcctgaggcaggaagcagagaacagcaagtccatcaacttgaaagatttctttggggcctacaccatggatgtaatcactggcacattatttggagtgaacttggattctctcaacaatccacaagatccctttctgaaaaatatgaagaagcttttaaaattggattttttggatccctttttactcttaatatacagagtctcgctgtgttgcctaggccggagtgcatggtgcgatctgggctcactgaaacctccacctcctgggttcgagtgattctcctgcctcagcctcctgaggagctgggattacagcactctttccatttcttaccccagtttttgaagccctaaatatcggtttgtttccaaaagatgttacccattttttaaaaaattccattgaaaggatgaaagaaagtcgcctcaaagataaacaaaagcatcgagtagatttctttcaacagatgatcgactcccagaattccaaagaaacaaagtcccataaagctctgtctgatctggagcttgtggcccagtcaattatcatcatttttgctgcctatgacacaactagcaccactctccccttcattatgtatgaactggccactcaccctgatgtccagcagaaactgcaggaggagattgacgcagttttacccaataaggcacctgtcacctacgatgccctggtacagatggagtaccttgacatggtggtgaatgaaacgctcagattattcccagttgttagtagagttacgagagtctgcaagaaagatattgaaatcaatggagtgttcattcccaaagggttagcagtgatggttccaatctatgctcttcaccatgacccaaagtactggacagagcctgagaagttctgccctgaaaggttcagtaagaagaacaaggacagcatagatctttacagatacataccttttggagctggaccccgaaactgcattggcatgaggtttgctctcacaaacataaaacttgctgtcattagagcactgcagaacttctccttcaaaccttgtaaagagactcagatcccactgaaattagacaatctaccaattcttcaaccagaaaaacctattgttctaaaagtgcacttaagagatgggattacaagtggaccctga

SEQ ID NO: 124511 - DNA, 1279 bp, Homo sapiens
  Payload ID: 4452
  Gene Symbol: CYP3A43
  Gene Name: cytochrome P450, family 3, subfamily A, polypeptide 43
  ENST ID: ENST00000436834
  CDS Start-End: 74-244
gcacagcccagcaaagagcagcacacagctgaaagaaaaactcagaagacagagctgaaaaagaaaactggtgatggatctcattccaaactttgccatggaaacatgggttcttgtggctaccagcctggtactcctctatatggtctttggaattttgacagagaatgtaatgaaaaatacggagaaatgtggggcctttaggtccaatgggatttctgaaaagtgccttaagttttgctgaagatgaagaatggaagagaatacgaacattgctatctccagctttcaccagtgtaaaattcaaggaagtaagaaaataaggtgatttataattagaaacttaaaggatgaatctggagacaggtaatggtccccatcatttcccaatgtggagatatgttggtgagaagcctgaggcaggaagcagagaacagcaagtccatcaacttgaaagatttctttggggcctacaccatggatgtaatcactggcacattatttggagtgaacttggattctctcaacaatccacaagatccctttctgaaaaatatgaagaagcttttaaaattggattttttggatccctttttactcttaatatacagagtctcgctgtgttgcctaggccggagtgcatggtgcgatctgggctcactgaaacctccacctcctgggttcgagtgattctcctgcctcagcctcctgaggagctgggattacagcatcgagtagatttctttcaacagatgatcgactcccagaattccaaagaaacaaagtcccataaagctctgtctgatctggagcttgtggcccagtcaattatcatcatttttgctgcctatgacacaactagcaccactctccccttcattatgtatgaactggccactcaccctgatgtccagcagaaactgcaggaggagattgacgcagttttacccaataaggcacctgtcacctacgatgccctggtacagatggagtaccttgacatggtggtgaatgaaacgctcagattattcccagttgttagtagagttacgagagtctgcaagaaagatattgaaatcaatggagtgttcattcccaaagggttagcagtgatggttccaatctatgctcttcaccatgacccaaagtactggacagagcctgagaagttctgccctgaaagatcccactgaaattagacaatctaccaattcttcaaccagaaaaacctattgttctaaaagtgcacttaagagatgggattacaagtggaccctga

SEQ ID NO: 124512 - DNA, 1255 bp, Homo sapiens
  Payload ID: 4452
  Gene Symbol: CYP3A43
  Gene Name: cytochrome P450, family 3, subfamily A, polypeptide 43
  Uniprot ID: Q9HB55
  ENST ID: ENST00000417625
  CDS Start-End: 74-1255
gcacagcccagcaaagagcagcacacagctgaaagaaaaactcagaagacagagctgaaaaagaaaactggtgatggatctcattccaaactttgccatggaaacatgggttcttgtggctaccagcctggtactcctctatatttatgggacccattcacataaactttttaagaagctgggaattcctgggccaacccctctgccttttctgggaactattttgttctaccttaggaggtctctgaataagattcccagctgggcgtggtggctcacgcctgtaatcccagcactttgggaggctgaagcaggaggatcacctaaggtcaggagttcgagaccagctttgccaacatgggtctttggaattttgacagagaatgtaatgaaaaatacggagaaatgtggggcactctttccatttcttaccccagtttttgaagccctaaatatcggtttgtttccaaaagatgttacccattttttaaaaaattccattgaaaggatgaaagaaagtcgcctcaaagataaacaaaagcatcgagtagatttctttcaacagatgatcgactcccagaattccaaagaaacaaagtcccataaagctctgtctgatctggagcttgtggcccagtcaattatcatcatttttgctgcctatgacacaactagcaccactctccccttcattatgtatgaactggccactcaccctgatgtccagcagaaactgcaggaggagattgacgcagttttacccaataaggcacctgtcacctacgatgccctggtacagatggagtaccttgacatggtggtgaatgaaacgctcagattattcccagttgttagtagagttacgagagtctgcaagaaagatattgaaatcaatggagtgttcattcccaaagggttagcagtgatggttccaatctatgctcttcaccatgacccaaagtactggacagagcctgagaagttctgccctgaaaggttcagtaagaagaacaaggacagcatagatctttacagatacataccttttggagctggaccccgaaactgcattggcatgaggtttgctctcacaaacataaaacttgctgtcattagagcactgcagaacttctccttcaaaccttgtaaagagactcagatcccactgaaattagacaatctaccaattcttcaaccagaaaaacctattgttctaaaagtgcacttaagagatgggattacaagtggaccctga

SEQ ID NO: 124513 - DNA, 328 bp, Homo sapiens
  Payload ID: 4452
  Gene Symbol: CYP3A43
  Gene Name: cytochrome P450, family 3, subfamily A, polypeptide 43
  ENST ID: ENST00000631161
  CDS Start-End: 104-328
acctctgggcagagaaacaaagctctatatgcacagcccagcaaagagcagcacacagctgaaagaaaaactcagaagacagagctgaaaaagaaaactggtgatggatctcattccaaactttgccatggaaacatgggttcttgtggctaccagcctggtactcctctatatttatgggacccattcacataaactttttaagaagctgggaattcctgggccaacccctctgccttttctgggaactattttgttctaccttaggggtctttggaattttgacagagaatgtaatgaaaaatacggagaaatgtggggaccctaa

SEQ ID NO: 124514 - DNA, 1720 bp, Homo sapiens
  Payload ID: 4453
  Gene Symbol: CYP3A5
  Gene Name: cytochrome P450, family 3, subfamily A, polypeptide 5
  Uniprot ID: P20815
  ENST ID: ENST00000222982
  CDS Start-End: 101-1609
gctgtgcagggcagggaagctccaggcaaacagcccagcaaacagcagcactcagctaaaaggaagactcacagaacacagttgaagaaggaaagtggcgatggacctcatcccaaatttggcggtggaaacctggcttctcctggctgtcagcctggtgctcctctatctatatgggacccgtacacatggactttttaagagactgggaattccagggcccacacctctgcctttgttgggaaatgttttgtcctatcgtcagggtctctggaaatttgacacagagtgctataaaaagtatggaaaaatgtggggaacgtatgaaggtcaactccctgtgctggccatcacagatcccgacgtgatcagaacagtgctagtgaaagaatgttattctgtcttcacaaatcgaaggtctttaggcccagtgggatttatgaaaagtgccatctctttagctgaggatgaagaatggaagagaatacggtcattgctgtctccaaccttcaccagcggaaaactcaaggagatgttccccatcattgcccagtatggagatgtattggtgagaaacttgaggcgggaagcagagaaaggcaagcctgtcaccttgaaagacatctttggggcctacagcatggatgtgattactggcacatcatttggagtgaacatcgactctctcaacaatccacaagacccctttgtggagagcactaagaagttcctaaaatttggtttcttagatccattatttctctcaataatactctttccattccttaccccagtttttgaagcattaaatgtctctctgtttccaaaagataccataaattttttaagtaaatctgtaaacagaatgaagaaaagtcgcctcaacgacaaacaaaagcaccgactagatttccttcagctgatgattgactcccagaattcgaaagaaactgagtcccacaaagctctgtctgatctggagctcgcagcccagtcaataatcttcatttttgctggctatgaaaccaccagcagtgttctttccttcactttatatgaactggccactcaccctgatgtccagcagaaactgcaaaaggagattgatgcagttttgcccaataaggcaccacctacctatgatgccgtggtacagatggagtaccttgacatggtggtgaatgaaacactcagattattcccagttgctattagacttgagaggacttgcaagaaagatgttgaaatcaatggggtattcattcccaaagggtcaatggtggtgattccaacttatgctcttcaccatgacccaaagtactggacagagcctgaggagttccgccctgaaaggttcagtaagaagaaggacagcatagatccttacatatacacaccctttggaactggacccagaaactgcattggcatgaggtttgctctcatgaacatgaaacttgctctaatcagagtccttcagaacttctccttcaaaccttgtaaagaaacacagatccccttgaaattagacacgcaaggacttcttcaaccagaaaaacccattgttctaaaggtggattcaagagatggaaccctaagtggagaatgagttattctaaggatttctactttggtcttcaagaaagctgtgccccagaacaccagagatttcaacttagtcaataaaaccttgaaataaagatgggcttaatctaatgta

SEQ ID NO: 124515 - DNA, 3320 bp, Homo sapiens
  Payload ID: 4453
  Gene Symbol: CYP3A5
  Gene Name: cytochrome P450, family 3, subfamily A, polypeptide 5
  ENST ID: ENST00000339843
  CDS Start-End: 103-222
ctgctgtgcagggcagggaagctccaggcaaacagcccagcaaacagcagcactcagctaaaaggaagactcacagaacacagttgaagaaggaaagtggcgatggacctcatcccaaatttggcggtggaaacctggcttctcctggctgtcagcctggtgctcctctatctgatgagagtccccaaatcagcgaagagtccacttactaaacagacataaggaaatgaagtgtcctggaagaattcctgcctgaacctctcaggagcatttgaggacatttatcaagtattcactccaggattgggactatgaagacttcagctgctttcagctaatcattgagacttttcaggggtctcagaatagtcaggaaaggacctgatgagtgaatgcaattactgatgttggagttgctgttattatttatcgtgtacatattacctccctctcttgaccattccagttcctgagtaactcaccagccctctgatctataaagtcacaatccctgtgacctgatttctgtttcactttgtagatatgggacccgtacacatggactttttaagagactgggaattccagggcccacacctctgcctttgttgggaaatgttttgtcctatcgtcagggtctctggaaatttgacacagagtgctataaaaagtatggaaaaatgtggggtatctcttccctgtttggaccacattacccttcatcatatgaagccttgggtggctcctgtgtgagactcttgctgtgtgtcacaccctaatgaactagaacctaaggttgctgtgtgtcgtacaactagggctccgttgtccccacacagaacgtatgaaggtcaactccctgtgctggccatcacagatcccgacgtgatcagaacagtgctagtgaaagaatgttattctgtcttcacaaatcgaaggtctttaggcccagtgggatttatgaaaagtgccatctctttagctgaggatgaagaatggaagagaatacggtcattgctgtctccaaccttcaccagcggaaaactcaaggagatgttccccatcattgcccagtatggagatgtattggtgagaaacttgaggcgggaagcagagaaaggcaagcctgtcaccttgaaagacatctttggggcctacagcatggatgtgattactggcacatcatttggagtgaacatcgactctctcaacaatccacaagacccctttgtggagagcactaagaagttcctaaaatttggtttcttagatccattatttctctcaataatactctttccattccttaccccagtttttgaagcattaaatgtctctctgtttccaaaagataccataaattttttaagtaaatctgtaaacagaatgaagaaaagtcgcctcaacgacaaacaaaaggtaaaatctgatggtggttaaatgacgatgtttaggttttgataaatttagattttatacacatgatagagcatgtatctgtatttttaaaaataaagacagagaacttatgtttagaacaagagaagccatttggtagaaataaagaaggagattggggaaggagatgagaatgagtcagagagatagcatttaaaacttgaaatcaggcacaacaattagtatgtcatgatataaacagtattgagataaaattttaccacttctcttccctttaataaattgtcaaaggataaagtttcctgtttgaaaatatattttactggtattgtgctttcctcatatcacagattggtaaagaatcattttaagtccaagactcttattttacatattctgcaattaaaggtcctatgaggctacctgccgactgctgacatgtagtgtgtggtaaatgtgagtgtttcacagcctggagtgaacaggggtcttctctgagaattgaggttgcaaggctggctaactcagctttgccttcacgagccctagaggccagccgaaggatgtctgcaggtcagggagacaggaccaggtaacccagctgtcactgaagattatatagagtttgagaatgttggaatatttgaaaatgctcccccaaaaaagctgctgatgagttctggaaatgtcaggagattaatctatacggacactgctgaagaaaaaggtagaagaataaaagatccagtacttcttcctgggtaagcagttatgaccagagatggaaccggcaactctttggccagaaagctgtatccaaaagacagagaagatgagaaacagggagggcaaaggcgaaaaagcaattggacatgatagctagatttgtttcaggaaaacatcctgctttccaaggatttagatgaatgtttttgttcactggtgactcaggtaacacgtcttcaagaagccatagggaggttgagggagggaagtcaagaagggaggttgaggactgcacttttgatttacttctgacttcacgagtcactttctgccaaagaaatctctccttttgcttctagcaccgactagatttccttcagctgatgattgactcccagaattcgaaagaaactgagtcccacaaagctctgtctgatctggagctcgcagcccagtcaataatcttcatttttgctggctatgaaaccaccagcagtgttctttccttcactttatatgaactggccactcaccctgatgtccagcagaaactgcaaaaggagattgatgcagttttgcccaataaggcaccacctacctatgatgccgtggtacagatggagtaccttgacatggtggtgaatgaaacactcagattattcccagttgctattagacttgagaggacttgcaagaaagatgttgaaatcaatggggtattcattcccaaagggtcaatggtggtgattccaacttatgctcttcaccatgacccaaagtactggacagagcctgaggagttccgccctgaaaggttcagtaagaagaaggacagcatagatccttacatatacacaccctttggaactggacccagaaactgcattggcatgaggtttgctctcatgaacatgaaacttgctctaatcagagtccttcagaacttctccttcaaaccttgtaaagaaacacagatccccttgaaattagacacgcaaggacttcttcaaccagaaaaacccattgttctaaaggtggattcaagagatggaaccctaagtggagaatgagttattctaaggatttctactttggtcttcaagaaagctgtgccccagaacaccagagatttcaacttagtcaataaaaccttgaaataaagatgggcttaatct

SEQ ID NO: 124516 - DNA, 1075 bp, Homo sapiens
  Payload ID: 4453
  Gene Symbol: CYP3A5
  Gene Name: cytochrome P450, family 3, subfamily A, polypeptide 5
  Uniprot ID: P20815
  ENST ID: ENST00000439761
  CDS Start-End: 101-523
gctgtgcagggcagggaagctccaggcaaacagcccagcaaacagcagcactcagctaaaaggaagactcacagaacacagttgaagaaggaaagtggcgatggacctcatcccaaatttggcggtggaaacctggcttctcctggctgtcagcctggtgctcctctatctatatgggacccgtacacatggactttttaagagactgggaattccagggcccacacctctgcctttgttgggaaatgttttgtcctatcgtcagggtctctggaaatttgacacagagtgctataaaaagtatggaaaaatgtggggaacgtatgaaggtcaactccctgtgctggccatcacagatcccgacgtgatcagaacagtgctagtgaaagaatgttattctgtcttcacaaatcgaaggatttgtgcaacgaccagcaccatcaagatgcagacccattccgtcaccatgtggctccctcctgctgtcctacagtcacaacatggagtttgtctttttctctgacaggttctatatcagagcaaacttttatttatttgaggaggccaatgtattaatatttccttttatggattgttcttttggtgttaagtctgaaaatcctttgcttagccctccttcctacattgctttttctaagagttatatagtttaacactttacaaaatgtaactctattacccattttgtgttaatatttgcataagttatgagatttagatcaaggttcattttctgtggactatggctgtccaaatgttccaacaccattttggaaaggtaggcatattgtcaaaactcagctgagtatattttgtgaatctatttcttattgtttactcctccactaataccacactgtggtgactctagtagctgtacagtaactcttaacatcatatagggcaattctttccactttattgatttatattttcagaatggctttagcttttcttgtcccttgcctttccataaaaattcagaataagcttgtaagtgtctacaaacaaacctgccataattttgataagaattaaagcagaggtgtccaat

SEQ ID NO: 124517 - DNA, 594 bp, Homo sapiens
  Payload ID: 4453
  Gene Symbol: CYP3A5
  Gene Name: cytochrome P450, family 3, subfamily A, polypeptide 5
  ENST ID: ENST00000456417
  CDS Start-End: 98-217
gtgcagggcagggaagctccaggcaaacagcccagcaaacagcagcactcagctaaaaggaagactcacagaacacagttgaagaaggaaagtggcgatggacctcatcccaaatttggcggtggaaacctggcttctcctggctgtcagcctggtgctcctctatctgatgagagtccccaaatcagcgaagagtccacttactaaacagacataaggaaatgaagtgtcctggaagaattcctgcctgaacctctcaggagcatttgaggacatttatcaagtattcactccaggattgggactatgaagacttcagctgctttcagctaatcattgagacttttcaggggtctcagaatagtcaggaaaggacctgatgagtgaatgcaattactgatgttggagttgctgttattatttatcgtatatgggacccgtacacatggactttttaagagactgggaattccagggcccacacctctgcctttgttgggaaatgttttgtcctatcgtcagggtctctggaaatttgacacagagtgctataaaaagtatggaaaaatgtggggaacgtatgaaggtcaactc

SEQ ID NO: 124518 - DNA, 1971 bp, Homo sapiens
  Payload ID: 4454
  Gene Symbol: CYP3A7
  Gene Name: cytochrome P450, family 3, subfamily A, polypeptide 7
  Uniprot ID: P24462
  ENST ID: ENST00000336374
  CDS Start-End: 4-1515
gtgatggatctcatcccaaacttggccgtggaaacctggcttctcctggctgtcagcctgatactcctctatctatatggaacccgtacacatggactttttaagaagcttggaattccagggcccacacctctgccttttttgggaaatgctttgtccttccgtaagggctattggacgtttgacatggaatgttataaaaagtatagaaaagtctggggtatttatgactgtcaacagcctatgctggctatcacagatcccgacatgatcaaaacagtgctagtgaaagaatgttattctgtcttcacaaaccggaggcctttcgggccagtgggatttatgaaaaatgccatctctatagctgaggatgaagaatggaagagaatacgatcattgctgtctccaacattcaccagcggaaaactcaaggagatggtccctatcattgcccagtatggagatgtgttggtgagaaatctgaggcgggaagcagagacaggcaagcctgtcaccttgaaacacgtctttggggcctacagcatggatgtgatcactagcacatcatttggagtgagcatcgactctctcaacaatccacaagacccctttgtggaaaacaccaagaagcttttaagatttaatccattagatccattcgttctctcaataaaagtctttccattccttaccccaattcttgaagcattaaatatcactgtgtttccaagaaaagttataagttttctaacaaaatctgtaaaacagataaaagaaggtcgcctcaaagagacacaaaagcaccgagtggatttccttcagctgatgattgactctcagaattcaaaagactctgagacccacaaagctctgtctgatctggagctcatggcccaatcaattatctttatttttgctggctatgaaaccacgagcagtgttctctccttcattatatatgaactggccactcaccctgatgtccagcagaaagtgcagaaggaaattgatacagttttacccaataaggcaccacccacctatgatactgtgctacagttggagtatcttgacatggtggtgaatgaaacactcagattattcccagttgctatgagacttgagagggtctgcaaaaaagatgttgaaatcaatgggatgtttattcccaaaggggtggtggtgatgattccaagctatgttcttcatcatgacccaaagtactggacagagcctgagaagttcctccctgaaaggttcagtaaaaagaacaaggacaacatagatccttacatatacacaccctttggaagtggacccagaaactgcattggcatgaggtttgctctcgtgaacatgaaacttgctctagtcagagtccttcagaacttctccttcaaaccttgtaaagaaacacagatccccctgaaattacgctttggaggacttcttctaacagaaaaacccattgttctaaaggctgagtcaagggatgagaccgtaagtggagcctgatttccctaaggacttctggtttgctctttaagaaagctgtgccccagaacaccagagacctcaaattactttacaaatagaaccctgaaatgaagacgggcttcatccaatgtgctgcataaataatcagggattctgtacgtgcattgtgctctctcatggtctgtatagagtgttatacttggtaatatagaggagatgaccaaatcagtgctggggaagtagatttggcttctctgcttctcataggactatctccaccacccccagttagcaccattaactcctcctgagctctgataacataattaacatttctcaataatttcaaccacaatcattaataaaaataggaattattttgatggctctaacagtgacatttatatcatgtgttatatctgtagtattctatagtaagctttatattaagcaaatcaataaaaacctctttac

SEQ ID NO: 124519 - DNA, 2176 bp, Homo sapiens
  Payload ID: 4455
  Gene Symbol: CYP39A1
  Gene Name: cytochrome P450, family 39, subfamily A, polypeptide 1
  Uniprot ID: Q9NYL5
  ENST ID: ENST00000275016
  CDS Start-End: 205-1614
gaagtggaggtgggagggagcgacaatggaaaaatcacctgaaaactgggacagaggaaggaagctacagttacgaaggagagctgcaaaagttgcagcagaaaggttgggagtcccgacaggttccgtagcccacagaaaagaagcaagggacggcaggactgtttcacacttttctgcttctggaaggtgctggacaaaaacatggaactaatttccccaacagtgattataatcctgggttgccttgctctgttcttactccttcagcggaagaatttgcgtagacccccgtgcatcaagggctggattccttggattggagttggatttgagtttgggaaagcccctctagaatttatagagaaagcaagaatcaagtatggaccaatatttacagtctttgctatgggaaaccgaatgacctttgttactgaagaagaaggaattaatgtgtttctaaaatccaaaaaagtagattttgaactagcagtgcaaaatatcgtttatcgtacagcatcaattccaaagaatgtctttttagcactgcatgaaaaactctatattatgttgaaagggaaaatggggactgtcaatctccatcagtttactgggcaactgactgaagaattacatgaacaactggagaatttaggcactcatgggacaatggacctgaacaacttagtaagacatctcctttatccagtcacagtgaatatgctctttaataaaagtttgttttccacaaacaagaaaaaaatcaaggagttccatcagtattttcaagtttatgatgaagattttgagtatgggtcccagttgccagagtgtcttctaagaaactggtcaaaatccaaaaagtggttcctggaactgtttgagaaaaacattccagatataaaagcatgtaaatctgcaaaagataattccatgacattattgcaagctacgctggatattgtagagacggaaacaagtaaggaaaactcacccaattatgggctcttactgctttgggcttctctgtctaatgctgttcctgttgcattttggacacttgcatacgtcctttctcatcctgatatccacaaggccattatggaaggcatatcttctgtgtttggcaaagcaggcaaagataagattaaagtgtctgaggatgacctggagaatctccttctaattaaatggtgtgttttggaaaccattcgtttaaaagctcctggtgtcattactagaaaagtggtgaagcctgtggaaattttgaattacatcattccttctggtgacttgttgatgttgtctccattttggctgcatagaaatccaaagtattttcctgagcctgaattgttcaaacctgaacgttggaaaaaggcaaatttagagaagcactctttcttggactgcttcatggcatttggaagcgggaagttccagtgtcctgcaaggtggtttgctctgttagaggttcagatgtgtattattttaatactttataaatatgactgtagtcttctggacccattacccaaacagagttatctccatttggtgggtgtcccccagccggaagggcaatgccgaattgaatataaacaaagaatatgacatctgttgggcctcacaaggaccagggccttctggaggagtggcactaccccacctggcagcacctagacctgagctctacaaaaacacactgcttcactttgttttaggacttagttcaagaacacattcaaatggtgcatgtgtttggtatcttcaacagtagaccaagaatctaacatcactctcagtaatatagagaccggaatacatggtttataggaaatgatcaaatgatccaaaaaaactccacattttttaagaagttggaatttgatttcatgcataactgtattaaaacattaaatagaaataatgtcatttgaatgaaaatcttatcacattaaattcactgtgaaggcagcatacttaaatttttattttgaaaagtctaaaaggcttagatttttaaaatttaataattatttctacaaattttctatttttcttgaggtgattctcaactagcaattggaactcctaggctctattaacataattctttattgtaaacgtatctaatgctaaaagtaataaaatggtagttttctgagacctgtga

SEQ ID NO: 124520 - DNA, 2269 bp, Homo sapiens
  Payload ID: 4455
  Gene Symbol: CYP39A1
  Gene Name: cytochrome P450, family 39, subfamily A, polypeptide 1
  ENST ID: ENST00000619708
  CDS Start-End: 590-1483
ctgcccctccttgcattttttccgcgctggctgagattcaaagagaagtggaggtgggagggagcgacaatggaaaaatcacctgaaaactgggacagaggaaggaagctacagttacgaaggagagctgcaaaagttgcagcagaaaggttgggagtcccgacaggttccgtagcccacagaaaagaagcaagggacggcaggactgtttcacacttttctgcttctggaaggtgctggacaaaaacatggaactaatttccccaacagtgattataatcctgggttgccttgctctgttcttactccttcagcggaagaatttgcgtagacccccgtgcatcaagggctggattccttggattggagttggatttgagtttgggaaagcccctctagaatttatagagaaagcaagaatcaagtatggaccaatatttacagtctttgctatgggaaaccgaatgacctttgttactgaagaagaaggaattaatgtgtttctaaaatccaaaaaagtagattttgaactagcagtgcaaaatatcgtttatcgtacagacatctcctttatccagtcacagtgaatatgctctttaataaaagtttgttttccacaaacaagaaaaaaatcaaggagttccatcagtattttcaagtttatgatgaagattttgagtatgggtcccagttgccagagtgtcttctaagaaactggtcaaaatccaaaaagtggttcctggaactgtttgagaaaaacattccagatataaaagcatgtaaatctgcaaaagataattccatgacattattgcaagctacgctggatattgtagagacggaaacaagtaaggaaaactcacccaattatgggctcttactgctttgggcttctctgtctaatgctgttcctgttgcattttggacacttgcatacgtcctttctcatcctgatatccacaaggccattatggaaggcatatcttctgtgtttggcaaagcaggcaaagataagattaaagtgtctgaggatgacctggagaatctccttctaattaaatggtgtgttttggaaaccattcgtttaaaagctcctggtgtcattactagaaaagtggtgaagcctgtggaaattttgaattacatcattccttctggtgacttgttgatgttgtctccattttggctgcatagaaatccaaagtattttcctgagcctgaattgttcaaacctgaacgttggaaaaaggcaaatttagagaagcactctttcttggactgcttcatggcatttggaagcgggaagttccagtgtcctgcaaggtggtttgctctgttagaggttcagatgtgtattattttaatactttataaatatgactgtagtcttctggacccattacccaaacagagttatctccatttggtgggtgtcccccagccggaagggcaatgccgaattgaatataaacaaagaatatgacatctgttgggcctcacaaggaccagggccttctggaggagtggcactaccccacctggcagcacctagacctgagctctacaaaaacacactgcttcactttgttttaggacttagttcaagaacacattcaaatggtgcatgtgtttggtatcttcaacagtagaccaagaatctaacatcactctcagtaatatagagaccggaatacatggtttataggaaatgatcaaatgatccaaaaaaactccacattttttaagaagttggaatttgatttcatgcataactgtattaaaacattaaatagaaataatgtcatttgaatgaaaatcttatcacattaaattcactgtgaaggcagcatacttaaatttttattttgaaaagtctaaaaggcttagatttttaaaatttaataattatttctacaaattttctatttttcttgaggtgattctcaactagcaattggaactcctaggctctattaacataattctttattgtaaacgtatctaatgctaaaagtaataaaatggtagttttctgagacctgtgaggacaggaatggtgtcttacattcatttctacactttattatgctcaggattgcaccttctttacagagtatattcaataaatgtatgttgattgatgtattgatttatattttaattaacctggaagcattgttttgactcaaagtgtttgcaattatagtttggcagataccatatttttgctaatgcatagaaacacaaatataacggtatgccaagacaa

SEQ ID NO: 124521 - DNA, 2530 bp, Homo sapiens
  Payload ID: 4456
  Gene Symbol: CYP4A11
  Gene Name: cytochrome P450, family 4, subfamily A, polypeptide 11
  Uniprot ID: Q02928
  ENST ID: ENST00000310638
  CDS Start-End: 33-1592
ggggcactcagagatccagcaggtgctgcaccatgagtgtctctgtgctgagccccagcagactcctgggtgatgtctctggaatcctccaagcggcctccctgctcattctgcttctgctgctgatcaaggcagttcagctctacctgcacaggcagtggctgctcaaagccctccagcagttcccgtgccctccctcccactggctcttcgggcacatccaggagctccaacaggaccaggagctacaacggattcagaaatgggtggagacattcccaagtgcctgtcctcattggctatggggaggcaaagttcgtgtccagctctatgaccctgactatatgaaggtgattctggggagatcagacccgaaatcccatggttcctacagattcctggctccatggattgggtacggcttgctcctgttgaatgggcagacatggttccagcatcgacggatgctgaccccagccttccactatgacatcctgaagccctatgtggggctcatggcagactctgtacgagtgatgctggacaaatgggaagagctccttggccaggattcccctctggaggtctttcagcacgtctccttgatgaccctggacaccatcatgaagtgtgccttcagccatcagggcagcatccaggtggacaggaattctcagtcctacatacaggccattagtgacctgaacaacctggttttttcccgtgtgaggaatgcctttcaccagaatgacaccatctacagcctgacctctgctggccgctggacacaccgcgcctgccagctggcccatcagcacacagaccaagtgatccaactgaggaaggctcaactacagaaggagggggagctggagaagatcaagaggaagaggcatttggattttctggatatcctcctcttggccaaaatggagaatgggagcatcttgtcagacaaggacctccgtgctgaggtggacacgttcatgtttgagggccacgacaccacagccagtgggatctcctggatcctctatgctctggccacacaccccaagcatcaggagaggtgccgggaggagatccacagcctcctgggtgatggagcctccatcacctggaaccacctggaccagatgccctacaccaccatgtgcattaaggaggcactgaggctctacccaccggtgccaggcattggcagagagctcagcactcccgtcaccttccctgatgggcgctccttgcccaaaggtatcatggtcctcctctccatttatggccttcaccacaacccaaaagtgtggcccaacccagaggtgtttgaccctttccgttttgcaccgggttctgctcaacacagccacgctttcctgcccttctcaggaggatcaaggaactgcatcgggaaacaatttgccatgaacgagctgaaggtggccacggccctgaccctgctccgctttgagctgctgcctgatcccaccaggatccccatccccattgcacgacttgtgttgaaatccaaaaatggaatccacctgcgtctcaggaggctccctaacccttgtgaagacaaggaccagctttgagggcctccacctgccgtcctgtcttcctgacccccgcttctgtccccttcctgtctgcccatatcctgttttctgtctgcccaccttcccttcttcccacctgcctgctgtcccccagtctgcctgcccttctctctctcacctttctccaggctccctacctgcttgtctacctgtctcctacccacctgtatctcttgttgggagaaaagctgagtgttgggagaagctgaggccgagcttgcatgtctgacataatgtaaaagagtcttggatcatgtccaggatccagggtctaaaaccccttgtggcctttggaacaccaagctctgtgctgaagggtggaaggctaccctgacgcaccataatctaagcccggggcataaaacccctcgtggcttggatagaatccagggctcgtggctctggaatgtgtctgaacttgctgcctcctcgctccttgctctcccaggatcaattgtatcttgagttaaaagaacctgctctccattatctcaagtagcagagcagatgctaaaccgtcacagctgtaaatcatgtgcttaatgcaacatgccctttcgacccccacattctcaccacctgtttctttgtttgatcaccaataaataatctgcacttccagagctcggggccttcacagcctccatccttagctttggcgccctggacccactttctctctcaaactgtcttttctcactgctttgactctgccggactttgtcacccccacgacctggtgttgggtctgaacaccccaacatccctgaatctccacccacctcccaaactcctgcctgccctccagactgtctgcccatacacctgtctccttcttcctgcctgcttgtctgttcctatattagtttcctattactgctgtaataaactatcacaatctcagtgattttaaa

SEQ ID NO: 124522 - DNA, 1760 bp, Homo sapiens
  Payload ID: 4456
  Gene Symbol: CYP4A11
  Gene Name: cytochrome P450, family 4, subfamily A, polypeptide 11
  ENST ID: ENST00000371904
  CDS Start-End: 24-1586
agagatccagcaggtgctgcaccatgagtgtctctgtgctgagccccagcagactcctgggtgatgtctctggaatcctccaagcggcctccctgctcattctgcttctgctgctgatcaaggcagttcagctctacctgcacaggcagtggctgctcaaagccctccagcagttcccgtgccctccctcccactggctcttcgggcacatccaggagctccaacaggaccaggagctacaacggattcagaaatgggtggagacattcccaagtgcctgtcctcattggctatggggaggcaaagttcgtgtccagctctatgaccctgactatatgaaggtgattctggggagatcagacccgaaatcccatggttcctacagattcctggctccatggattgggtacggcttgctcctgttgaatgggcagacatggttccagcatcgacggatgctgaccccagccttccactatgacatcctgaagccctatgtggggctcatggcagactctgtacgagtgatgctggacaaatgggaagagctccttggccaggattcccctctggaggtctttcagcacgtctccttgatgaccctggacaccatcatgaagtgtgccttcagccatcagggcagcatccaggtggacaggaattctcagtcctacatacaggccattagtgacctgaacaacctggttttttcccgtgtgaggaatgcctttcaccagaatgacaccatctacagcctgacctctgctggccgctggacacaccgcgcctgccagctggcccatcagcacacaggagaccaagtgatccaactgaggaaggctcaactacagaaggagggggagctggagaagatcaagaggaagaggcatttggattttctggatatcctcctcttggccaaaatggagaatgggagcatcttgtcagacaaggacctccgtgctgaggtggacacgttcatgtttgagggccacgacaccacagccagtgggatctcctggatcctctatgctctggccacacaccccaagcatcaggagaggtgccgggaggagatccacagcctcctgggtgatggagcctccatcacctggaaccacctggaccagatgccctacaccaccatgtgcattaaggaggcactgaggctctacccaccggtgccaggcattggcagagagctcagcactcccgtcaccttccctgatgggcgctccttgcccaaaggtatcatggtcctcctctccatttatggccttcaccacaacccaaaagtgtggcccaacccagaggtgtttgaccctttccgttttgcaccgggttctgctcaacacagccacgctttcctgcccttctcaggaggatcaaggaactgcatcgggaaacaatttgccatgaacgagctgaaggtggccacggccctgaccctgctccgctttgagctgctgcctgatcccaccaggatccccatccccattgcacgacttgtgttgaaatccaaaaatggaatccacctgcgtctcaggaggctccctaacccttgtgaagacaaggaccagctttgagggcctccacctgccgtcctgtcttcctgacccccgcttctgtccccttcctgtctgcccatatcctgttttctgtctgcccatacacctgtctccttcttcctgcctgcttgtctgttcctatattagtttcctattactgctgtaataaactatcacaatctcagtgatttt

SEQ ID NO: 124523 - DNA, 1725 bp, Homo sapiens
  Payload ID: 4456
  Gene Symbol: CYP4A11
  Gene Name: cytochrome P450, family 4, subfamily A, polypeptide 11
  ENST ID: ENST00000371905
  CDS Start-End: 32-1399
gggcactcagagatccagcaggtgctgcaccatgagtgtctctgtgctgagccccagcagactcctgggtgatgtctctggaatcctccaagcggcctccctgctcattctgcttctgctgctgatcaaggcagttcagctctacctgcacaggcagtggctgctcaaagccctccagcagttcccgtgccctccctcccactggctcttcgggcacatccaggagctccaacaggaccaggagctacaacggattcagaaatgggtggagacattcccaagtgcctgtcctcattggctatggggaggcaaagttcgtgtccagctctatgaccctgactatatgaaggtgattctggggagatcagacccgaaatcccatggttcctacagattcctggctccatggattgggtacggcttgctcctgttgaatgggcagacatggttccagcatcgacggatgctgaccccagccttccactatgacatcctgaagccctatgtggggctcatggcagactctgtacgagtgatgctggacaaatgggaagagctccttggccaggattcccctctggaggtctttcagcacgtctccttgatgaccctggacaccatcatgaagtgtgccttcagccatcagggcagcatccaggtggacaggaattctcagtcctacatacaggccattagtgacctgaacaacctggttttttcccgtgtgaggaatgcctttcaccagaatgacaccatctacagcctgacctctgctggccgctggacacaccgcgcctgccagctggcccatcagcacacagaccaagtgatccaactgaggaaggctcaactacagaaggagggggagctggagaagatcaagaggaagaggcatttggattttctggatatcctcctcttggccaaaatggagaatgggagcatcttgtcagacaaggacctccgtgctgaggtggacacgttcatgtttgagggccacgacaccacagccagtgggatctcctggatcctctatgctctggccacacaccccaagcatcaggagaggtgccgggaggagatccacagcctcctgggtgatggagcctccatcacctggaaccacctggaccagatgccctacaccaccatgtgcattaaggaggcactgaggctctacccaccggtgccaggcattggcagagagctcagcactcccgtcaccttccctgatgggcgctccttgcccaaaggtatcatggtcctcctctccatttatggccttcaccacaacccaaaagtgtggcccaacccagaggtgtttgaccctttccgttttgcaccgggttctgctcaacacagccacgctttcctgcccttctcaggaggatcaaggtgagacgtcctgtgtggtaattcgaatagaggaatgagggaagtctctggtcaaccctctgatctttgtgagcctgatgttcatatgtggcatcttcaggtgtgctcttaaatgttggtatttgtgggaaagtcaggcacctggtgtgggcgtctctgtgtacaaaaggaaggtggcattcagagcaccccatggagactttgctccctctgcttcttcaaatgggcagcctgaattcactgtcagtgcatgttccaaacttcagtatattcatgtattttcctcactttaaggatatgaattctcaaaattagatattctccagtaaa

SEQ ID NO: 124524 - DNA, 2108 bp, Homo sapiens
  Payload ID: 4456
  Gene Symbol: CYP4A11
  Gene Name: cytochrome P450, family 4, subfamily A, polypeptide 11
  ENST ID: ENST00000465874
  CDS Start-End: 44-691
agagagaggtaggggcactcagagatccagcaggtgctgcaccatgagtgtctctgtgctgagccccagcagactcctgggtgatgtctctggaatcctccaagcggcctccctgctcattctgcttctgctgctgatcaaggcagttcagctctacctgcacaggcagtggctgctcaaagccctccagcagttcccgtgccctccctcccactggctcttcgggcacatccaggagctccaacaggaccaggagctacaacggattcagaaatgggtggagacattcccaagtgcctgtcctcattggctatggggaggcaaagttcgtgtccagctctatgaccctgactatatgaaggtgattctggggagatcagacccgaaatcccatggttcctacagattcctggctccatggattgggtacggcttgctcctgttgaatgggcagacatggttccagcatcgacggatgctgaccccagccttccactatgacatcctgaagccctatgtggggctcatggcagactctgtacgagtgatgctggacaaatgggaagagctccttggccaggattcccctctggaggtctttcagcacgtctccttgatgaccctggacaccatcatgaagtgtgccttcaggcattggcagagagctcagcactcccgtcaccttccctgatgggcgctccttgcccaaaggtatcatggtcctcctctccatttatggccttcaccacaacccaaaagtgtggcccaacccagaggtgtttgaccctttccgttttgcaccgggttctgctcaacacagccacgctttcctgcccttctcaggaggatcaaggtgagacgtcctgtgtggtaattcgaatagaggaatgagggaagtctctggtcaaccctctgatctttgtgagcctgatgttcatatgtggcatcttcaggtgtgctcttaaatgttggtatttgtgggaaagtcaggcacctggtgtgggcgtctctgtgtacaaaaggaaggtggcattcagagcaccccatggagactttgctccctctgcttcttcaaatgggcagcctgaattcactgtcagtgcatgttccaaacttcagtatattcatgtattttcctcactttaaggatatgaattctcaaaattagatattctccagtaaattcaacttcagctgtttgcttttctcagttgtcaggaatagtaaactgtagatttctctccccccacacatcctcaatgcagcacactaccttccctatttaattcactagtctgtcgtagagatgaatcattgaagtctttgcatctgtttataatacagatgacctgcaagtcctacctttcaagtcatataagggagaggttaaggtagccctttgaagaaagttttacaacagtgtgtgtcatatcatacattcttctgtcttgcccaatgaaatttttactgcattatatagtgttcacatatttacatctattttcccgtttgacaaattctgtacatgccttgagatctttataccatagtcctgtaatccacttagcacaatattggccaaaaacataaaaatgtgaacagtacactgtcttggagagaaaagcccaataattatcatataacgcacaacatttgaagcctcctggtatgtgaaatataaaacacacttgaaattgcttttgagctggagaggaaaactccagaatggttgcggtggagatcattgtggcatcaggaatcgtcctgtgacatacacacaggcaaaaacgatataaattcttagtagaaacaaagtttgttcaaagaaataattatgtgactttttgaaacggtgagtccacttacacagaacaggctttaagaaaaagcttcctcctgaaactccttctccagcactggtctgtctatcccagcatgagaaagtcctcctaaacattgcctgcaaatcatgtcgctgccactagagaactggagagcattcctaaggtccatttctagctcagaattaatatttactctcagtgtatttcattatattttattcattttaaaacttaacatcattcaaatatagaagtatttcttaa

SEQ ID NO: 124525 - DNA, 1517 bp, Homo sapiens
  Payload ID: 4456
  Gene Symbol: CYP4A11
  Gene Name: cytochrome P450, family 4, subfamily A, polypeptide 11
  ENST ID: ENST00000468629
  CDS Start-End: 52-1185
gggtggtcagagagaggtaggggcactcagagatccagcaggtgctgcaccatgagtgtctctgtgctgagccccagcagactcctgggtgatgtctctggaatcctccaagcggcctccctgctcattctgcttctgctgctgatcaaggcagttcagctctacctgcacaggcagtggctgctcaaagccctccagcagttcccgtgccctccctcccactggctcttcgggcacatccaggagctccaacaggaccaggagctacaacggattcagaaatgggtggagacattcccaagtgcctgtcctcattggctatggggaggcaaagttcgtgtccagctctatgaccctgactatatgaaggtgattctggggagatcagacccgaaatcccatggttcctacagattcctggctccatggattgggtacggcttgctcctgttgaatgggcagacatggttccagcatcgacggatgctgaccccagccttccactatgacatcctgaagccctatgtggggctcatggcagactctgtacgagtgatgctggacaaatgggaagagctccttggccaggattcccctctggaggtctttcagcacgtctccttgatgaccctggacaccatcatgaagtgtgccttcagccatcagggcagcatccaggtggacagcctgacctctgctggccgctggacacaccgcgcctgccagctggcccatcagcacacagaccaagtgatccaactgaggaaggctcaactacagaaggagggggagctggagaagatcaagaggaagaggcatttggattttctggatatcctcctcttggccaaaatggagaatgggagcatcttgtcagacaaggacctccgtgctgaggtggacacgttcatgtttgagggccacgacaccacagccagtgggatctcctggatcctctatgctctggccacacaccccaagcatcaggagaggtgccgggaggagatccacagcctcctgggtgatggagcctccatcacctggaaccacctggaccagatgccctacaccaccatgtgcattaaggaggcactgaggctctacccaccggtgccaggcattggcagagagctcagcactcccgtcaccttccctgatgggcgctccttgcccaaaggtgtttgaccctttccgttttgcaccgggttctgctcaacacagccacgctttcctgcccttctcaggaggatcaaggaactgcatcgggaaacaatttgccatgaacgagctgaaggtggccacggccctgaccctgctccgctttgagctgctgcctgatcccaccaggatccccatccccattgcacgacttgtgttgaaatccaaaaatggaatccacctgcgtctcaggaggctccctaacccttgtgaagacaaggaccagctttgagggcctccacctgccgtcctgtcttcctgacccccgcttctgtccccttcctgtctgcccatatcct

SEQ ID NO: 124526 - DNA, 2138 bp, Homo sapiens
  Payload ID: 4456
  Gene Symbol: CYP4A11
  Gene Name: cytochrome P450, family 4, subfamily A, polypeptide 11
  ENST ID: ENST00000475477
  CDS Start-End: 52-846
gggtggtcagagagaggtaggggcactcagagatccagcaggtgctgcaccatgagtgtctctgtgctgagccccagcagactcctgggtgatgtctctggaatcctccaagcggcctccctgctcattctgcttctgctgctgatcaaggcagttcagctctacctgcacaggcagtggctgctcaaagccctccagcagttcccgtgccctccctcccactggctcttcgggcacatccaggagctccaacaggaccaggagctacaacggattcagaaatgggtggagacattcccaagtgcctgtcctcattggctatggggaggcaaagttcgtgtccagctctatgaccctgactatatgaaggtgattctggggagatcagacccgaaatcccatggttcctacagattcctggctccatggattgggtacggcttgctcctgttgaatgggcagacatggttccagcatcgacggatgctgaccccagccttccactatgacatcctgaagccctatgtggggctcatggcagactctgtacgagtgatgctggacaaatgggaagagctccttggccaggattcccctctggaggtctttcagcacgtctccttgatgaccctggacaccatcatgaagtgtgccttcagccatcagggcagcatccaggtggacagaccaagtgatccaactgaggaaggctcaactacagaaggagggggagctggagaagatcaagaggaagaggcatttggattttctggatatcctcctcttggccaaagaaccacctggaccagatgccctacaccaccatgtgcattaaggaggcactgaggctctacccaccggtgccaggcattggcagagagctcagcactcccgtcaccttccctgatgggcgctccttgcccaaaggtgtttgaccctttccgttttgcaccgggttctgctcaacacagccacgctttcctgcccttctcaggaggatcaaggaactgcatcgggaaacaatttgccatgaacgagctgaaggtggccacggccctgaccctgctccgctttgagctgctgcctgatcccaccaggatccccatccccattgcacgacttgtgttgaaatccaaaaatggaatccacctgcgtctcaggaggctccctaacccttgtgaagacaaggaccagctttgagggcctccacctgccgtcctgtcttcctgacccccgcttctgtccccttcctgtctgcccatatcctgttttctgtctgcccaccttcccttcttcccacctgcctgctgtcccccagtctgcctgcccttctctctctcacctttctccaggctccctacctgcttgtctacctgtctcctacccacctgtatctcttgttgggagaaaagctgagtgttgggagaagctgaggccgagcttgcatgtctgacataatgtaaaagagtcttggatcatgtccaggatccagggtctaaaaccccttgtggcctttggaacaccaagctctgtgctgaagggtggaaggctaccctgacgcaccataatctaagcccggggcataaaacccctcgtggcttggatagaatccagggctcgtggctctggaatgtgtctgaacttgctgcctcctcgctccttgctctcccaggatcaattgtatcttgagttaaaagaacctgctctccattatctcaagtagcagagcagatgctaaaccgtcacagctgtaaatcatgtgcttaatgcaacatgccctttcgacccccacattctcaccacctgtttctttgtttgatcaccaataaataatctgcacttccagagctcggggccttcacagcctccatccttagctttggcgccctggacccactttctctctcaaactgtcttttctcactgctttgactctgccggactttgtcacccccacgacctggtgttgggtctgaacaccccaacatccctgaatctccacccacctcccaaactcctgcctgccctccagactgtctgcccatacacctgtctccttcttcctgcctgcttgtctgttcctatattagtttcctattactgctgtaataaactatcacaatctcagtgattttaaa

SEQ ID NO: 124527 - DNA, 1133 bp, Homo sapiens
  Payload ID: 4456
  Gene Symbol: CYP4A11
  Gene Name: cytochrome P450, family 4, subfamily A, polypeptide 11
  ENST ID: ENST00000474458
  CDS Start-End: 52-801
gggtggtcagagagaggtaggggcactcagagatccagcaggtgctgcaccatgagtgtctctgtgctgagccccagcagactcctgggtgatgtctctggaatcctccaagcggcctccctgctcattctgcttctgctgctgatcaaggcagttcagctctacctgcacaggcagtggctgctcaaagccctccagcagttcccgtgccctccctcccactggctcttcgggcacatccaggagctccaacaggaccaggagctacaacggattcagaaatgggtggagacattcccaagtgcctgtcctcattggctatggggaggcaaagttcgtgtccagctctatgaccctgactatatgaaggtgattctggggagatcagacccgaaatcccatggttcctacagattcctggctccatggattgggtacggcttgctcctgttgaatgggcagacatggttccagcatcgacggatgctgaccccagccttccactatgacatcctgaagccctatgtggggctcatggcagactctgtacgagtgatgctggacaaatgggaagagctccttggccaggattcccctctggaggtctttcagcacgtctccttgatgaccctggacaccatcatgaagtgtgccttcagccatcagggcagcatccaggtggacagaccaagtgatccaactgaggaaggctcaactacagaaggagggggagctggagaagatcaagaggaagaggcatttggattttctggatatcctcctcttggccaaagtgtttgaccctttccgttttgcaccgggttctgctcaacacagccacgctttcctgcccttctcaggaggatcaaggaactgcatcgggaaacaatttgccatgaacgagctgaaggtggccacggccctgaccctgctccgctttgagctgctgcctgatcccaccaggatccccatccccattgcacgacttgtgttgaaatccaaaaatggaatccacctgcgtctcaggaggctccctaacccttgtgaagacaaggaccagctttgagggcctccacctgccgtcctgtcttcctgacccccgcttctgtccccttcctgtctgcccatatcct

SEQ ID NO: 124528 - DNA, 1775 bp, Homo sapiens
  Payload ID: 4456
  Gene Symbol: CYP4A11
  Gene Name: cytochrome P450, family 4, subfamily A, polypeptide 11
  ENST ID: ENST00000462347
  CDS Start-End: 32-1297
gggcactcagagatccagcaggtgctgcaccatgagtgtctctgtgctgagccccagcagactcctgggtgatgtctctggaatcctccaagcggcctccctgctcattctgcttctgctgctgatcaaggcagttcagctctacctgcacaggcagtggctgctcaaagccctccagcagttcccgtgccctccctcccactggctcttcgggcacatccaggagctccaacaggaccaggagctacaacggattcagaaatgggtggagacattcccaagtgcctgtcctcattggctatggggaggcaaagttcgtgtccagctctatgaccctgactatatgaaggtgattctggggagatcagacccgaaatcccatggttcctacagattcctggctccatggattgggtacggcttgctcctgttgaatgggcagacatggttccagcatcgacggatgctgaccccagccttccactatgacatcctgaagccctatgtggggctcatggcagactctgtacgagtgatgctggacaaatgggaagagctccttggccaggattcccctctggaggtctttcagcacgtctccttgatgaccctggacaccatcatgaagtgtgccttcagccatcagggcagcatccaggtggacagaccaagtgatccaactgaggaaggctcaactacagaaggagggggagctggagaagatcaagaggaagaggcatttggattttctggatatcctcctcttggccaaagggcccctggtctgcccaggccttgctggtgttcaggatggaattgtttcaggaaccacctggaccagatgccctacaccaccatgtgcattaaggaggcactgaggctctacccaccggtgccaggcattggcagagagctcagcactcccgtcaccttccctgatgggcgctccttgcccaaaggtatcatggtcctcctctccatttatggccttcaccacaacccaaaagtgtggcccaacccagaggtgtttgaccctttccgttttgcaccgggttctgctcaacacagccacgctttcctgcccttctcaggaggatcaaggaactgcatcgggaaacaatttgccatgaacgagctgaaggtggccacggccctgaccctgctccgctttgagctgctgcctgatcccaccaggatccccatccccattgcacgacttgtgttgaaatccaaaaatggaatccacctgcgtctcaggaggctccctaacccttgtgaagacaaggaccagctttgagggcctccacctgccgtcctgtcttcctgacccccgcttctgtccccttcctgtctgcccatatcctgttttctgtctgcccaccttcccttcttcccacctgcctgctgtcccccagtctgcctgcccttctctctctcacctttctccaggctccctacctgcttgtctacctgtctcctacccacctgtatctcttgttgggagaaaagctgagtgttgggagaagctgaggccgagcttgcatgtctgacataatgtaaaagagtcttggatcatgtccaggatccagggtctaaaaccccttgtggcctttggaacaccaagctctgtgctgaagggtggaaggctaccctgacgcaccataatctaagcccggggcataaaacccctcgtggcttggatagaatccagggctcgtggctctggaatgtgtctgaacttgctgcctcctcgctccttgctctcccaggatcaa

SEQ ID NO: 124529 - DNA, 1725 bp, Homo sapiens
  Payload ID: 4457
  Gene Symbol: CYP4A22
  Gene Name: cytochrome P450, family 4, subfamily A, polypeptide 22
  ENST ID: ENST00000294337
  CDS Start-End: 32-1399
gggcactcagagatccagcaggtgctgcaccatgagtgtctctgtcctgagccccagcagacgcctgggtggtgtctccgggatcctccaagtgacctccctgctcattctgcttctgctgctgatcaaggcagctcagctctacctgcataggcagtggctgctcaaagccctccagcagttcccgtgccctccctcccactggctcttcgggcacatccaggagttccaacacgaccaggagctacaacggattcaggaacgggtgaagacattcccaagtgcctgtccttattggatatggggaggcaaagttcgtgtccagctctatgaccctgactatatgaaggtgattctggggagatcagacccgaaatcccatggatcctacaaattcctggctccacggattgggtacggcttgctcctgttgaatgggcagacatggttccagcatcgacggatgctgaccccagccttccacaatgacatcctgaagccatacgtggggctcatggcagactctgtacgagtgatgctggacaaatgggaagagctccttggccaggattcccctctggaggtctttcagcacgtctccttgatgaccctggacaccatcatgaagagtgccttcagccatcagggcagcatccaggtggacaggaattctcagtcctacatccaggccattagtgacctgaacagcctggttttttgctgtatgaggaatgcctttcatgagaatgacaccatctacagcctgacctctgctggccgctggacacaccgcgcctgccagctggcccatcagcacacagaccaagtgatccaactgaggaaggctcaactacagaaggagggggagctggagaagatcaagaggaagaggcacttggattttctggacatcctcctcttggccaaaatggagaatgggagcatcttgtcagacaaggacctccgtgctgaggtggacacgttcatgtttgagggccacgacaccacagccagtgggatctcctggatcctctatgctctggccacacaccccaagcatcaggagaggtgccgggaggagatccatggcctcctgggtgatggagcctccatcacctggaaccacctggaccagatgccctacaccaccatgtgcattaaggaggcactgaggctctacccaccggtgccaggcattggaagagagctcagcactcccgtcaccttccctgatgggcgctccttgcccaaaggtatcatggtcctcctctccatttatggccttcaccacaacccaaaagtgtggcccaacctagaggtgtttgacccttcccgttttgcaccgggttctgctcaacacagccacgctttcctgcccttctcaggaggatcaaggtgagacgtcctgtgtggtaattggaatagagaaatgagggaagtctctggtcaaccctctgatctttgtgagcccgatgttcatatgtggcatcttcaggtgtgctcttaaatattggtatttgtgggaaagtcaggcacctggtgtgggcgtctctgtgtacaaaaggaaggtggcattcagagcaccccatggagactttgctccctctgcttcttcaaatgggcagcctgaattcactgtcagtgcatgttccaaacttcagtatattcatgtattttcctcactttaaggatatgaattctcaaaattagatattctccagtaaa

SEQ ID NO: 124530 - DNA, 1780 bp, Homo sapiens
  Payload ID: 4457
  Gene Symbol: CYP4A22
  Gene Name: cytochrome P450, family 4, subfamily A, polypeptide 22
  ENST ID: ENST00000371890
  CDS Start-End: 37-1302
ggaaggggcactcagagatccagcaggtgctgcaccatgagtgtctctgtcctgagccccagcagacgcctgggtggtgtctccgggatcctccaagtgacctccctgctcattctgcttctgctgctgatcaaggcagctcagctctacctgcataggcagtggctgctcaaagccctccagcagttcccgtgccctccctcccactggctcttcgggcacatccaggagttccaacacgaccaggagctacaacggattcaggaacgggtgaagacattcccaagtgcctgtccttattggatatggggaggcaaagttcgtgtccagctctatgaccctgactatatgaaggtgattctggggagatcagacccgaaatcccatggatcctacaaattcctggctccacggattgggtacggcttgctcctgttgaatgggcagacatggttccagcatcgacggatgctgaccccagccttccacaatgacatcctgaagccatacgtggggctcatggcagactctgtacgagtgatgctggacaaatgggaagagctccttggccaggattcccctctggaggtctttcagcacgtctccttgatgaccctggacaccatcatgaagagtgccttcagccatcagggcagcatccaggtggacagaccaagtgatccaactgaggaaggctcaactacagaaggagggggagctggagaagatcaagaggaagaggcacttggattttctggacatcctcctcttggccaaagggcccctggtctgcccaggccttgctggtgttcaggatggaattgtttcaggaaccacctggaccagatgccctacaccaccatgtgcattaaggaggcactgaggctctacccaccggtgccaggcattggaagagagctcagcactcccgtcaccttccctgatgggcgctccttgcccaaaggtatcatggtcctcctctccatttatggccttcaccacaacccaaaagtgtggcccaacctagaggtgtttgacccttcccgttttgcaccgggttctgctcaacacagccacgctttcctgcccttctcaggaggatcaaggaactgcatcgggaaacaatttgccatgaaccagctgaaggtggccagggccctgaccctgctccgctttgagctgctgcctgatcccaccaggatccccatccccatggcacgacttgtgttgaaatccaaaaatggaatccacctgcgtctcaggaggctccctaacccttgtgaagacaaggaccagctttgagggcctccacctgccatcctgtcttcctgacccccactcctatctcctgcctgtctgcctctgtcctgctttctgtctgcccaccttcccttcttcccacctgcctgctgtcccccagtctgcctgcccttctctctctcacctttctccaagctccctacctgcttgtctacctgtctcctacccacctgtatatcttgttgggagaaaagctgagtgttgggagaagctgaggccgagcttgcatgtctgacataatgtaaaagagtcttgaatcatgtccaggatccagggtctaaaaccccttgtggcctttggaacaccaagctctgtgctgaagggtggaaggctaccctgacgcaccataatctaagcccggggcataaaacccctcgtggcttggatagaatccagggctcgtggctctggaatgtgtctggacttgctggctcctcgctccttgctctcccaggatcaa

SEQ ID NO: 124531 - DNA, 2535 bp, Homo sapiens
  Payload ID: 4457
  Gene Symbol: CYP4A22
  Gene Name: cytochrome P450, family 4, subfamily A, polypeptide 22
  Uniprot ID: Q5TCH4
  ENST ID: ENST00000371891
  CDS Start-End: 32-1591
gggcactcagagatccagcaggtgctgcaccatgagtgtctctgtcctgagccccagcagacgcctgggtggtgtctccgggatcctccaagtgacctccctgctcattctgcttctgctgctgatcaaggcagctcagctctacctgcataggcagtggctgctcaaagccctccagcagttcccgtgccctccctcccactggctcttcgggcacatccaggagttccaacacgaccaggagctacaacggattcaggaacgggtgaagacattcccaagtgcctgtccttattggatatggggaggcaaagttcgtgtccagctctatgaccctgactatatgaaggtgattctggggagatcagacccgaaatcccatggatcctacaaattcctggctccacggattgggtacggcttgctcctgttgaatgggcagacatggttccagcatcgacggatgctgaccccagccttccacaatgacatcctgaagccatacgtggggctcatggcagactctgtacgagtgatgctggacaaatgggaagagctccttggccaggattcccctctggaggtctttcagcacgtctccttgatgaccctggacaccatcatgaagagtgccttcagccatcagggcagcatccaggtggacaggaattctcagtcctacatccaggccattagtgacctgaacagcctggttttttgctgtatgaggaatgcctttcatgagaatgacaccatctacagcctgacctctgctggccgctggacacaccgcgcctgccagctggcccatcagcacacagaccaagtgatccaactgaggaaggctcaactacagaaggagggggagctggagaagatcaagaggaagaggcacttggattttctggacatcctcctcttggccaaaatggagaatgggagcatcttgtcagacaaggacctccgtgctgaggtggacacgttcatgtttgagggccacgacaccacagccagtgggatctcctggatcctctatgctctggccacacaccccaagcatcaggagaggtgccgggaggagatccatggcctcctgggtgatggagcctccatcacctggaaccacctggaccagatgccctacaccaccatgtgcattaaggaggcactgaggctctacccaccggtgccaggcattggaagagagctcagcactcccgtcaccttccctgatgggcgctccttgcccaaaggtatcatggtcctcctctccatttatggccttcaccacaacccaaaagtgtggcccaacctagaggtgtttgacccttcccgttttgcaccgggttctgctcaacacagccacgctttcctgcccttctcaggaggatcaaggaactgcatcgggaaacaatttgccatgaaccagctgaaggtggccagggccctgaccctgctccgctttgagctgctgcctgatcccaccaggatccccatccccatggcacgacttgtgttgaaatccaaaaatggaatccacctgcgtctcaggaggctccctaacccttgtgaagacaaggaccagctttgagggcctccacctgccatcctgtcttcctgacccccactcctatctcctgcctgtctgcctctgtcctgctttctgtctgcccaccttcccttcttcccacctgcctgctgtcccccagtctgcctgcccttctctctctcacctttctccaagctccctacctgcttgtctacctgtctcctacccacctgtatatcttgttgggagaaaagctgagtgttgggagaagctgaggccgagcttgcatgtctgacataatgtaaaagagtcttgaatcatgtccaggatccagggtctaaaaccccttgtggcctttggaacaccaagctctgtgctgaagggtggaaggctaccctgacgcaccataatctaagcccggggcataaaacccctcgtggcttggatagaatccagggctcgtggctctggaatgtgtctggacttgctggctcctcgctccttgctctcccaggatcaattgtatcttgagttaaaagaacctgctctccattatctcaagtaacagagcagatgctaaaccgtcacagctgtaaatcatgtgcttaatgcaacatgccctttcgacccaccccccattctcaccacctgtttctttgtttgatcaccaataaataatctgcacttccagagctcggggccttcacagcctccatacttagctttggcgccctggacccactttctctctcaaactgtcttttctcattcctttgactctgccggactttgtcacccccacaacctggtgttgggtccgataaccccaacatccctgaatctccacccacctcccaaactcctgcctgccctccagactgtctgcccatacacctgtctccttcttcctgcctgcttgtctgttcctatattagtttcctattgctgctgtaataaactatcacaatctcagtgattttaaataa

SEQ ID NO: 124532 - DNA, 1760 bp, Homo sapiens
  Payload ID: 4457
  Gene Symbol: CYP4A22
  Gene Name: cytochrome P450, family 4, subfamily A, polypeptide 22
  ENST ID: ENST00000620131
  CDS Start-End: 24-1586
agagatccagcaggtgctgcaccatgagtgtctctgtcctgagccccagcagacgcctgggtggtgtctccgggatcctccaagtgacctccctgctcattctgcttctgctgctgatcaaggcagctcagctctacctgcataggcagtggctgctcaaagccctccagcagttcccgtgccctccctcccactggctcttcgggcacatccaggagttccaacacgaccaggagctacaacggattcaggaacgggtgaagacattcccaagtgcctgtccttattggatatggggaggcaaagttcgtgtccagctctatgaccctgactatatgaaggtgattctggggagatcagacccgaaatcccatggatcctacaaattcctggctccacggattgggtacggcttgctcctgttgaatgggcagacatggttccagcatcgacggatgctgaccccagccttccacaatgacatcctgaagccatacgtggggctcatggcagactctgtacgagtgatgctggacaaatgggaagagctccttggccaggattcccctctggaggtctttcagcacgtctccttgatgaccctggacaccatcatgaagagtgccttcagccatcagggcagcatccaggtggacaggaattctcagtcctacatccaggccattagtgacctgaacagcctggttttttgctgtatgaggaatgcctttcatgagaatgacaccatctacagcctgacctctgctggccgctggacacaccgcgcctgccagctggcccatcagcacacaggagaccaagtgatccaactgaggaaggctcaactacagaaggagggggagctggagaagatcaagaggaagaggcacttggattttctggacatcctcctcttggccaaaatggagaatgggagcatcttgtcagacaaggacctccgtgctgaggtggacacgttcatgtttgagggccacgacaccacagccagtgggatctcctggatcctctatgctctggccacacaccccaagcatcaggagaggtgccgggaggagatccatggcctcctgggtgatggagcctccatcacctggaaccacctggaccagatgccctacaccaccatgtgcattaaggaggcactgaggctctacccaccggtgccaggcattggaagagagctcagcactcccgtcaccttccctgatgggcgctccttgcccaaaggtatcatggtcctcctctccatttatggccttcaccacaacccaaaagtgtggcccaacctagaggtgtttgacccttcccgttttgcaccgggttctgctcaacacagccacgctttcctgcccttctcaggaggatcaaggaactgcatcgggaaacaatttgccatgaaccagctgaaggtggccagggccctgaccctgctccgctttgagctgctgcctgatcccaccaggatccccatccccatggcacgacttgtgttgaaatccaaaaatggaatccacctgcgtctcaggaggctccctaacccttgtgaagacaaggaccagctttgagggcctccacctgccatcctgtcttcctgacccccactcctatctcctgcctgtctgcctctgtcctgctttctgtctgcccatacacctgtctccttcttcctgcctgcttgtctgttcctatattagtttcctattgctgctgtaataaactatcacaatctcagtgatttt

SEQ ID NO: 124533 - DNA, 2351 bp, Homo sapiens
  Payload ID: 4457
  Gene Symbol: CYP4A22
  Gene Name: cytochrome P450, family 4, subfamily A, polypeptide 22
  ENST ID: ENST00000619754
  CDS Start-End: 33-1106
ggggcactcagagatccagcaggtgctgcaccatgagtgtctctgtcctgagccccagcagacgcctgggtggtgtctccgggatcctccaagtgacctccctgctcattctgcttctgctgctgatcaaggcagctcagctctacctgcataggcagtggctgctcaaagccctccagcagttcccgtgccctccctcccactggctcttcgggcacatccaggagttccaacacgaccaggagctacaacggattcaggaacgggtgaagacattcccaagtgcctgtccttattggatatggggaggcaaagttcgtgtccagctctatgaccctgactatatgaaggtgattctggggagatcagacccgaaatcccatggatcctacaaattcctggctccacggattgggtacggcttgctcctgttgaatgggcagacatggttccagcatcgacggatgctgaccccagccttccacaatgacatcctgaagccatacgtggggctcatggcagactctgtacgagtgatgctggacaaatgggaagagctccttggccaggattcccctctggaggtctttcagcacgtctccttgatgaccctggacaccatcatgaagagtgccttcagccatcagggcagcatccaggtggacagaccaagtgatccaactgaggaaggctcaactacagaaggagggggagctggagaagatcaagaggaagaggcacttggattttctggacatcctcctcttggccaaagggcccctggtctgcccaggccttgctggtgttcaggatggaattgtttcaggaaccacctggaccagatgccctacaccaccatgtgcattaaggaggcactgaggctctacccaccggtgccaggcattggaagagagctcagcactcccgtcaccttccctgatgggcgctccttgcccaaaggtatcatggtcctcctctccatttatggccttcaccacaacccaaaagtgtggcccaacctagaggtgtttgacccttcccgttttgcaccgggttctgctcaacacagccacgctttcctgcccttctcaggaggatcaaggtgagacgtcctgtgtggtaattggaatagagaaatgagggaagtctctggtcaaccctctgatctttgtgagcccgatgttcatatgtggcatcttcaggtgtgctcttaaatattggtatttgtgggaaagtcaggcacctggtgtgggcgtctctgtgtacaaaaggaaggtggcattcagagcaccccatggagactttgctccctctgcttcttcaaatgggcagcctgaattcactgtcagtgcatgttccaaacttcagtatattcatgtattttcctcactttaaggatatgaattctcaaaattagatattctccagtaaattcaacttcagctgtttgcttttctcagttgtcaggaatagtaaactgtagatttctctctccccacacatcctcaatgcagcacactaccttccctatttaattcactagtctgtcgtagagatgaatcattgaaatctttgcatctgtttataatacagatgacctgcaagtcctacctttcaagccatataagggagaggttaaggtagccctttgaagaaagttttacaacagtgtgtgtcatatcatacatttttctgtcttgcccaatgacatttttacttcattatatagtgttcacatatttacatctatttccccatttggcaaattctgtacatgccttgagatctttataccatagtcctgtaatccacttagcacaatattggccaaaaacataaaaatgtgaacagtacactgtcttggagagaaaagcccaataattatcatataacgcacaacatttgaagcctcctggtatgtgaaatataaaacacacttgaaatagctattgagctggagaggaaaactccagaatggctgcggtggaaatcatcgtggcatcaggaatcgtcctgtgacatacacacaggcaaaaatgataaaaattcttagtagaaacaaagtttgttcaaagaaataattatgtgacttcttcaaatggtgagtccacttacatggaacaggaaagcttcctcctgaaactccttctccagcactggtctgtctatcccagcatgaggaagtccttgtaaacattgcctgcaaatcatgtcgctgccactagagaaccggagagcattcctaagctccatttctagctcagaactaatattttactctcagtgtatttcattctattttattcattttaaaacttaaataacatcattcaaatattaaagtatttctt

SEQ ID NO: 124534 - DNA, 2171 bp, Homo sapiens
  Payload ID: 4458
  Gene Symbol: CYP4B1
  Gene Name: cytochrome P450, family 4, subfamily B, polypeptide 1
  Uniprot ID: P13584
  ENST ID: ENST00000271153
  CDS Start-End: 37-1572
aggtcagatgaaggctaggtggctggaactgcaaccatggtgcccagcttcctctccctgagcttctcctccttgggcctgtgggcttctgggctgatcttggtcttaggctttctcaagctcatccacctgctgctgcggaggcagacgttggctaaggctatggacaaattcccagggcctcccacccactggctttttggacatgccctcgagatccaggagacggggagcctggacaaagtggtgtcctgggcccaccagttcccgtatgcccacccactctggttcggacagttcattggcttcctgaacatctatgagcctgactatgccaaagctgtgtacagccgtggggaccctaaggcccctgatgtgtatgacttcttcctccagtggattgggagaggcctgctggttcttgaggggcccaagtggttgcagcaccgcaagctgctcacacctggctttcattatgatgtgctgaagccctatgtggccgtgttcactgagtctacacgtatcatgctggacaagtgggaagagaaagctcgggagggtaagtcctttgacatcttctgcgatgtgggtcacatggcgctgaacacactcatgaagtgcacctttggaagaggagacaccggcctgggccacagggacagcagctactaccttgcagtcagcgatctcactctgttgatgcagcagcgccttgtgtccttccagtaccataatgacttcatctactggctcaccccacatggccgccgcttcctgcgggcctgccaggtggcccatgaccatacagaccaggtcatcagggagcggaaggcagccctgcaggatgagaaggtgcggaagaagatccagaaccggaggcacctggacttcctggacattctcctgggtgcccgggatgaagatgacatcaaactgtcagatgcagacctccgggctgaagtggacacattcatgtttgaaggccatgacaccaccaccagtggtatctcctggtttctctactgcatggccctgtaccctgagcaccagcatcgttgtagagaggaggtccgcgagatcctaggggaccaggacttcttccagtgggatgatctgggcaaaatgacttatctgaccatgtgcatcaaggagagcttccgcctctacccacctgtgccccaggtgtaccgccagctcagcaagcctgtcacctttgtggatggccggtctctacctgcaggaagcctgatctctatgcatatctatgccctccataggaacagtgctgtatggcccgaccctgaggtctttgactctctgcgcttttccactgagaatgcatccaaacgccatccctttgcctttatgcccttctctgctgggcccaggaactgcattgggcagcagtttgccatgagtgagatgaaggtggtcacagccatgtgcttgctccgctttgagttctctctggacccctcacggctgcccatcaagatgccccagcttgtcctgcgctccaagaatggctttcacctccacctgaagccactgggccctgggtctgggaagtagctctgatgagaatggggtcccagatggctcaggctgtgacctccctgggcaccaccctccccaggctgggtgtggaggagttggggccccctgccttcaggaggcttgtagtttagaagggaagtaggcattaccatagacgactcctagaggacagtgctatgtaaaaatgtgtgtctataaatgtttatcatgcatgtattctagagctcattcatttattcaacaaacatttggtgagcacctatttcgttcgagaaacttcatttatctcctataattggcaaacttaaaaatgcagcagaaacttacattccaaccttagagactcatagtgagcacaaggaaagttttgccctgagattcatggttatggctgggtaccaccaaatagaagaatggcttaggggagtgccccttcactgagatgtgtttctttgttgaactttgtgtgtgtgtgtttagaatataacagacataagaaaaaattacctaaatgaagactgtacaaaataataaataattctgaagcagactctcttgtaaccatcactgaagtcaagaaatatggaatatggtatcactgatgtgtcttctgc

SEQ ID NO: 124535 - DNA, 1494 bp, Homo sapiens
  Payload ID: 4458
  Gene Symbol: CYP4B1
  Gene Name: cytochrome P450, family 4, subfamily B, polypeptide 1
  ENST ID: ENST00000371919
  CDS Start-End: 1-1494
atggtgcccagcttcctctccctgagcttctcctccttgggcctgtgggcttctgggctgatcttggtcttaggctttctcaagctcatccacctgctgctgcggaggcagacgttggctaaggctatggacaaattcccagggcctcccacccactggctttttggacatgccctcgagatccaggagacggggagcctggacaaagtggtgtcctgggcccaccagttcccgtatgcccacccactctggttcggacagttcattggcttcctgaacatctatgagcctgactatgccaaagctgtgtacagccgtggggggagaggcctgctggttcttgaggggcccaagtggttgcagcaccgcaagctgctcacacctggctttcattatgatgtgctgaagccctatgtggccgtgttcactgagtctacacgtatcatgctggacaagtgggaagagaaagctcgggagggtaagtcctttgacatcttctgcgatgtgggtcacatggcgctgaacacactcatgaagtgcacctttggaagaggagacaccggcctgggccacagcagggacagcagctactaccttgcagtcagcgatctcactctgttgatgcagcagcgccttgtgtccttccagtaccataatgacttcatctactggctcaccccacatggccgccgcttcctgcgggcctgccaggtggcccatgaccatacagaccaggtcatcagggagcggaaggcagccctgcaggatgagaaggtgcggaagaagatccagaaccggaggcacctggacttcctggacattctcctgggtgcccgggatgaagatgacatcaaactgtcagatgcagacctccgggctgaagtggacacattcatgtttgaaggccatgacaccaccaccagtggtatctcctggtttctctactgcatggccctgtaccctgagcaccagcatcgttgtagagaggaggtccgcgagatcctaggggaccaggacttcttccagtgggatgatctgggcaaaatgacttatctgaccatgtgcatcaaggagagcttccgcctctacccacctgtgccccaggtgtaccgccagctcagcaagcctgtcacctttgtggatggccggtctctacctgcaggaagcctgatctctatgcatatctatgccctccataggaacagtgctgtatggcccgaccctgaggtctttgactctctgcgcttttccactgagaatgcatccaaacgccatccctttgcctttatgcccttctctgctgggcccaggaactgcattgggcagcagtttgccatgagtgagatgaaggtggtcacagccatgtgcttgctccgctttgagttctctctggacccctcacggctgcccatcaagatgccccagcttgtcctgcgctccaagaatggctttcacctccacctgaagccactgggccctgggtctgggaagtag

SEQ ID NO: 124536 - DNA, 2110 bp, Homo sapiens
  Payload ID: 4458
  Gene Symbol: CYP4B1
  Gene Name: cytochrome P450, family 4, subfamily B, polypeptide 1
  Uniprot ID: P13584
  ENST ID: ENST00000371923
  CDS Start-End: 37-1575
aggtcagatgaaggctaggtggctggaactgcaaccatggtgcccagcttcctctccctgagcttctcctccttgggcctgtgggcttctgggctgatcttggtcttaggctttctcaagctcatccacctgctgctgcggaggcagacgttggctaaggctatggacaaattcccagggcctcccacccactggctttttggacatgccctcgagatccaggagacggggagcctggacaaagtggtgtcctgggcccaccagttcccgtatgcccacccactctggttcggacagttcattggcttcctgaacatctatgagcctgactatgccaaagctgtgtacagccgtggggaccctaaggcccctgatgtgtatgacttcttcctccagtggattgggagaggcctgctggttcttgaggggcccaagtggttgcagcaccgcaagctgctcacacctggctttcattatgatgtgctgaagccctatgtggccgtgttcactgagtctacacgtatcatgctggacaagtgggaagagaaagctcgggagggtaagtcctttgacatcttctgcgatgtgggtcacatggcgctgaacacactcatgaagtgcacctttggaagaggagacaccggcctgggccacagcagggacagcagctactaccttgcagtcagcgatctcactctgttgatgcagcagcgccttgtgtccttccagtaccataatgacttcatctactggctcaccccacatggccgccgcttcctgcgggcctgccaggtggcccatgaccatacagaccaggtcatcagggagcggaaggcagccctgcaggatgagaaggtgcggaagaagatccagaaccggaggcacctggacttcctggacattctcctgggtgcccgggatgaagatgacatcaaactgtcagatgcagacctccgggctgaagtggacacattcatgtttgaaggccatgacaccaccaccagtggtatctcctggtttctctactgcatggccctgtaccctgagcaccagcatcgttgtagagaggaggtccgcgagatcctaggggaccaggacttcttccagtgggatgatctgggcaaaatgacttatctgaccatgtgcatcaaggagagcttccgcctctacccacctgtgccccaggtgtaccgccagctcagcaagcctgtcacctttgtggatggccggtctctacctgcaggaagcctgatctctatgcatatctatgccctccataggaacagtgctgtatggcccgaccctgaggtctttgactctctgcgcttttccactgagaatgcatccaaacgccatccctttgcctttatgcccttctctgctgggcccaggaactgcattgggcagcagtttgccatgagtgagatgaaggtggtcacagccatgtgcttgctccgctttgagttctctctggacccctcacggctgcccatcaagatgccccagcttgtcctgcgctccaagaatggctttcacctccacctgaagccactgggccctgggtctgggaagtagctctgatgagaatggggtcccagatggctcaggctgtgacctccctgggcaccaccctccccaggctgggtgtggaggagttggggccccctgccttcaggaggcttgtagtttagaagggaagtaggcattaccatagacgactcctagaggacagtgctatgtaaaaatgtgtgtctataaatgtttatcatgcatgtattctagagctcattcatttattcaacaaacatttggtgagcacctatttcgttcgagaaacttcatttatctcctataattggcaaacttaaaaatgcagcagaaacttacattccaaccttagagactcatagtgagcacaaggaaagttttgccctgagattcatggttatggctgggtaccaccaaatagaagaatggcttaggggagtgccccttcactgagatgtgtttctttgttgaactttgtgtgtgtgtgtttagaatataacagacataagaaaaaattacctaaatgaagactgtacaaaataataaataattctgaagcaga

SEQ ID NO: 124537 - DNA, 2019 bp, Homo sapiens
  Payload ID: 4458
  Gene Symbol: CYP4B1
  Gene Name: cytochrome P450, family 4, subfamily B, polypeptide 1
  ENST ID: ENST00000464439
  CDS Start-End: 19-996
gtggctggaactgcaaccatggtgcccagcttcctctccctgagcttctcctccttgggcctgtgggcttctgggctgatcttggtcttaggctttctcaagctcatccacctgctgctgcggaggcagacgttggctaaggctatggacaaattcccagggcctcccacccactggctttttggacatgccctcgagatccaggagacggggagcctggacaaagtggtgtcctgggcccaccagttcccgtatgcccacccactctggttcggacagttcattggcttcctgaacatctatgagcctgactatgccaaagctgtgtacagccgtggggaccctaaggcccctgatgtgtatgacttcttcctccagtggattgggagaggcctgctggttcttgaggggcccaagtggttgcagcaccgcaagctgctcacacctggctttcattatgatgtgctgaagccctatgtggccgtgttcactgagtctacacgtatcatgctggacaagtgggaagagaaagctcgggagggtaagtcctttgacatcttctgcgatgtgggtcacatggcgctgaacacactcatgaagtgcacctttggaagaggagacaccggcctgggccacagtaccataatgacttcatctactggctcaccccacatggccgccgcttcctgcgggcctgccaggtggcccatgaccatacagaccaggtcatcagggagcggaaggcagccctgcaggatgagaaggtgcggaagaagatccagaaccggaggcacctggacttcctggacattctcctgggtgcccgggatgaagatgacatcaaactgtcagatgcagacctccgggctgaagtggacacattcatgtttgaaggccatgacaccaccaccagtggtatctcctggtttctctactgcatggccctgtaccctgagcaccagcatcgttgtagagaggaggtccgcgagatcctaggggaccaggacttcttccagtgggatgatctgggcaaaatgacttatctgaccatgtgcatcaaggagagcttccgcctctacccacctgtgccccaggtgtaccgccagctcagcaagcctgtcacctttgtggatggccggtctctacctgcaggaagcctgatctctatgcatatctatgccctccataggaacagtgctgtatggcccgaccctgaggtctttgactctctgcgcttttccactgagaatgcatccaaacgccatccctttgcctttatgcccttctctgctgggcccaggaactgcattgggcagcagtttgccatgagtgagatgaaggtggtcacagccatgtgcttgctccgctttgagttctctctggacccctcacggctgcccatcaagatgccccagcttgtcctgcgctccaagaatggctttcacctccacctgaagccactgggccctgggtctgggaagtagctctgatgagaatggggtcccagatggctcaggctgtgacctccctgggcaccaccctccccaggctgggtgtggaggagttggggccccctgccttcaggaggcttgtagtttagaagggaagtaggcattaccatagacgactcctagaggacagtgctatgtaaaaatgtgtgtctataaatgtttatcatgcatgtattctagagctcattcatttattcaacaaacatttggtgagcacctatttcgttcgagaaacttcatttatctcctataattggcaaacttaaaaatgcagcagaaacttacattccaaccttagagactcatagtgagcacaaggaaagttttgccctgagattcatggttatggctgggtaccaccaaatagaagaatggcttaggggagtgccccttcactgagatgtgtttctttgttgaactttgtgtgtgtgtgtttagaatataacagacataagaaaaaattacctaaatgaagactgtacaaaataataaataattctgaagcaga

SEQ ID NO: 124538 - DNA, 1289 bp, Homo sapiens
  Payload ID: 4458
  Gene Symbol: CYP4B1
  Gene Name: cytochrome P450, family 4, subfamily B, polypeptide 1
  ENST ID: ENST00000534708
  CDS Start-End: 85-348
aagatgcatgggtccagagtataaaggaacccaggagcagctgaaggcaggtcagatgaaggctaggtggctggaactgcaaccatggtgcccagcttcctctccctgagcttctcctccttgggcctgtgggcttctgggctgatcttggtcttaggctttctcaagctcatccacctgctgctgcggaggcagacgttggctaaggctatggacaaattcccagggcctcccacccactggctttttggacatgccctcgagggagaggcctgctggttcttgaggggcccaagtggttgcagcaccgcaagctgctcacacctggctttcattatgatgtgctgaagccctatgtggccgtgttcactgagtctacacgtatcatgctggacaagtgggaagagaaagctcgggagggtaagtcctttgacatcttctgcgatgtgggtcacatggcgctgaacacactcatgaagtgcacctttggaagaggagacaccggcctgggccacagggacagcagctactaccttgcagtcagcgatctcactctgttgatgcagcagcgccttgtgtccttccagtaccataatgacttcatctactggctcaccccacatggccgccgcttcctgcgggcctgccaggtggcccatgaccatacagaccaggtcatcagggagcggaaggcagccctgcaggatgagaaggtgcggaagaagatccagaaccggaggcacctggacttcctggacattctcctgggtgcccgggatgaagatgacatcaaactgtcagatgcagacctccgggctgaagtggacacattcatgtttgaaggccatgacaccaccaccagtggtatctcctggtttctctactgcatggccctgtaccctgagcaccagcatcgttgtagagaggaggtccgcgagatcctaggggaccaggacttcttccagtgggatgatctgggcaaaatgacttatctgaccatgtgcatcaaggagagcttccgcctctacccacctgtgccccaggtgtaccgccagctcagcaagcctgtcacctttgtggatggccggtctctacctgcaggaagcctgatctctatgcatatctatgccctccataggaacagtgctgtatggcccgaccctgaggtctttgactctctgcgcttttccactgagaatgcatccaaacgccatccctttgcctttatgcccttctctgctgggcccaggaactgcattgggcagcagtttgccatgagtgagatgaag

SEQ ID NO: 124539 - DNA, 561 bp, Homo sapiens
  Payload ID: 4458
  Gene Symbol: CYP4B1
  Gene Name: cytochrome P450, family 4, subfamily B, polypeptide 1
  ENST ID: ENST00000526297
  CDS Start-End: 351-561
cttctggagaaaaaacaagccgtcccagaacttccagtcctatccaggagacggggagcctggacaaagtggtgtcctgggcccaccagttcccgtatgcccacccactctggttcggacagttcattggcttcctgaacatctatgagcctgactatgccaaagctgtgtacagccgtggggaccctaaggcccctgatgtgtatgacttcttcctccagtggattgggagaggcctgctggttcttgaggggcccaagtggttgcagcaccgcaagctgctcacacctggctttcattatgatgtgctgaagccctatgtggccgtgttcactgagtctacacgtatcatgctggacaagtgggaagagaaagctcgggagggtaagtcctttgacatcttctgcgatgtgggtcacatggcgctgaacacactcatgaagtgcacctttggaagaggagacaccggcctgggccacagcagggacagcagctactaccttgcagtcagcgatctcactctgttgatgcagcagcgccttgtgtccttccagtaccata

SEQ ID NO: 124540 - DNA, 1375 bp, Homo sapiens
  Payload ID: 4458
  Gene Symbol: CYP4B1
  Gene Name: cytochrome P450, family 4, subfamily B, polypeptide 1
  ENST ID: ENST00000529715
  CDS Start-End: 32-448
agatgaaggctaggtggctggaactgcaaccatggtgcccagcttcctctccctgagcttctcctccttgggcctgtgggcttctgggctgatcttggtcttaggctttctcaagctcatccacctgctgctgcggaggcagacgttggctaaggctatggacaaattcccagggcctcccacccactggctttttggacatgccctcgagatccaggagacggggagcctggacaaagtggtgtcctgggcccaccagttcccgtatgcccacccactctggttcggacagttcattggcttcctgaacatctatgagcctgactatgccaaagctgtgtacagccgtggggggggatgcgtgtcctttgtctcacatctggcaatgtcatctgacacaagttcctggacccaggctttgtgggtgcagctgagatacagaaactgagttatcctgtcctaaggaaggagctcactcagccaagaactgctgccacctgtctcctgaggtcctggtagcctaggggagaggcctgctggttcttgaggggcccaagtggttgcagcaccgcaagctgctcacacctggctttcattatgatgtgctgaagccctatgtggccgtgttcactgagtctacacgtatcatgctggacaagtgggaagagaaagctcgggagggtaagtcctttgacatcttctgcgatgtgggtcacatggcgctgaacacactcatgaagtgcacctttggaagaggagacaccggcctgggccacagggacagcagctactaccttgcagtcagcgatctcactctgttgatgcagcagcgccttgtgtccttccagtaccataatgacttcatctactggctcaccccacatggccgccgcttcctgcgggcctgccaggtggcccatgaccatacagaccaggtcatcagggagcggaaggcagccctgcaggatgagaaggtgcggaagaagatccagaaccggaggcacctggacttcctggacattctcctgggtgcccgggatgaagatgacatcaaactgtcagatgcagacctccgggctgaagtggacacattcatgtttgaaggccatgacaccaccaccagtggtatctcctggtttctctactgcatggccctgtaccctgagcaccagcatcgttgtagagaggaggtccgcgagatcctaggggaccaggacttcttccagtggtgagtctgagggtgggcccggtttatcctgctcagcccttgggaagggcgatgcccatcctgtcctgaaccatcctggaaatcaggtgaggtggcggctgctatcctgttacccccagtgtcataccttttgtggtggtggggggt

SEQ ID NO: 124541 - DNA, 1534 bp, Homo sapiens
  Payload ID: 4458
  Gene Symbol: CYP4B1
  Gene Name: cytochrome P450, family 4, subfamily B, polypeptide 1
  ENST ID: ENST00000614163
  CDS Start-End: 1-888
atggtgcccagcttcctctccctgagcttctcctccttgggcctgtgggcttctgggctgatcttggtcttaggctttctcaagctcatccacctgctgctgcggaggcagacgttggctaaggctatggacaaattcccagggcctcccacccactggctttttggacatgccctcgagatccaggagacggggagcctggacaaagtggtgtcctgggcccaccagttcccgtatgcccacccactctggttcggacagttcattggcttcctgaacatctatgagcctgactatgccaaagctgtgtacagccgtggggaccctaaggcccctgatgtgtatgacttcttcctccagtggattgggagaggcctgctggttcttgaggggcccaagtggttgcagcaccgcaagctgctcacacctggctttcattatgatgtgctgaagccctatgtggccgtgttcactgagtctacacgtatcatgctggacaagtgggaagagaaagctcgggagggtaagtcctttgacatcttctgcgatgtgggtcacatggcgctgaacacactcatgaagtgcacctttggaagaggagacaccggcctgggccacagggacagcagctactaccttgcagtcagcgatctcactctgttgatgcagcagcgccttgtgtccttccagtaccataatgacttcatctactggctcaccccacatggccgccgcttcctgcgggcctgccaggtggcccatgaccatacagaccaggtcatcagggagcggaaggcagccctgcaggatgagaaggtgcggaagaagatccagaaccggaggcacctggacttcctggacattctcctgggtgcccggggaagatgacatcaaactgtcagatgcagacctccgggctgaagtggacacattcatgtttgaaggccatgacaccaccaccagtggtatctcctggtttctctactgcatggccctgtaccctgagcaccagcatcgttgtagagaggaggtccgcgagatcctaggggaccaggacttcttccagtgggatgatctgggcaaaatgacttatctgaccatgtgcatcaaggagagcttccgcctctacccacctgtgccccaggtgtaccgccagctcagcaagcctgtcacctttgtggatggccggtctctacctgcaggaagcctgatctctatgcatatctatgccctccataggaacagtgctgtatggcccgaccctgaggtctttgactctctgcgcttttccactgagaatgcatccaaacgccatccctttgcctttatgcccttctctgctgggcccaggaactgcattgggcagcagtttgccatgagtgagatgaaggtggtcacagccatgtgcttgctccgctttgagttctctctggacccctcacggctgcccatcaagatgccccagcttgtcctgcgctccaagaatggctttcacctccacctgaagccactgggccctgggtctgggaagtag

SEQ ID NO: 124542 - DNA, 2977 bp, Homo sapiens
  Payload ID: 4459
  Gene Symbol: CYP4F11
  Gene Name: cytochrome P450, family 4, subfamily F, polypeptide 11
  Uniprot ID: Q9HBI6
  ENST ID: ENST00000248041
  CDS Start-End: 38-1612
agaggcaaagacctcctagcagagggggagaggagggatgccgcagctgagcctgtcctggctgggcctcgggcccgtggcagcatccccgtggctgcttctgctgctggttggaggctcctggctcctggcccgcgtcctggcctggacctacaccttctatgacaactgccgccgcctccagtgttttcctcaacccccgaaacagaactggttttggggacaccagggcctggtcactcccacggaagagggcatgaagacattgacccagctggtgaccacatatccccagggctttaagttgtggctgggtcctaccttccccctcctcattttatgccaccctgacattatccggcctatcaccagtgcctcagctgctgtcgcacccaaggatatgattttctatggcttcctgaagccctggctgggggatgggctcctgctgagtggtggtgacaagtggagccgccaccgtcggatgttgacgcctgccttccatttcaacatcttgaagccttatatgaagattttcaacaagagtgtgaacatcatgcacgacaagtggcagcgcctggcctcagagggcagcgccagactggacatgtttgaacacatcagcctcatgaccttggacagtctgcagaaatgtgtcttcagctttgaaagcaattgtcaggagaagcccagtgaatatattgccgccatcttggagctcagtgcctttgtagaaaagagaaaccagcagattctcttgcacacggacttcctgtattatctcactcctgatgggcagcgcttccgcagggcctgccacctggtgcacgacttcacagatgccgtcatccaggagcggcgctgcaccctccccactcagggtattgatgatttcctcaagaacaaggcaaagtccaagactttagacttcattgatgtgcttctgctgagcaaggatgaagatgggaaggaattgtctgatgaggacataagagcagaagctgacaccttcatgtttgagggccatgacactacagccagtggtctctcctgggtcctataccaccttgcaaagcacccagaataccaggaacagtgccggcaagaagtgcaagagcttctgaaggaccgtgaacctatagagattgaatgggacgacctggcccagctgcccttcctgaccatgtgcattaaggagagcctgcggttgcatcccccagtcccggtcatctcccgatgttgcacgcaggactttgtgctcccagacggccgcgtcatccccaaaggcattgtctgcctcatcaatattatcgggatccattacaacccaactgtgtggccagaccctgaggtctacgaccccttccgtttcgaccaagagaacatcaaggagaggtcacctctggcttttattcccttctcggcagggcccagaaactgcatcgggcaggcgttcgccatggctgagatgaaggtggtcctggcgctcaccctgctgcacttccgcatcctgccgacccacactgaaccccgcaggaaacccgagctgatattgcgcgcagagggtggactttggctgcgggtggagcccctgggtgcgaactcacagtgactgtcctacccacccacccacctctgtagagtcccagaaacaaaactatgctgacacctctgcttgagcctcgttgacagccagcatggggctcctggggactggtgggatctaagaaagggaggtgagtgggtggaggcagggtgacgtctctgaacccaaaaccctgacggcctctctggctgagcacagggcatctaggcccttagtgggttctcccagagcccaagtaaaaactttatcctgtgggcagtagggagccctgggaggtgtttgagcaggagagggaacaggattaagaatgggtttaaggagcaagactgagactctgattcagcgagaaacaaccataggggcagatcccttcatctgtcctgggaatgtcctcccaagactggagtcctcagctcagaacaaagggaaaggggtgcagcttccaccctggcaggctctcagaaatttttagttcctttttccaccaacttcccacccctgtttctccccctcccagtgcgttctctctgtgactctcttcccttactttcagaggcataggatctggagccagactgcttgggctcaagtcctggctctgctgcgtgacttgagcaagttaattcctctctctgtgcctcggttccctcaaccatataatggagacaacagcattacctatatcagggttttcctgaggtctcaatataagggactcagagctgtgcctggcacacaatgaatgctaaatatatggagccattattatttcctgtctcagaaagtctggctgttaaagaatgttgtctttcaagatcgttatttctaccacgactttaaaggctgtgttttggaactcaaaggcaaaaattctaatatctgtgctccttgaacaacctcttctcctagagggctgtgcatataagatatgtatatatatatatatattatatatatatatatatacacacacacacacacacacacacacatatatacatatacacacacacacacacacacacacacacacacacacatatatatatatatatatttttttttttttcctgaggatggtgaaggtacctgactgtgtgaggtggtaggagaatgagagaaacctcagtcagtgtctcaaaataaaatcctgctacaaacattgatctcttttcatagcctaagggatgttgcatcgctaaaccctgttgacttctctaatctcttctgtagctgatctccttcccttgctacactcggttactctggccttgattctgatctccaaatacattatattttttatttgggaccatcgtattgcctttgcacctttatcaaatataagttgcctatatttatttggatcta

SEQ ID NO: 124543 - DNA, 2877 bp, Homo sapiens
  Payload ID: 4459
  Gene Symbol: CYP4F11
  Gene Name: cytochrome P450, family 4, subfamily F, polypeptide 11
  ENST ID: ENST00000326742
  CDS Start-End: 3-1367
ggatgccgcagctgagcctgtcctggctgggcctcgggcccgtggcagcatccccgtggctgcttctgctgctggttggaggctcctggctcctggcccgcgtcctggcctggacctacaccttctatgacaactgccgccgcctccagtgttttcctcaacccccgaaacagaactggttttggggacaccagggcctggtcactcccacggaagagggcatgaagacattgacccagctggtgaccacatatccccagggctttaagttgtggctgggtcctaccttccccctcctcattttatgccaccctgacattatccggcctatcaccagtgcctcagctgctgtcgcacccaaggatatgattttctatggcttcctgaagccctggctgggggatgggctcctgctgagtggtggtgacaagtggagccgccaccgtcggatgttgacgcctgccttccatttcaacatcttgaagccttatatgaagattttcaacaagagtgtgaacatcatgcacgacaagtggcagcgcctggcctcagagggcagcgccagactggacatgtttgaacacatcagcctcatgaccttggacagtctgcagaaatgtgtcttcagctttgaaagcaattgtcaggagaagcccagtgaatatattgccgccatcttggagctcagtgcctttgtagaaaagagaaaccagcagattctcttgcacacggacttcctgtattatctcactcctgatgggcagcgcttccgcagggcctgccacctggtgcacgacttcacagatgccgtcatccaggagcggcgctgcaccctccccactcagggtattgatgatttcctcaagaacaaggcaaagtccaagactttagacttcattgatgtgcttctgctgagcaaggatgaagatgggaaggaattgtctgatgaggacataagagcagaagctgacaccttcatgtttgagggccatgacactacagccagtggtctctcctgggtcctataccaccttgcaaagcacccagaataccaggaacagtgccggcaagaagtgcaagagcttctgaaggaccgtgaacctatagagattgaatgggacgacctggcccagctgcccttcctgaccatgtgcattaaggagagcctgcggttgcatcccccagtcccggtcatctcccgatgttgcacgcaggactttgtgctcccagacggccgcgtcatccccaaaggtctacgaccccttccgtttcgaccaagagaacatcaaggagaggtcacctctggcttttattcccttctcggcagggcccagaaactgcatcgggcaggcgttcgccatggctgagatgaaggtggtcctggcgctcaccctgctgcacttccgcatcctgccgacccacactgaaccccgcaggaaacccgagctgatattgcgcgcagagggtggactttggctgcgggtggagcccctgggtgcgaactcacagtgactgtcctacccacccacccacctctgtagagtcccagaaacaaaactatgctgacacctctgcttgagcctcgttgacagccagcatggggctcctggggactggtgggatctaagaaagggaggtgagtgggtggaggcagggtgacgtctctgaacccaaaaccctgacggcctctctggctgagcacagggcatctaggcccttagtgggttctcccagagcccaagtaaaaactttatcctgtgggcagtagggagccctgggaggtgtttgagcaggagagggaacaggattaagaatgggtttaaggagcaagactgagactctgattcagcgagaaacaaccataggggcagatcccttcatctgtcctgggaatgtcctcccaagactggagtcctcagctcagaacaaagggaaaggggtgcagcttccaccctggcaggctctcagaaatttttagttcctttttccaccaacttcccacccctgtttctccccctcccagtgcgttctctctgtgactctcttcccttactttcagaggcataggatctggagccagactgcttgggctcaagtcctggctctgctgcgtgacttgagcaagttaattcctctctctgtgcctcggttccctcaaccatataatggagacaacagcattacctatatcagggttttcctgaggtctcaatataagggactcagagctgtgcctggcacacaatgaatgctaaatatatggagccattattatttcctgtctcagaaagtctggctgttaaagaatgttgtctttcaagatcgttatttctaccacgactttaaaggctgtgttttggaactcaaaggcaaaaattctaatatctgtgctccttgaacaacctcttctcctagagggctgtgcatataagatatgtatatatatatatatattatatatatatatatatacacacacacacacacacacacacacatatatacatatacacacacacacacacacacacacacacacacacacatatatatatatatatatttttttttttttcctgaggatggtgaaggtacctgactgtgtgaggtggtaggagaatgagagaaacctcagtcagtgtctcaaaataaaatcctgctacaaacattgatctcttttcatagcctaagggatgttgcatcgctaaaccctgttgacttctctaatctcttctgtagctgatctccttcccttgctacactcggttactctggccttgattctgatctccaaatacattatattttttatttgggaccatcgtattgcctttgcacctttatcaaatataagttgcctatatttatttggatcta

SEQ ID NO: 124544 - DNA, 3161 bp, Homo sapiens
  Payload ID: 4459
  Gene Symbol: CYP4F11
  Gene Name: cytochrome P450, family 4, subfamily F, polypeptide 11
  Uniprot ID: Q9HBI6
  ENST ID: ENST00000402119
  CDS Start-End: 428-2002
gagggtatgtgggacaagctgcttctgataggagccaggctggcagtggcagggctggagggtcctggcctgggatggggaggggactgcccaaggttggggtgggtcaaggctgctggcctgggagactggtgatttcctggtaactggacccctggcaacctcccagtgattcaggctgggcctttttggattctaatcagcctctctctctctttccctttctgtgtaactggaggccacttggctgctggttttcattgggcatttctggactttagatctcagctcttgtttacccatctcagagccttccctgatctgcctccagcactgcccatccttgcccctttccactgtccttggagcttcctgggcccttccctgggcctcaggatcccaccctccatcccgtctgccctgcaggatgccgcagctgagcctgtcctggctgggcctcgggcccgtggcagcatccccgtggctgcttctgctgctggttggaggctcctggctcctggcccgcgtcctggcctggacctacaccttctatgacaactgccgccgcctccagtgttttcctcaacccccgaaacagaactggttttggggacaccagggcctggtcactcccacggaagagggcatgaagacattgacccagctggtgaccacatatccccagggctttaagttgtggctgggtcctaccttccccctcctcattttatgccaccctgacattatccggcctatcaccagtgcctcagctgctgtcgcacccaaggatatgattttctatggcttcctgaagccctggctgggggatgggctcctgctgagtggtggtgacaagtggagccgccaccgtcggatgttgacgcctgccttccatttcaacatcttgaagccttatatgaagattttcaacaagagtgtgaacatcatgcacgacaagtggcagcgcctggcctcagagggcagcgccagactggacatgtttgaacacatcagcctcatgaccttggacagtctgcagaaatgtgtcttcagctttgaaagcaattgtcaggagaagcccagtgaatatattgccgccatcttggagctcagtgcctttgtagaaaagagaaaccagcagattctcttgcacacggacttcctgtattatctcactcctgatgggcagcgcttccgcagggcctgccacctggtgcacgacttcacagatgccgtcatccaggagcggcgctgcaccctccccactcagggtattgatgatttcctcaagaacaaggcaaagtccaagactttagacttcattgatgtgcttctgctgagcaaggatgaagatgggaaggaattgtctgatgaggacataagagcagaagctgacaccttcatgtttgagggccatgacactacagccagtggtctctcctgggtcctataccaccttgcaaagcacccagaataccaggaacagtgccggcaagaagtgcaagagcttctgaaggaccgtgaacctatagagattgaatgggacgacctggcccagctgcccttcctgaccatgtgcattaaggagagcctgcggttgcatcccccagtcccggtcatctcccgatgttgcacgcaggactttgtgctcccagacggccgcgtcatccccaaaggcattgtctgcctcatcaatattatcgggatccattacaacccaactgtgtggccagaccctgaggtctacgaccccttccgtttcgaccaagagaacatcaaggagaggtcacctctggcttttattcccttctcggcagggcccagaaactgcatcgggcaggcgttcgccatggctgagatgaaggtggtcctggcgctcaccctgctgcacttccgcatcctgccgacccacactgaaccccgcaggaaacccgagctgatattgcgcgcagagggtggactttggctgcgggtggagcccctgggtgcgaactcacagtgactgtcctacccacccacccacctctgtagagtcccagaaacaaaactatgctgacacctctgcttgagcctcgttgacagccagcatggggctcctggggactggtgggatctaagaaagggaggtgagtgggtggaggcagggtgacgtctctgaacccaaaaccctgacggcctctctggctgagcacagggcatctaggcccttagtgggttctcccagagcccaagtaaaaactttatcctgtgggcagtagggagccctgggaggtgtttgagcaggagagggaacaggattaagaatgggtttaaggagcaagactgagactctgattcagcgagaaacaaccataggggcagatcccttcatctgtcctgggaatgtcctcccaagactggagtcctcagctcagaacaaagggaaaggggtgcagcttccaccctggcaggctctcagaaatttttagttcctttttccaccaacttcccacccctgtttctccccctcccagtgcgttctctctgtgactctcttcccttactttcagaggcataggatctggagccagactgcttgggctcaagtcctggctctgctgcgtgacttgagcaagttaattcctctctctgtgcctcggttccctcaaccatataatggagacaacagcattacctatatcagggttttcctgaggtctcaatataagggactcagagctgtgcctggcacacaatgaatgctaaatatatggagccattattatttcctgtctcagaaagtctggctgttaaagaatgttgtctttcaagatcgttatttctaccacgactttaaaggctgtgttttggaactcaaaggcaaaaattctaatatctgtgctccttgaacaacctcttctcctagagggctgtgcatataagatatgtatatatatatatatattatatatatatatatatacacacacacacacacacacacacacatatatacatatacacacacacacacacacacacacacacacacacacatatatatatatatatatttttttttttttcctgaggatggtgaaggtacctgactgtgtgaggtggtaggagaatgagagaaacctcagtcagtgtctcaaaataaaatcctgctacaaacattg

SEQ ID NO: 124545 - DNA, 2531 bp, Homo sapiens
  Payload ID: 4459
  Gene Symbol: CYP4F11
  Gene Name: cytochrome P450, family 4, subfamily F, polypeptide 11
  ENST ID: ENST00000591841
  CDS Start-End: 1139-1738
tgagatattatttgagtcttagtatagttaggtcttagggtagatttgaattatgccgaagaataggcttggttatacccgggccatgtttaggacattagtgacatcatatttaaatgttatctaggacccttcactgggatacacagaagtcatatcagaccatctcaggtccatggcagagcatgttgtgtcatttagggtttgtcatatgtgttttggccatgtcagggaatgttaacaactgtcggggcaatattccaggtcccagatccatgtcagaagatagcagagagtgctgggagtagacagagtgtcctaggtccctgtaaaggcattctgtagagtgttgagctatgctcaggtgttgcagaacatgttggaccttgtaggagatatgtcactgtgtgctggggcatgctgtgttattgctctactctgtcgctgcagcctggtctggtctctccttcctccaccatcctcccttcttcctctacccttggccttcttcctgctatgctgggtgggatgcgtggaagtgcacacccctggctgggagcattcctccatacccaaagtccttctctcacccctctccatggccactgatggtcctcaatcatgtcagctgctgtcgcacccaaggatatgattttctatggcttcctgaagccctggctgggggatgggctcctgctgagtggtggtgacaagtggagccgccaccgtcggatgttgacgcctgccttccatttcaacatcttgaagccttatatgaagattttcaacaagagtgtgaacatcatgcacgaagcccagtgaatatattgccgccatcttggagctcagtgcctttgtagaaaagagaaaccagcagattctcttgcacacggacttcctgtattatctcactcctgatgggcagcgcttccgcagggcctgccacctggtgcacgacttcacagatgccgtcatccaggagcggcgctgcaccctccccactcagggtattgatgatttcctcaagaacaaggcaaagtccaagactttagacttcattgatgtgcttctgctgagcaaggatgaagatgggaaggaattgtctgatgaggacataagagcagaagctgacaccttcatgtttgagggccatgacactacagccagtggtctctcctgggtcctataccaccttgcaaagcacccagaataccaggaacagtgccggcaagaagtgcaagagcttctgaaggaccgtgaacctatagagattgaatgggacgacctggcccagctgcccttcctgaccatgtgcattaaggagagcctgcggttgcatcccccagtcccggtcatctcccgatgttgcacgcaggactttgtgctcccagacggccgcgtcatccccaaaggcattgtctgcctcatcaatattatcgggatccattacaacccaactgtgtggccagaccctgaggtctacgaccccttccgtttcgaccaagagaacatcaaggagaggtcacctctggcttttattcccttctcggcagggcccagaaactgcatcgggcaggcgttcgccatggctgagatgaaggtggtcctggcgctcaccctgctgcacttccgcatcctgccgacccacactgaaccccgcaggaaacccgagctgatattgcgcgcagagggtggactttggctgcgggtggagcccctgggtgcgaactcacagtgactgtcctacccacccacccacctctgtagagtcccagaaacaaaactatgctgacacctctgcttgagcctcgttgacagccagcatggggctcctggggactggtgggatctaagaaagggaggtgagtgggtggaggcagggtgacgtctctgaacccaaaaccctgacggcctctctggctgagcacagggcatctaggcccttagtgggttctcccagagcccaagtaaaaactttatcctgtgggcagtagggagccctgggaggtgtttgagcaggagagggaacaggattaagaatgggtttaaggagcaagactgagactctgattcagcgagaaacaaccataggggcagatcccttcatctgtcctgggaatgtcctcccaagactggagtcctcagctcagaacaaagggaaaggggtgcagcttccaccctggcaggctctcagaaatttttagttcctttttccaccaacttcccacccctgtttctccccctcccagtgcgttctctctgtgactctcttcccttactttcagaggcataggatctggagccagactgcttgggctcaagtcctggctctgctgcgtgacttgagcaagttaattcctctctctgtgcctcggttccctcaaccatataatggagacaacagcattacctatatcagggttttcctgaggtctcaatataagggactcagagctgtgcctggcacacaatgaatgctaaatatatggagccattattatttcctgtctcagaaagtctggctgttaaag

SEQ ID NO: 124546 - DNA, 2908 bp, Homo sapiens
  Payload ID: 4459
  Gene Symbol: CYP4F11
  Gene Name: cytochrome P450, family 4, subfamily F, polypeptide 11
  ENST ID: ENST00000620614
  CDS Start-End: 37-1401
gaggcaaagacctcctagcagagggggagaggagggatgccgcagctgagcctgtcctggctgggcctcgggcccgtggcagcatccccgtggctgcttctgctgctggttggaggctcctggctcctggcccgcgtcctggcctggacctacaccttctatgacaactgccgccgcctccagtgttttcctcaacccccgaaacagaactggttttggggacaccagggcctggtcactcccacggaagagggcatgaagacattgacccagctggtgaccacatatccccagggctttaagttgtggctgggtcctaccttccccctcctcattttatgccaccctgacattatccggcctatcaccagtgcctcagctgctgtcgcacccaaggatatgattttctatggcttcctgaagccctggctgggggatgggctcctgctgagtggtggtgacaagtggagccgccaccgtcggatgttgacgcctgccttccatttcaacatcttgaagccttatatgaagattttcaacaagagtgtgaacatcatgcacgacaagtggcagcgcctggcctcagagggcagcgccagactggacatgtttgaacacatcagcctcatgaccttggacagtctgcagaaatgtgtcttcagctttgaaagcaattgtcaggagaagcccagtgaatatattgccgccatcttggagctcagtgcctttgtagaaaagagaaaccagcagattctcttgcacacggacttcctgtattatctcactcctgatgggcagcgcttccgcagggcctgccacctggtgcacgacttcacagatgccgtcatccaggagcggcgctgcaccctccccactcagggtattgatgatttcctcaagaacaaggcaaagtccaagactttagacttcattgatgtgcttctgctgagcaaggatgaagatgggaaggaattgtctgatgaggacataagagcagaagctgacaccttcatgtttgagggccatgacactacagccagtggtctctcctgggtcctataccaccttgcaaagcacccagaataccaggaacagtgccggcaagaagtgcaagagcttctgaaggaccgtgaacctatagagattgaatgggacgacctggcccagctgcccttcctgaccatgtgcattaaggagagcctgcggttgcatcccccagtcccggtcatctcccgatgttgcacgcaggactttgtgctcccagacggccgcgtcatccccaaaggtctacgaccccttccgtttcgaccaagagaacatcaaggagaggtcacctctggcttttattcccttctcggcagggcccagaaactgcatcgggcaggcgttcgccatggctgagatgaaggtggtcctggcgctcaccctgctgcacttccgcatcctgccgacccacactgaaccccgcaggaaacccgagctgatattgcgcgcagagggtggactttggctgcgggtggagcccctgggtgcgaactcacagtgactgtcctacccacccacccacctctgtagagtcccagaaacaaaactatgctgacacctctgcttgagcctcgttgacagccagcatggggctcctggggactggtgggatctaagaaagggaggtgagtgggtggaggcagggtgacgtctctgaacccaaaaccctgacggcctctctggctgagcacagggcatctaggcccttagtgggttctcccagagcccaagtaaaaactttatcctgtgggcagtagggagccctgggaggtgtttgagcaggagagggaacaggattaagaatgggtttaaggagcaagactgagactctgattcagcgagaaacaaccataggggcagatcccttcatctgtcctgggaatgtcctcccaagactggagtcctcagctcagaacaaagggaaaggggtgcagcttccaccctggcaggctctcagaaatttttagttcctttttccaccaacttcccacccctgtttctccccctcccagtgcgttctctctgtgactctcttcccttactttcagaggcataggatctggagccagactgcttgggctcaagtcctggctctgctgcgtgacttgagcaagttaattcctctctctgtgcctcggttccctcaaccatataatggagacaacagcattacctatatcagggttttcctgaggtctcaatataagggactcagagctgtgcctggcacacaatgaatgctaaatatatggagccattattatttcctgtctcagaaagtctggctgttaaagaatgttgtctttcaagatcgttatttctaccacgactttaaaggctgtgttttggaactcaaaggcaaaaattctaatatctgtgctccttgaacaacctcttctcctagagggctgtgcatataagatatgtatatatatatatatattatatatatatatatatacacacacacacacacacacacacacatatatacatatacacacacacacacacacacacacacacacacacacatatatatatatatatatttttttttttttcctgaggatggtgaaggtacctgactgtgtgaggtggtaggagaatgagagaaacctcagtcagtgtctcaaaataaaatcctgctacaaacattgatctcttttcatagcctaagggatgttgcatcgctaaaccctgttgacttctctaatctcttctgtagctgatctccttcccttgctacactcggttactctggccttgattctgatctccaaatacattatattttttatttgggaccatcgtattgcctttgcacctttatcaaatataagttgcctatatttatttggat

SEQ ID NO: 124547 - DNA, 1687 bp, Homo sapiens
  Payload ID: 4460
  Gene Symbol: CYP4F12
  Gene Name: cytochrome P450, family 4, subfamily F, polypeptide 12
  ENST ID: ENST00000324632
  CDS Start-End: 53-1627
agctcttccctgggcctcaggtcctcaccctgcatcccctctgccctgcaggatgtcgctgctgagcctgccctggctgggcctcagaccggtggcaacgtccccatggctactcctgctgctggttgtgggctcctggctactcgcccgcatcctggcttggacctatgccttctataacaactgccgccggctccagtgtttcccacagcccccaaaacggaactggttttggggtcacctgggcctgatcactcctacagaggagggcttgaagaactcgacccagatgtcggccacctattcccagggctttacggtatggctgggtcccatcatccccttcatcgttttatgccaccctgacaccatccggtctatcaccaatgcctcagctgccattgcacccaaggataatctcttcatcaggttcctgaagccctggctgggagaagggatactgctgagtggcggtgacaagtggagccgccaccgtcggatgctgacgcccgccttccatttcaacatcctgaagtcctatataacgatcttcaacaagagtgcaaacatcatgcttgacaagtggcagcacctggcctcagagggcagcagtcgtctggacatgtttgagcacatcagcctcatgaccttggacagtctacagaaatgcatcttcagctttgacagccattgtcaggagaggcccagtgaatatattgccaccatcttggagctcagtgcccttgtagagaaaagaagccagcatatcctccagcacatggactttctgtattacctctcccatgacgggcggcgcttccacagggcctgccgcctggtgcatgacttcacagacgctgtcatccgggagcggcgtcgcaccctccccactcagggtattgatgattttttcaaagacaaagccaagtccaagactttggatttcattgatgtgcttctgctgagcaaggatgaagatgggaaggcattgtcagatgaggatataagagcagaggctgacaccttcatgtttggaggccatgacaccacggccagtggcctctcctgggtcctgtacaaccttgcgaggcacccagaataccaggagcgctgccgacaggaggtgcaagagcttctgaaggaccgcgatcctaaagagattgaatgggacgacctggcccagctgcccttcctgaccatgtgcgtgaaggagagcctgaggttacatcccccagctcccttcatctcccgatgctgcacccaggacattgttctcccagatggccgagtcatccccaaaggcattacctgcctcatcgatattataggggtccatcacaacccaactgtgtggccggatcctgaggtctacgaccccttccgctttgacccagagaacagcaaggggaggtcacctctggcttttattcctttctccgcagggcccaggaactgcatcgggcaggcgttcgccatggcggagatgaaagtggtcctggcgttgatgctgctgcacttccggttcctgccagaccacactgagccccgcaggaagctggaattgatcatgcgcgccgagggcgggctttggctgcgggtggagcccctgaatgtaagcttgcagtgactttctgacccatccacctgtttttttgcagattgtcatgaataaaacggtgctgtcacc

SEQ ID NO: 124548 - DNA, 2860 bp, Homo sapiens
  Payload ID: 4460
  Gene Symbol: CYP4F12
  Gene Name: cytochrome P450, family 4, subfamily F, polypeptide 12
  Uniprot ID: Q9HCS2
  ENST ID: ENST00000517734
  CDS Start-End: 48-356
agaagaggagaagaggttgtgtgggacaagctgctcccgacagaaggatgtcgctgctgagcctgccctggctgggcctcagaccggtggcaacgtccccatggctactcctgctgctggttgtgggctcctggctactcgcccgcatcctggcttggacctatgccttctataacaactgccgccggctccagtgtttcccacagcccccaaaacggaactggttttggggtcacctgggcctgatcactcctacagaggagggcttgaagaactcgacccagatgtcggccacctattcccagggctttacgctgccattgcacccaaggataatctcttcatcaggttcctgaagccctggctgggagaagggatactgctgagtggcggtgacaagtggagccgccaccgtcggatgctgacgcccgccttccatttcaacatcctgaagtcctatataacgatcttcaacaagagtgcaaacatcatgcttgacaagtggcagcacctggcctcagagggcagcagtcgtctggacatgtttgagcacatcagcctcatgaccttggacagtctacagaaatgcatcttcagctttgacagccattgtcaggagaggcccagtgaatatattgccaccatcttggagctcagtgcccttgtagagaaaagaagccagcatatcctccagcacatggactttctgtattacctctcccatgacgggcggcgcttccacagggcctgccgcctggtgcatgacttcacagacgctgtcatccgggagcggcgtcgcaccctccccactcagggtattgatgattttttcaaagacaaagccaagtccaagactttggatttcattgatgtgcttctgctgagcaaggtaggtttctctatgatctgaatttaggtgagagaatagagcttcatgtcaaatgtcaggtgaaataaattggttttgatccaaagggcactgggagccatggaagatgcttgagaaagggaaggtcacagataggttttagagatgactttattgcatgcagcccacagggcactgctaattctgaaactgtgaggagcatgatattttattcaacttataagttagtgtgttagtctttcacatttttatgtgtatctatatgtctatgtctttgtctatgtctgtatctatgataaaagatgcaccaaacccctggatcacagcagcccattaattatttacagcagtaacagcaggtggagtaggatggtagtgctggctccccattcctagggcaacacaatgtttttacctgtaaatgcacaagaatttgcaccaaggagaggggcccccacattatgagtattatagcttatataggacagctagctcatatgctccttctttattacagggtgaaagttagagacagagaaagagagagagagagaatgctttgttctggcgtataaactacccctctcctgtgagatggcaatttctagagttttataacccaaatatcttctggaaagataagattctctgggtttaccactctagaatgtcagcaaatatttttggagcaatacataatttctaacctccaaggcaaattgccattcaaatatcctgtaccccaggttgccagtatctttttctctgaaagtctgtattatgcagaaaaatgaaaatattcgagaaccattgattcctgtcaccagggtccaaagaggaggcaaaggatctgggggaagcccttggagttggggctttggtgatggtgaacaagagagatctagacgtgcagagtgcatttgagtttctggaagatcagagcttcagagattatctcaggttagactccggagtctcagagatagtataatttgtgtgtgtgtgtgtgtgtgtgtgtgtgtgtgtgtgtgtgtgtcttgctttctcttcaggatgaagatgggaaggcattgtcagatgaggatataagagcagaggctgacaccttcatgtttggaggccatgacaccacggccagtggcctctcctgggtcctgtacaaccttgcgaggcacccagaataccaggagcgctgccgacaggaggtgcaagagcttctgaaggaccgcgatcctaaagagattgaatgggacgacctggcccagctgcccttcctgaccatgtgcgtgaaggagagcctgaggttacatcccccagctcccttcatctcccgatgctgcacccaggacattgttctcccagatggccgagtcatccccaaaggcattacctgcctcatcgatattataggggtccatcacaacccaactgtgtggccggatcctgaggtgctgccttccccattcaccaccaccacccccatcctctacttttgtgtgtgtgtgtgtgaattccaaggttcctagtggagggggcagggttttgatgaggaaaatccaacatcacctcaccccaaaacacacacaagtgtctctccaaggctgctggacataggaaatcccactggcaaaccttctttgtctcacctgcaggtctacgaccccttccgctttgacccagagaacagcaaggggaggtcacctctggcttttattcctttctccgcagggcccaggaactgcatcgggcaggcgttcgccatggcggagatgaaagtggtcctggcgttgatgctgctgcacttccggttcctgccagaccacactgagccccgcaggaagctggaattgatcatgcgcgccgagggcgggctttggctgcgggtggagcccctgaatgtaagcttgcagtgactttctgacccatccacctgtttttttgcagattgtcatgaataaaacggtgctgtca

SEQ ID NO: 124549 - DNA, 630 bp, Homo sapiens
  Payload ID: 4460
  Gene Symbol: CYP4F12
  Gene Name: cytochrome P450, family 4, subfamily F, polypeptide 12
  ENST ID: ENST00000548237
  CDS Start-End: 62-301
aaagacctcccagcagaagaggagaagaggttgtgtgggacaagctgctcccgacagaaggatgtcgctgctgagcctgccctggctgggcctcagaccggtggcaacgtccccatggctactcctgctgctggttgtgggctcctggctactcgcccgcatcctggcttggacctatgccttctataacaactgccgccggctccagtgtttcccacagcccccaaaacggaactggttttggggtcacctgggcctgctgccattgcacccaaggataatctcttcatcaggttcctgaagccctggctgggagaagggatactgctgagtggcggtgacaagtggagccgccaccgtcggatgctgacgcccgccttccatttcaacatcctgaagtcctatataacgatcttcaacaagagtgcaaacatcatgcttaaggcaccctgttgttcacatggcagagactgggctccgagaaactgagaggaggctgcaatgtctgtggacattgtctctgcaatacttcaaagttcaaccaggtggttatctgcaaatacaactctgagaaatggctcaggacaagtggcagcacctggcctcagagggcagcagtcgtctggacat

SEQ ID NO: 124550 - DNA, 324 bp, Homo sapiens
  Payload ID: 4460
  Gene Symbol: CYP4F12
  Gene Name: cytochrome P450, family 4, subfamily F, polypeptide 12
  ENST ID: ENST00000551607
  CDS Start-End: 114-324
gggacaagctgctcccgacagaaggtaccaggctgggggtggcagggctggaaggtcctggcctgggatgaagaggggactgcctaaggctggggtggctccaagatgctggcatgggaaactgggggtttcctggtaactggactcctagcaaactcccaaggattcagatcactcctacagaggagggcttgaagaactcgacccagatgtcggccacctattcccagggctttacggtatggctgggtcccatcatccccttcatcgttttatgccaccctgacaccatccggtctatcaccaatgcctcagctgccattg

SEQ ID NO: 124551 - DNA, 593 bp, Homo sapiens
  Payload ID: 4460
  Gene Symbol: CYP4F12
  Gene Name: cytochrome P450, family 4, subfamily F, polypeptide 12
  ENST ID: ENST00000547332
  CDS Start-End: 120-434
agcccagcccagcccagccccgcctcctacggccttccctagatcaggggccagggccaaagacctcccagcagaagaggagaagaggttgtgtgggacaagctgctcccgacagaaggatgtcgctgctgagcctgccctggctgggcctcagaccggtggcaacgtccccatggctactcctgctgctggttgtgggctcctggctactcgcccgcatcctggcttggacctatgccttctataacaactgccgccggctccagtgtttcccacagcccccaaaacggaactggttttggggtcacctgggcctgatcactcctacagaggagggcttgaagaactcgacccagatgtcggccacctattcccagggctttacggttcctgaagccctggctgggagaagggatactgctgagtggcggtgacaagtggagccgccaccgtcggatgctgacgcccgccttccatttcaacatcctgaagtcctatataacgatcttcaacaagagtgcaaacatcatgcttgacaagtggcagcacctggcctcagagggcagcagtcgtctggacatgtttgagcacat

SEQ ID NO: 124552 - DNA, 2044 bp, Homo sapiens
  Payload ID: 4460
  Gene Symbol: CYP4F12
  Gene Name: cytochrome P450, family 4, subfamily F, polypeptide 12
  ENST ID: ENST00000550308
  CDS Start-End: 381-1955
gctgccaactgtcatgataagtatatgcttttatctgaacacccttgtcttggaagggcagggtggaggtaaacttggggttcagagtcccctctaaccaccctccaacttcccctgcaaactcccaagaaggtactgagacctgagaattcagtgctcgtgctggggcaccctgagctgcacccagtgggcccaaccccaggttttggctggctgcccaggcacggaagacacacccaggctgtggggattggctgcctcagcccagcccagcccagccccgcctcctacggccttccctagatcaggggccagggccaaagacctcccagcagaagaggagaagaggttgtgtgggacaagctgctcccgacagaaggatgtcgctgctgagcctgccctggctgggcctcagaccggtggcaacgtccccatggctactcctgctgctggttgtgggctcctggctactcgcccgcatcctggcttggacctatgccttctataacaactgccgccggctccagtgtttcccacagcccccaaaacggaactggttttggggtcacctgggcctgatcactcctacagaggagggcttgaagaactcgacccagatgtcggccacctattcccagggctttacggtatggctgggtcccatcatccccttcatcgttttatgccaccctgacaccatccggtctatcaccaatgcctcagctgccattgcacccaaggataatctcttcatcaggttcctgaagccctggctgggagaagggatactgctgagtggcggtgacaagtggagccgccaccgtcggatgctgacgcccgccttccatttcaacatcctgaagtcctatataacgatcttcaacaagagtgcaaacatcatgcttgacaagtggcagcacctggcctcagagggcagcagtcgtctggacatgtttgagcacatcagcctcatgaccttggacagtctacagaaatgcatcttcagctttgacagccattgtcaggagaggcccagtgaatatattgccaccatcttggagctcagtgcccttgtagagaaaagaagccagcatatcctccagcacatggactttctgtattacctctcccatgacgggcggcgcttccacagggcctgccgcctggtgcatgacttcacagacgctgtcatccgggagcggcgtcgcaccctccccactcagggtattgatgattttttcaaagacaaagccaagtccaagactttggatttcattgatgtgcttctgctgagcaaggatgaagatgggaaggcattgtcagatgaggatataagagcagaggctgacaccttcatgtttggaggccatgacaccacggccagtggcctctcctgggtcctgtacaaccttgcgaggcacccagaataccaggagcgctgccgacaggaggtgcaagagcttctgaaggaccgcgatcctaaagagattgaatgggacgacctggcccagctgcccttcctgaccatgtgcgtgaaggagagcctgaggttacatcccccagctcccttcatctcccgatgctgcacccaggacattgttctcccagatggccgagtcatccccaaaggcattacctgcctcatcgatattataggggtccatcacaacccaactgtgtggccggatcctgaggtctacgaccccttccgctttgacccagagaacagcaaggggaggtcacctctggcttttattcctttctccgcagggcccaggaactgcatcgggcaggcgttcgccatggcggagatgaaagtggtcctggcgttgatgctgctgcacttccggttcctgccagaccacactgagccccgcaggaagctggaattgatcatgcgcgccgagggcgggctttggctgcgggtggagcccctgaatgtaagcttgcagtgactttctgacccatccacctgtttttttgcagattgtcatgaataaaacggtgctgtcacctctgcctgggcctcactgacagcctgcag

SEQ ID NO: 124553 - DNA, 567 bp, Homo sapiens
  Payload ID: 4460
  Gene Symbol: CYP4F12
  Gene Name: cytochrome P450, family 4, subfamily F, polypeptide 12
  Uniprot ID: Q9HCS2
  ENST ID: ENST00000548435
  CDS Start-End: 51-359
agcagaagaggagaagaggttgtgtgggacaagctgctcccgacagaaggatgtcgctgctgagcctgccctggctgggcctcagaccggtggcaacgtccccatggctactcctgctgctggttgtgggctcctggctactcgcccgcatcctggcttggacctatgccttctataacaactgccgccggctccagtgtttcccacagcccccaaaacggaactggttttggggtcacctgggcctgatcactcctacagaggagggcttgaagaactcgacccagatgtcggccacctattcccagggctttacgctgccattgcacccaaggataatctcttcatcaggttcctgaagccctggctgggagaagggatactgctgagtggcggtgacaagtggagccgccaccgtcggatgctgacgcccgccttccatttcaacatcctgaagtcctatataacgatcttcaacaagagtgcaaacatcatgcttaaggcaccctgttgttcacatggcagagactgggctccgagaaactgagaggaggctgcaatgtctgt

SEQ ID NO: 124554 - DNA, 2067 bp, Homo sapiens
  Payload ID: 4461
  Gene Symbol: CYP4F2
  Gene Name: cytochrome P450, family 4, subfamily F, polypeptide 2
  ENST ID: ENST00000011989
  CDS Start-End: 34-1596
ggttgtctgggacagactgctcctgacagaaggatgtcccagctgagcctgtcctggctgggcctctggccagtggcagcatccccttggctgctcctcctgctggtcggggcctcctggctcctggcccatgtcctggcctggacctacgccttctatgacaactgccgccgccttcggtgtttcccacaacccccaagacggaactggttttggggacaccagggcatgattcacagctcagaagaaggtctcctatacacacaaagcctggcgtgcacctttggggatatgggctgctggtgggtggggccctggcaggcagtcatccacatctttctccccacgtgcatcaagcctgtgctctttgctccagctgccattgcaccaaaggacaagttcttctacagcttcctggagccctggctgggggatgggctcctgctgagtgctggtgacaagtggagccgccaccgtcggatgctgacgcctgccttccatttcaacatcctgaagccctatatgaagattttcaatgagagtgtgaacatcatgcacgccaagtggcagctcctggcctcagagggtagtgcctgtttggatatgtttgagcacatcagcctcatgaccttggacagtctacagaaatgtgtcttcagctttgacagccattgtcaggagaaacccagtgaatatattgccgccatcttggagctcagtgcccttgtatcaaaaagacaccatgagatcctcctgcatattgacttcctgtattatctcacccctgatgggcagcgtttccgcagggcctgccgcctggtgcacgacttcacagatgccgtcatccaggagcggcgccgcactctccctagccagggtgttgatgacttcctccaagccaaggccaaatccaagactttggacttcattgatgtactcctgctgagcaaggatgaagacgggaagaagttatctgatgaggacataagagcagaagctgacacctttatgtttgagggccatgacaccacggccagtggtctctcctgggtcctgtaccaccttgcaaagcacccagaataccaggagcgctgccggcaggaggtgcaagaacttctgaaggaccgtgagcctaaagagattgaatgggacgacctggcccatttgcccttcctgaccatgtgcatgaaggagagcctgcggctgcatcccccagtcccggtcatctcccgccatgtcacccaggacattgtgctcccagacggccgggtcatccccaaaggcattatctgcctcatcagtgttttcggaacccatcacaacccagctgtgtggccggaccctgaggtctacgacccctttcgctttgacccagagaacatcaaggagaggtcacctctggcttttattcccttctcggcagggcccaggaactgcatcgggcagacgttcgcgatggcggagatgaaggtggtcctggcgctcacgctgctgcgcttccgcgtcctgcctgaccacaccgagccccgcaggaagccggagctggtcctgcgcgcagagggcggactttggctgcgggtggagcccctgagctgagttctgcagagacccactctgaccccactaaaatgacccctgattcatcaaaagtgaagcctagaattaccctaagaccctgttccacagtcctgtattccatcctagatatctactcaaaataattgagacaagtgttcaaacagaaagacgcttgtgcgtgaatgttcatggcggccctattcacagtagccaaacgatgaaaacaaccccaagctatatattaccagatgaaaggataaacaaaatgtggtccatccatacaatggagtattacacagccataaaaaggaatgaagcagtgatccctactacactgtggatgaaccttgaatgcatgatactgaatgaaagacgtcagatgcaaaaggtcacatagtgtactgtccttttatacgaaatttccagaacaggccaatctgaagagatgcatagcggattggtggctttcagcagctgtggggaggtggg

SEQ ID NO: 124555 - DNA, 2407 bp, Homo sapiens
  Payload ID: 4461
  Gene Symbol: CYP4F2
  Gene Name: cytochrome P450, family 4, subfamily F, polypeptide 2
  Uniprot ID: P78329
  ENST ID: ENST00000221700
  CDS Start-End: 97-1659
ctcccacagcctttgctatatcaagggccagggtcaaaggcctcccagcagacagagagaggaggttgtctgggacagactgctcctgacagaaggatgtcccagctgagcctgtcctggctgggcctctggccagtggcagcatccccttggctgctcctcctgctggtcggggcctcctggctcctggcccatgtcctggcctggacctacgccttctatgacaactgccgccgccttcggtgtttcccacaacccccaagacggaactggttttggggacaccagggcatggtcaaccccacagaggagggcatgagagttctgactcagctggtggccacctacccccagggctttaaggtctggatgggacccatctcccccctcctcagtttgtgccaccccgacatcatccggtctgtcatcaacgcctcagctgccattgcaccaaaggacaagttcttctacagcttcctggagccctggctgggggatgggctcctgctgagtgctggtgacaagtggagccgccaccgtcggatgctgacgcctgccttccatttcaacatcctgaagccctatatgaagattttcaatgagagtgtgaacatcatgcacgccaagtggcagctcctggcctcagagggtagtgcctgtttggatatgtttgagcacatcagcctcatgaccttggacagtctacagaaatgtgtcttcagctttgacagccattgtcaggagaaacccagtgaatatattgccgccatcttggagctcagtgcccttgtatcaaaaagacaccatgagatcctcctgcatattgacttcctgtattatctcacccctgatgggcagcgtttccgcagggcctgccgcctggtgcacgacttcacagatgccgtcatccaggagcggcgccgcactctccctagccagggtgttgatgacttcctccaagccaaggccaaatccaagactttggacttcattgatgtactcctgctgagcaaggatgaagacgggaagaagttatctgatgaggacataagagcagaagctgacacctttatgtttgagggccatgacaccacggccagtggtctctcctgggtcctgtaccaccttgcaaagcacccagaataccaggagcgctgccggcaggaggtgcaagaacttctgaaggaccgtgagcctaaagagattgaatgggacgacctggcccatttgcccttcctgaccatgtgcatgaaggagagcctgcggctgcatcccccagtcccggtcatctcccgccatgtcacccaggacattgtgctcccagacggccgggtcatccccaaaggcattatctgcctcatcagtgttttcggaacccatcacaacccagctgtgtggccggaccctgaggtctacgacccctttcgctttgacccagagaacatcaaggagaggtcacctctggcttttattcccttctcggcagggcccaggaactgcatcgggcagacgttcgcgatggcggagatgaaggtggtcctggcgctcacgctgctgcgcttccgcgtcctgcctgaccacaccgagccccgcaggaagccggagctggtcctgcgcgcagagggcggactttggctgcgggtggagcccctgagctgagttctgcagagacccactctgaccccactaaaatgacccctgattcatcaaaagtgaagcctagaattaccctaagaccctgttccacagtcctgtattccatcctagatatctactcaaaataattgagacaagtgttcaaacagaaagacgcttgtgcgtgaatgttcatggcggccctattcacagtagccaaacgatgaaaacaaccccaagctatatattaccagatgaaaggataaacaaaatgtggtccatccatacaatggagtattacacagccataaaaaggaatgaagcagtgatccctactacactgtggatgaaccttgaatgcatgatactgaatgaaagacgtcagatgcaaaaggtcacatagtgtactgtccttttatacgaaatttccagaacaggccaatctgaagagatgcatagcggattggtggctttcagcagctgtggggaggtgggactgaggagcgactgctaatcagtatggggtttcctcccgggatggtgaaaatgttccggacctagatagtgacgaaggtagcacgacactgtgagtgcactaaatgctattgaattggacactttgaaatggtgaatttcgtggtatgtgaattctacctcaatcaaaaaaatttgctattttatctcacatacattttttttctgtccaggttgttcatataataatatgctgtgagcatctttccatgacattaaatcatcttaggaaacatta

SEQ ID NO: 124556 - DNA, 579 bp, Homo sapiens
  Payload ID: 4461
  Gene Symbol: CYP4F2
  Gene Name: cytochrome P450, family 4, subfamily F, polypeptide 2
  ENST ID: ENST00000586927
  CDS Start-End: 119-579
gagccctccctgctctacctccggcactgcccgtccctgcctctccactgtccctggaggtccctgggccgttctctgggcctcaggatctcaccgtccatcccgtctgccctgcaggatgtcccagctgagcctgtcctggctgggcctctggccagtggcagcatccccttggctgctcctcctgctggtcggggcctcctggctcctggcccatgtcctggcctggacctacgccttctatgacaactgccgccgccttcggtgtttcccacaacccccaagacggaactggttttggggacaccagggcatggtcaaccccacagaggagggcatgagagttctgactcagctggtggccacctacccccagggctttaaggtctggatgggacccatctcccccctcctcagtttgtgccaccccgacatcatccggtctgtcatcaacgcctcagctgccattgcaccaaaggacaagttcttctacagcttcctggagccctggctgggggatgggctcctgctgagtgctggtgacaagtggagccgccaccgtcggatgctgacgcctgc

SEQ ID NO: 124557 - DNA, 954 bp, Homo sapiens
  Payload ID: 4461
  Gene Symbol: CYP4F2
  Gene Name: cytochrome P450, family 4, subfamily F, polypeptide 2
  ENST ID: ENST00000587671
  CDS Start-End: 48-317
agacagagagaggaggttgtctgggacagactgctcctgacagaaggatgtcccagctgagcctgtcctggctgggcctctggccagtggcagcatccccttggctgctcctcctgctggtcggggcctcctggctcctggcccatgtcctggcctggacctacgccttctatgacaactgccgccgccttcggtgtttcccacaacccccaagacggaactggttttggggacaccagggcatgctgccattgcaccaaaggacaagttcttctacagcttcctggagccctggctgggggatgggctcctgctgagtgctggtgacaagtggagccgccaccgtcggatgctgacgcctgccttccatttcaacatcctgaagccctatatgaagattttcaatgagagtgtgaacatcatgcacgccaagtggcagctcctggcctcagagggtagtgcctgtttggatatgtttgagcacatcagcctcatgaccttggacagtctacagaaatgtgtcttcagctttgacagccattgtcaggagaaacccagtgaatatattgccgccatcttggagctcagtgcccttgtatcaaaaagacaccatgagatcctcctgcatattgacttcctgtattatctcacccctgatgggcagcgtttccgcagggcctgccgcctggtgcacgacttcacagatgccgtcatccaggagcggcgccgcactctccctagccagggtgttgatgacttcctccaagccaaggccaaatccaagactttggacttcattgatgtactcctgctgagcaaggccatgacaccacggccagtggtctctcctgggtcctgtaccaccttgcaaagcacccagaataccaggagcgctgccggcaggaggtgcaagaacttctgaaggaccgtgagcctaaagagattgaatgggac

SEQ ID NO: 124558 - DNA, 499 bp, Homo sapiens
  Payload ID: 4461
  Gene Symbol: CYP4F2
  Gene Name: cytochrome P450, family 4, subfamily F, polypeptide 2
  ENST ID: ENST00000589654
  CDS Start-End: 1-223
ctgggtcctgtaccaccttgcaaagcacccagaataccaggagcgctgccggcaggaggtgcaagaacttctgaaggaccgtgagcctaaagagattgaatggtctacgacccctttcgctttgacccagagaacatcaaggagaggtcacctctggcttttattcccttctcggcagggcccaggaactgcatcgggcagacgttcgcgatggcggagatgaaggtggtcctggcgctcacgctgctgcgcttccgcgtcctgcctgaccacaccgagccccgcaggaagccggagctggtcctgcgcgcagagggcggactttggctgcgggtggagcccctgagctgagttctgcagagacccactctgaccccactaaaatgacccctgattcatcaaaagtgaagcctagaattaccctaagaccctgttccacagtcctgtattccatcctagatatctactcaaaataattgagacaagtgttcaaacagaa

SEQ ID NO: 124559 - DNA, 2641 bp, Homo sapiens
  Payload ID: 4462
  Gene Symbol: CYP4F22
  Gene Name: cytochrome P450, family 4, subfamily F, polypeptide 22
  Uniprot ID: Q6NT55
  ENST ID: ENST00000269703
  CDS Start-End: 200-1795
gttaaagggttgggccgtgggacggcgcggtcagatcccaggtagtggcgccggtggatccggatcgagggcaggaggctgagacccgcgggagctggccctaaagcaaggacctgagtgcaagtaatttttttgggaagtaataacagaaaataccagcaaggaagaagacagtgaacccaaaagaattgaaaacaggatgctgcccatcacagaccgcctgctgcacctcctggggctggagaagacggcgttccgcatatacgcggtgtccacccttctcctcttcctgctcttcttcctgttccgcctgctgctgcggttcctgaggctctgcaggagcttctacatcacctgccgccggctgcgctgcttcccccagcctccccggcgcaactggctgctgggccacctgggcatgtaccttccaaatgaggcgggccttcaagatgagaagaaggtactggacaacatgcaccatgtactcttggtatggatgggacctgtcctgccgctgttggttctggtgcaccctgattacatcaaaccccttttgggagcctcagctgccatcgcccccaaggatgacctcttctatggcttcctaaaaccttggctaggggatgggctgctgctcagcaaaggtgacaagtggagccggcaccgtcgcctgctgacacccgccttccactttgacatcctgaagccttacatgaagatcttcaaccagagcgctgacattatgcatgctaaatggcggcatctggcagagggctcagcggtctcccttgatatgtttgagcatatcagcctcatgaccctggacagtcttcagaaatgtgtcttcagctacaacagcaactgccaagagaagatgagtgattatatctccgctatcattgaactgagcgctctgtctgtccggcgccagtatcgcttgcaccactacctcgacttcatttactaccgctcggcggatgggcggaggttccggcaggcctgtgacatggtgcaccacttcaccactgaagtcatccaggaacggcggcgggcactgcgtcagcagggggccgaggcctggcttaaggccaagcaggggaagaccttggactttattgatgtgctgctcctggccagggatgaagatggaaaggaactgtcagacgaggatatccgagccgaagcagacaccttcatgtttgagggtcacgacacaacatccagtgggatctcttggatgctgttcaatttggcaaagtatccggaataccaggagaaatgccgagaagagattcaggaagtcatgaaaggccgggagctggaggagctggagtgggacgatctgactcagctgccctttacaactatgtgcattaaggagagcctgcgccagtacccacctgtcactcttgtctctcgccaatgcacggaggacatcaagctcccagatgggcgcatcatccccaaaggaatcatctgcttggtcagcatctatggaacccaccacaaccccacagtgtggcctgactccaaggtgtacaacccctaccgctttgacccggacaacccacagcagcgctctccactggcctatgtgcccttctctgcaggacccaggaattgcatcggacagagcttcgccatggccgagttgcgcgtggttgtggcactaacactgctacgtttccgcctgagcgtggaccgaacgcgcaaggtgcggcggaagccggagctcatactgcgcacggagaacgggctctggctcaaggtggagccgctgcctccgcgggcctgagcgtgggcgcgcccctgcggctcccgagggtccaggccccgcccccaaaggaccaggactcgccccaaagatcccgagggcataggccacccccctcgaagttcaggttcagctcctggatgaccaggcaccgctgttgagcagcctggtggtactggccacgcccctcaaggcaaggctcctccccttagggggcctgatcccgccccttgaggcttaggtcccgccccctgacttctcgcacctgtcctgtttgagggaccagggtcgaccctgcccccttgggctcaggccccgcccccaggatcctacggattgaggtcctcaggccacgcccctgcagatccaggtctccaggccttgcccactgagccttcagaggacctaagacccacctatgactcagggcccaccacaccccacccccccccaactggctgaacccctggcaggcttccaaactgaggaaagctggagcctgacgtcagagcttttaactcggacatcaccctcctgaggccctcagctcatacgggcagactgctcaggcgtgaggctggatcgtagggttcgaggctgcttgcttttgttgttgttttgtaaactcagacccttgtaagccccttccttcctcccttgcccaaagatcctttgctgagtgttctgtttttgcagaataaaagcaaaggatgcagacttaccccaccctccacccctagctcagccagatccttacacgtggagcccccagcatgggaatgaggggctctgcaactgagcgaagctgcgggctaggaggctggaaagccatttatcctaggacataaactcagattttgggggtca

SEQ ID NO: 124560 - DNA, 2445 bp, Homo sapiens
  Payload ID: 4462
  Gene Symbol: CYP4F22
  Gene Name: cytochrome P450, family 4, subfamily F, polypeptide 22
  Uniprot ID: Q6NT55
  ENST ID: ENST00000601005
  CDS Start-End: 5-1600
caggatgctgcccatcacagaccgcctgctgcacctcctggggctggagaagacggcgttccgcatatacgcggtgtccacccttctcctcttcctgctcttcttcctgttccgcctgctgctgcggttcctgaggctctgcaggagcttctacatcacctgccgccggctgcgctgcttcccccagcctccccggcgcaactggctgctgggccacctgggcatgtaccttccaaatgaggcgggccttcaagatgagaagaaggtactggacaacatgcaccatgtactcttggtatggatgggacctgtcctgccgctgttggttctggtgcaccctgattacatcaaaccccttttgggagcctcagctgccatcgcccccaaggatgacctcttctatggcttcctaaaaccttggctaggggatgggctgctgctcagcaaaggtgacaagtggagccggcaccgtcgcctgctgacacccgccttccactttgacatcctgaagccttacatgaagatcttcaaccagagcgctgacattatgcatgctaaatggcggcatctggcagagggctcagcggtctcccttgatatgtttgagcatatcagcctcatgaccctggacagtcttcagaaatgtgtcttcagctacaacagcaactgccaagagaagatgagtgattatatctccgctatcattgaactgagcgctctgtctgtccggcgccagtatcgcttgcaccactacctcgacttcatttactaccgctcggcggatgggcggaggttccggcaggcctgtgacatggtgcaccacttcaccactgaagtcatccaggaacggcggcgggcactgcgtcagcagggggccgaggcctggcttaaggccaagcaggggaagaccttggactttattgatgtgctgctcctggccagggatgaagatggaaaggaactgtcagacgaggatatccgagccgaagcagacaccttcatgtttgagggtcacgacacaacatccagtgggatctcttggatgctgttcaatttggcaaagtatccggaataccaggagaaatgccgagaagagattcaggaagtcatgaaaggccgggagctggaggagctggagtgggacgatctgactcagctgccctttacaactatgtgcattaaggagagcctgcgccagtacccacctgtcactcttgtctctcgccaatgcacggaggacatcaagctcccagatgggcgcatcatccccaaaggaatcatctgcttggtcagcatctatggaacccaccacaaccccacagtgtggcctgactccaaggtgtacaacccctaccgctttgacccggacaacccacagcagcgctctccactggcctatgtgcccttctctgcaggacccaggaattgcatcggacagagcttcgccatggccgagttgcgcgtggttgtggcactaacactgctacgtttccgcctgagcgtggaccgaacgcgcaaggtgcggcggaagccggagctcatactgcgcacggagaacgggctctggctcaaggtggagccgctgcctccgcgggcctgagcgtgggcgcgcccctgcggctcccgagggtccaggccccgcccccaaaggaccaggactcgccccaaagatcccgagggcataggccacccccctcgaagttcaggttcagctcctggatgaccaggcaccgctgttgagcagcctggtggtactggccacgcccctcaaggcaaggctcctccccttagggggcctgatcccgccccttgaggcttaggtcccgccccctgacttctcgcacctgtcctgtttgagggaccagggtcgaccctgcccccttgggctcaggccccgcccccaggatcctacggattgaggtcctcaggccacgcccctgcagatccaggtctccaggccttgcccactgagccttcagaggacctaagacccacctatgactcagggcccaccacaccccacccccccccaactggctgaacccctggcaggcttccaaactgaggaaagctggagcctgacgtcagagcttttaactcggacatcaccctcctgaggccctcagctcatacgggcagactgctcaggcgtgaggctggatcgtagggttcgaggctgcttgcttttgttgttgttttgtaaactcagacccttgtaagccccttccttcctcccttgcccaaagatcctttgctgagtgttctgtttttgcagaataaaagcaaaggatgcagacttaccccaccctccacccctagctcagccagatccttacacgtggagcccccagcatgggaatgaggggctctgcaactgagcgaagctgcgggctaggaggctggaaagccatttatcctaggacataaactcagattttgggggtc

SEQ ID NO: 124561 - DNA, 5050 bp, Homo sapiens
  Payload ID: 4463
  Gene Symbol: CYP4F3
  Gene Name: cytochrome P450, family 4, subfamily F, polypeptide 3
  Uniprot ID: Q08477
  ENST ID: ENST00000221307
  CDS Start-End: 48-1610
agaaggggagaggaggttgtgtgggacaaggtgctcctgacagaaggatgccacagctgagcctgtcctcgctgggcctttggccaatggcagcatccccgtggctgctcctgctgctggttggggcctcctggctcctggcccgcatcctggcctggacctataccttctatgacaactgctgccgcctccggtgtttcccgcaacccccgaaacggaattggttcttgggtcacctgggcctgattcacagctcggaggaaggtctcctatacacacaaagcctggcatgcaccttcggtgatatgtgctgctggtgggtggggccctggcacgcaatcgtccgcatcttccaccccacctacatcaagcctgtgctctttgctccagctgccattgtaccaaaggacaaggtcttctacagcttcctgaagccctggctgggggatgggctcctgctgagtgctggtgaaaagtggagccgccaccgtcggatgctgacgcctgccttccatttcaacatcctgaagccctatatgaagattttcaatgagagtgtgaacatcatgcatgccaagtggcagctcctggcctcagagggtagtgcccgtctggacatgtttgagcacatcagcctcatgaccttggacagtctgcagaaatgtgtcttcagctttgacagccattgccaggagaagcccagtgaatatattgccgccatcttggagctcagtgcccttgtgacaaaaagacaccagcagatcctcctgtacatagacttcctgtattatctcacccctgatgggcagcgtttccgcagggcctgccgcctggtgcacgacttcacagatgccgtcatccaggagcggcgccgcaccctccctagccagggtgttgatgacttcctccaagccaaggccaaatccaagactttggacttcattgatgtactcctgctgagcaaggatgaagatgggaagaagttgtccgatgaggacataagagcagaagctgacacctttatgtttgagggccatgacaccacagccagtggtctctcctgggtcctgtaccaccttgcaaagcacccggaataccaggagcgctgtcggcaggaggtgcaagagcttctgaaggaccgtgagcctaaagagattgaatgggacgacctggcccagctgcccttcctgaccatgtgcattaaggagagcctgaggctgcatcccccagtccctgccgtctctcgctgctgcacccaagacattgtgctcccagacggccgggtcatccccaaaggcattatctgcctcatcagtgtttttggaacccatcacaacccagccgtgtggccggaccctgaggtctatgacccctttcgctttgacccaaagaacatcaaggagaggtcacctctggcttttattcccttctcagcagggcccaggaactgcatcgggcaggcgttcgcgatggcggagatgaaggtggtcctggggctcacgctgctgcgcttccgcgtcctgcctgaccacaccgagccccgcaggaagccggagctggtcctgcgcgcagagggcggactttggctgcgggtggagcccctgagctgagttctgcagagacccactctgaccccactaaaatgacccctgattcatcaaaagtgaggcctagaattaccctaagaccctgttccacagtcctgtattccatcctagatatctactcaaaataattgagacaagtgttcaaacagaaagacgcttgtgcgtgaatgttcatggcagccctattcacagtagccaaacgatgaaaacaaccccaagctatatattaccagatgaaaggataaacaaaatatggtccatccatacaatggagtattacacagccataaaaaggaatgaagcagtgatccccactacactgtggatgaaccttgaatgcatgatactgaatgaaagacatcagatgcaaaaggtcacatagtgtactgtccttttatatgaaatttccagaacaggccaatctgaagagatgtatagtggattggtggctttcagcagctgtggggaggtgggactgaggagcgactgctaatcaggatggggtttcctcctgggatggtgaaaatgttccggacctagatagtgatgaaggtagcacgacactgtgagtgcactaaatgctattgaattggacactttagaatggttgaaatagtgatttttatgtgaattctacctaaacatgctattacagctcatatatactttttccatctggattcttcacaaaagaatatgttgtgagcatctttccatgatattaaatcatcttaggaaacattattttgtgttcttcaaaatgtgcatgttaagtattcaaatcagtcttaaatttttaaaaatatgtaattttagaaaataatttaaaaggttttgtttcagtttgtaagatttcttttctggcactttaatggcttgaggtatcattatcagttacaaattgagttattcttcatcaaatgacttttggagtagagattttatttttatagcaatagatgcacagatattcctgtaagatacaggtgtggttagacacttttctagaacaggcatgccctgcaaactccacagacactgactgtttttgtcctattaagaagtagaccactgagaagggagaaggtgacattttagctttcccaggtaaaagtggttttcatcctcacaccaattttatggactggacgttaactctcttgctcaaggtcactctgagtggaagagtggggataaatctggttcgtttggcatcagaggccatgacttttcctaccacagaagtaattttcaaagtaagtctctgccctaggcacatcagatcacctggggaccactccagagtgagtagacaagactttgacaggggtgcctaatttttttttttttttgagatggagtctcgctctgttgcccaggctggagtgcagtggcatgatctcagttcactgcaacctccgcctcctgcgttcaagtgattgtcctgtctcagcctcccaagtagctgggattacaggcacccaccaccacatccagctaattgttgtatttttaatagaggcggggtttcgccatgttgcactggctggtgttgaactcctaacctcaggtgatccacccgcctcggcctcccaaagtgctgggattacaggcccggtccagtttgatagtttgttatcatgttatacgtacacttagaataatgatccagccatctcattctaacagcaatgagaacttaggctcccctctctactaaaatacaaaagttagctggtcatggtggtgcgggcctgtaatcccagctactcgggaggctgatgcgggagaatcacttgaaacccacaggcggaggttgcagtgagctgaggtggtgccactacgctccagcctgggggagggggacatagcgagactcggtctcaaaaacaaaacaaaacaaaacaaaacaaaacaaaaacaaaacaaaacaaaacaaaacactgccaaactgtttccaaagcatctgcatcgtgtttaatttccataagtaacgtatgagaattctaggtcctccaaataattagcagtccttcgtagtgtcagtttttgtttcagccttccttatgggtatgctgtggcatatccctgagattttaattcgcattttccagtgactaagggtgttgaaccactcgtgccttcctgtgcctatttgacactcctatattttctttggtgaagtgtctgttcaatcatctgctcattaaattttccttcggttgtttgccttcttattgttggattttgagagttctatgtacaagtcctttgtcagtcgtgtgatttgcaagtcttcttcctagtctctgaagtttctttctttcatagagcaaacgttttaaatttttatgaagtaagacttctcagttttatttttggtgaattatgtttatactgccatatataggaactctttgcttaactggaggtcatggagattttctcctacattttcttttaaaagttttatagtttcagagtttacatgtaattccataatctccatttagttaaattttgtatggggtgtgaactgtggtttgactgttttcttgtatatggatatccaattgtttcacacaatttttttgaaaagaatatccttggcagggcacggtagctcacacctgtaatcccagcactttaggaggtcaaggtgggcagatcatgaggtcaggagtttgagaccagcctggccaatatggtgaaaccacgtctctattaaaaatagaaaaattagccaggcgtggtggtgtgtgcctgtattcacagctgcttggatggctgaggcaggagaatcgcttgaacccaggagtcagaggtttcagtgagccgagattgtgccactgcactccagcctgggtgaaagagctagattctctctctcaaaaaaaaaaaaaaaaaaaaggaaagaaagaaagaaaagaaaagaaaatcctttttgctttaacttgccttgcaggtttgtagaaaactcaattgttgaaatttgggtggatatatttctggattttctattctattccatgttggaccaataccacactgccctagtcactgttgcattatagtatatctttaaaggagtaatgggaatccttcaactacattttttccccaataatttttggctattctgcttcctttgtgtttctatgtaaattttatcatcagtgtgtctatttctacaaatagtcctgatagggtttgaattgggatttctgtgaatctatagatcaatctgaggagacttaataatgatattgattctcccaattcatgaatatagtatacccctgtatttatttgttttcttgaatttcttttatcattgttttgtagttttcaccatgacagtcttgcacatattttgttaaatgtacagctgagaatttaattttttctggtgtacaatgctaataaaatggtgctttaaaaga

SEQ ID NO: 124562 - DNA, 559 bp, Homo sapiens
  Payload ID: 4463
  Gene Symbol: CYP4F3
  Gene Name: cytochrome P450, family 4, subfamily F, polypeptide 3
  ENST ID: ENST00000587360
  CDS Start-End: 123-362
gtttactcttactgttctatctccagcactgcccgtctctgcctctctccactgtccctggagctccctgggcccttccctgggcctcaggacctcactcaccaccccatctgccctgcaggatgccacagctgagcctgtcctcgctgggcctttggccaatggcagcatccccgtggctgctcctgctgctggttggggcctcctggctcctggcccgcatcctggcctggacctataccttctatgacaactgctgccgcctccggtgtttcccgcaacccccgaaacggaattggttcttgggtcacctgggcctgctgccattgtaccaaaggacaaggtcttctacagcttcctgaagccctggctgggggatgggctcctgctgagtgctggtgaaaagtggagccgccaccgtcggatgctgacgcctgccttccatttcaacatcctgaagccctatatgaagattttcaatgagagtgtgaacatcatgcatgccaagtggcagctcctggcctcagagggtagtgcccgtctggacatgtttgagcac

SEQ ID NO: 124563 - DNA, 2338 bp, Homo sapiens
  Payload ID: 4463
  Gene Symbol: CYP4F3
  Gene Name: cytochrome P450, family 4, subfamily F, polypeptide 3
  Uniprot ID: Q08477
  ENST ID: ENST00000586182
  CDS Start-End: 35-1597
agaagaaggggagaggaggttgtgtgggacaaggatgccacagctgagcctgtcctcgctgggcctttggccaatggcagcatccccgtggctgctcctgctgctggttggggcctcctggctcctggcccgcatcctggcctggacctataccttctatgacaactgctgccgcctccggtgtttcccgcaacccccgaaacggaattggttcttgggtcacctgggcctggtcacccccacggagcagggcatgagggtcctgactcagctggtggccacctacccccagggctttaaggtctggatgggccccatcttccccgtcatccgtttttgccaccccaacatcatccggtctgtcatcaacgcctcagctgccattgtaccaaaggacaaggtcttctacagcttcctgaagccctggctgggggatgggctcctgctgagtgctggtgaaaagtggagccgccaccgtcggatgctgacgcctgccttccatttcaacatcctgaagccctatatgaagattttcaatgagagtgtgaacatcatgcatgccaagtggcagctcctggcctcagagggtagtgcccgtctggacatgtttgagcacatcagcctcatgaccttggacagtctgcagaaatgtgtcttcagctttgacagccattgccaggagaagcccagtgaatatattgccgccatcttggagctcagtgcccttgtgacaaaaagacaccagcagatcctcctgtacatagacttcctgtattatctcacccctgatgggcagcgtttccgcagggcctgccgcctggtgcacgacttcacagatgccgtcatccaggagcggcgccgcaccctccctagccagggtgttgatgacttcctccaagccaaggccaaatccaagactttggacttcattgatgtactcctgctgagcaaggatgaagatgggaagaagttgtccgatgaggacataagagcagaagctgacacctttatgtttgagggccatgacaccacagccagtggtctctcctgggtcctgtaccaccttgcaaagcacccggaataccaggagcgctgtcggcaggaggtgcaagagcttctgaaggaccgtgagcctaaagagattgaatgggacgacctggcccagctgcccttcctgaccatgtgcattaaggagagcctgaggctgcatcccccagtccctgccgtctctcgctgctgcacccaagacattgtgctcccagacggccgggtcatccccaaaggcattatctgcctcatcagtgtttttggaacccatcacaacccagccgtgtggccggaccctgaggtctatgacccctttcgctttgacccaaagaacatcaaggagaggtcacctctggcttttattcccttctcagcagggcccaggaactgcatcgggcaggcgttcgcgatggcggagatgaaggtggtcctggggctcacgctgctgcgcttccgcgtcctgcctgaccacaccgagccccgcaggaagccggagctggtcctgcgcgcagagggcggactttggctgcgggtggagcccctgagctgagttctgcagagacccactctgaccccactaaaatgacccctgattcatcaaaagtgaggcctagaattaccctaagaccctgttccacagtcctgtattccatcctagatatctactcaaaataattgagacaagtgttcaaacagaaagacgcttgtgcgtgaatgttcatggcagccctattcacagtagccaaacgatgaaaacaaccccaagctatatattaccagatgaaaggataaacaaaatatggtccatccatacaatggagtattacacagccataaaaaggaatgaagcagtgatccccactacactgtggatgaaccttgaatgcatgatactgaatgaaagacatcagatgcaaaaggtcacatagtgtactgtccttttatatgaaatttccagaacaggccaatctgaagagatgtatagtggattggtggctttcagcagctgtggggaggtgggactgaggagcgactgctaatcaggatggggtttcctcctgggatggtgaaaatgttccggacctagatagtgatgaaggtagcacgacactgtgagtgcactaaatgctattgaattggacactttagaatggttgaaatagtgatttttatgtgaattctacctaaacatgctattacagctcatatatactttttccatctggattcttcacaaaagaatatgttgtgagcatctttccatgatattaaatcatcttaggaaacatta

SEQ ID NO: 124564 - DNA, 2983 bp, Homo sapiens
  Payload ID: 4463
  Gene Symbol: CYP4F3
  Gene Name: cytochrome P450, family 4, subfamily F, polypeptide 3
  Uniprot ID: Q08477
  ENST ID: ENST00000591058
  CDS Start-End: 48-1610
agaaggggagaggaggttgtgtgggacaaggtgctcctgacagaaggatgccacagctgagcctgtcctcgctgggcctttggccaatggcagcatccccgtggctgctcctgctgctggttggggcctcctggctcctggcccgcatcctggcctggacctataccttctatgacaactgctgccgcctccggtgtttcccgcaacccccgaaacggaattggttcttgggtcacctgggcctggtcacccccacggagcagggcatgagggtcctgactcagctggtggccacctacccccagggctttaaggtctggatgggccccatcttccccgtcatccgtttttgccaccccaacatcatccggtctgtcatcaacgcctcagctgccattgtaccaaaggacaaggtcttctacagcttcctgaagccctggctgggggatgggctcctgctgagtgctggtgaaaagtggagccgccaccgtcggatgctgacgcctgccttccatttcaacatcctgaagccctatatgaagattttcaatgagagtgtgaacatcatgcatgccaagtggcagctcctggcctcagagggtagtgcccgtctggacatgtttgagcacatcagcctcatgaccttggacagtctgcagaaatgtgtcttcagctttgacagccattgccaggagaagcccagtgaatatattgccgccatcttggagctcagtgcccttgtgacaaaaagacaccagcagatcctcctgtacatagacttcctgtattatctcacccctgatgggcagcgtttccgcagggcctgccgcctggtgcacgacttcacagatgccgtcatccaggagcggcgccgcaccctccctagccagggtgttgatgacttcctccaagccaaggccaaatccaagactttggacttcattgatgtactcctgctgagcaaggatgaagatgggaagaagttgtccgatgaggacataagagcagaagctgacacctttatgtttgagggccatgacaccacagccagtggtctctcctgggtcctgtaccaccttgcaaagcacccggaataccaggagcgctgtcggcaggaggtgcaagagcttctgaaggaccgtgagcctaaagagattgaatgggacgacctggcccagctgcccttcctgaccatgtgcattaaggagagcctgaggctgcatcccccagtccctgccgtctctcgctgctgcacccaagacattgtgctcccagacggccgggtcatccccaaaggcattatctgcctcatcagtgtttttggaacccatcacaacccagccgtgtggccggaccctgaggtctatgacccctttcgctttgacccaaagaacatcaaggagaggtcacctctggcttttattcccttctcagcagggcccaggaactgcatcgggcaggcgttcgcgatggcggagatgaaggtggtcctggggctcacgctgctgcgcttccgcgtcctgcctgaccacaccgagccccgcaggaagccggagctggtcctgcgcgcagagggcggactttggctgcgggtggagcccctgagctgagttctgcagagacccactctgaccccactaaaatgacccctgattcatcaaaagtgaggcctagaattaccctaagaccctgttccacagtcctgtattccatcctagatatctactcaaaataattgagacaagtgttcaaacagaaagacgcttgtgcgtgaatgttcatggcagccctattcacagtagccaaacgatgaaaacaaccccaagctatatattaccagatgaaaggataaacaaaatatggtccatccatacaatggagtattacacagccataaaaaggaatgaagcagtgatccccactacactgtggatgaaccttgaatgcatgatactgaatgaaagacatcagatgcaaaaggtcacatagtgtactgtccttttatatgaaatttccagaacaggccaatctgaagagatgtatagtggattggtggctttcagcagctgtggggaggtgggactgaggagcgactgctaatcaggatggggtttcctcctgggatggtgaaaatgttccggacctagatagtgatgaaggtagcacgacactgtgagtgcactaaatgctattgaattggacactttagaatggttgaaatagtgatttttatgtgaattctacctaaacatgctattacagctcatatatactttttccatctggattcttcacaaaagaatatgttgtgagcatctttccatgatattaaatcatcttaggaaacattattttgtgttcttcaaaatgtgcatgttaagtattcaaatcagtcttaaatttttaaaaatatgtaattttagaaaataatttaaaaggttttgtttcagtttgtaagatttcttttctggcactttaatggcttgaggtatcattatcagttacaaattgagttattcttcatcaaatgacttttggagtagagattttatttttatagcaatagatgcacagatattcctgtaagatacaggtgtggttagacacttttctagaacaggcatgccctgcaaactccacagacactgactgtttttgtcctattaagaagtagaccactgagaagggagaaggtgacattttagctttcccaggtaaaagtggttttcatcctcacaccaattttatggactggacgttaactctcttgctcaaggtcactctgagtggaagagtggggataaatctggttcgtttggcatcagaggccatgacttttcctaccacagaagtaattttcaaagtaagtctctgccctaggcacatcagatcacctggggaccactccagagtgagtagacaagactttgacaggggtgcctaatttttttttttttttgagatggagtctcgctctgttgcc

SEQ ID NO: 124565 - DNA, 2056 bp, Homo sapiens
  Payload ID: 4463
  Gene Symbol: CYP4F3
  Gene Name: cytochrome P450, family 4, subfamily F, polypeptide 3
  Uniprot ID: Q08477
  ENST ID: ENST00000585846
  CDS Start-End: 108-1670
tctatctccagcactgcccgtctctgcctctctccactgtccctggagctccctgggcccttccctgggcctcaggacctcactcaccaccccatctgccctgcaggatgccacagctgagcctgtcctcgctgggcctttggccaatggcagcatccccgtggctgctcctgctgctggttggggcctcctggctcctggcccgcatcctggcctggacctataccttctatgacaactgctgccgcctccggtgtttcccgcaacccccgaaacggaattggttcttgggtcacctgggcctggtcacccccacggagcagggcatgagggtcctgactcagctggtggccacctacccccagggctttaaggtctggatgggccccatcttccccgtcatccgtttttgccaccccaacatcatccggtctgtcatcaacgcctcagctgccattgtaccaaaggacaaggtcttctacagcttcctgaagccctggctgggggatgggctcctgctgagtgctggtgaaaagtggagccgccaccgtcggatgctgacgcctgccttccatttcaacatcctgaagccctatatgaagattttcaatgagagtgtgaacatcatgcatgccaagtggcagctcctggcctcagagggtagtgcccgtctggacatgtttgagcacatcagcctcatgaccttggacagtctgcagaaatgtgtcttcagctttgacagccattgccaggagaagcccagtgaatatattgccgccatcttggagctcagtgcccttgtgacaaaaagacaccagcagatcctcctgtacatagacttcctgtattatctcacccctgatgggcagcgtttccgcagggcctgccgcctggtgcacgacttcacagatgccgtcatccaggagcggcgccgcaccctccctagccagggtgttgatgacttcctccaagccaaggccaaatccaagactttggacttcattgatgtactcctgctgagcaaggatgaagatgggaagaagttgtccgatgaggacataagagcagaagctgacacctttatgtttgagggccatgacaccacagccagtggtctctcctgggtcctgtaccaccttgcaaagcacccggaataccaggagcgctgtcggcaggaggtgcaagagcttctgaaggaccgtgagcctaaagagattgaatgggacgacctggcccagctgcccttcctgaccatgtgcattaaggagagcctgaggctgcatcccccagtccctgccgtctctcgctgctgcacccaagacattgtgctcccagacggccgggtcatccccaaaggcattatctgcctcatcagtgtttttggaacccatcacaacccagccgtgtggccggaccctgaggtctatgacccctttcgctttgacccaaagaacatcaaggagaggtcacctctggcttttattcccttctcagcagggcccaggaactgcatcgggcaggcgttcgcgatggcggagatgaaggtggtcctggggctcacgctgctgcgcttccgcgtcctgcctgaccacaccgagccccgcaggaagccggagctggtcctgcgcgcagagggcggactttggctgcgggtggagcccctgagctgagttctgcagagacccactctgaccccactaaaatgacccctgattcatcaaaagtgaggcctagaattaccctaagaccctgttccacagtcctgtattccatcctagatatctactcaaaataattgagacaagtgttcaaacagaaagacgcttgtgcgtgaatgttcatggcagccctattcacagtagccaaacgatgaaaacaaccccaagctatatattaccagatgaaaggataaacaaaatatggtccatccatacaatggagtattacacagccataaaaaggaatgaagcagtgatccccactacactgtggatgaaccttgaatgcatgatactgaatgaaagacatcagatgcaaaaggtcacatagtgtactg

SEQ ID NO: 124566 - DNA, 561 bp, Homo sapiens
  Payload ID: 4463
  Gene Symbol: CYP4F3
  Gene Name: cytochrome P450, family 4, subfamily F, polypeptide 3
  ENST ID: ENST00000592424
  CDS Start-End: 1-225
atcctcctgtacatagacttcctgtattatctcacccctgatgggcagcgtttccgcagggcctgccgcctggtgcacgacttcacagatgccgtcatccaggagcggcgccgcaccctccctagccagggtgttgatgacttcctccaagccaaggccaaatccaagactttggacttcattgatgtactcctgctgagcaaggtgggcctctctgggatctgaattcaagaagtagaagggagcttcatgtgaaatgtcagatgaaagaatttgaacttgacccagagggcactggggagccatggaaggatgaagatgggaagaagttgtccgatgaggacataagagcagaagctgacacctttatgtttgagggccatgacaccacagccagtggtctctcctgggtcctgtaccaccttgcaaagcacccggaataccaggagcgctgtcggcaggaggtgcaagagcttctgaaggaccgtgagcctaaagagattgaatgggacgacctggcccagctgcccttcctgaccatgtgcattaaggagagcctga

SEQ ID NO: 124567 - DNA, 1569 bp, Homo sapiens
  Payload ID: 4463
  Gene Symbol: CYP4F3
  Gene Name: cytochrome P450, family 4, subfamily F, polypeptide 3
  ENST ID: ENST00000620621
  CDS Start-End: 1-1569
atgtcgctgctgagcctgtcttggctgggcctcaggccggtggcagcatccccgtggctgctcctgctggtggtcggggcctcctggctcctggcccgcatcctggcctggacctatgccttctatcacaacggccgccgcctccggtgtttcccgcagccccggaaacagaactggttcttgggtcacctgggcctggtcactcccacagaggagggcttgagggtcctgacccagctggtggccacctacccccagggctttgtgaggtggttgggccccatcactcccatcatcaacttgtgccaccctgacatcgtccgatctgtcatcaatacctcagctgccattgtaccaaaggacaaggtcttctacagcttcctgaagccctggctgggggatgggctcctgctgagtgctggtgaaaagtggagccgccaccgtcggatgctgacgcctgccttccatttcaacatcctgaagccctatatgaagattttcaatgagagtgtgaacatcatgcatgccaagtggcagctcctggcctcagagggtagtgcccgtctggacatgtttgagcacatcagcctcatgaccttggacagtctgcagaaatgtgtcttcagctttgacagccattgccaggagaagcccagtgaatatattgccgccatcttggagctcagtgcccttgtgacaaaaagacaccagcagatcctcctgtacatagacttcctgtattatctcacccctgatgggcagcgtttccgcagggcctgccgcctggtgcacgacttcacagatgccgtcatccaggagcggcgccgcaccctccctagccagggtgttgatgacttcctccaagccaaggccaaatccaagactttggacttcattgatgtactcctgctgagcaaggatgaagatgggaagaagttgtccgatgaggacataagagcagaagctgacacctttatgtttgagggccatgacaccacagccagtggtctctcctgggtcctgtaccaccttgcaaagcacccggaataccaggagcgctgtcggcaggaggtgcaagagcttctgaaggaccgtgagcctaaagagattgaatgggacgacctggcccagctgcccttcctgaccatgtgcattaaggagagcctgaggctgcatcccccagtccctgccgtctctcgctgctgcacccaagacattgtgctcccagacggccgggtcatccccaaaggcattatctgcctcatcagtgtttttggaacccatcacaacccagccgtgtggccggaccctgaggtctatgacccctttcgctttgacccaaagaacatcaaggagaggtcacctctggcttttattcccttctcagcagggcccaggaactgcatcgggcaggcgttcgcgatggcggagatgaaggtggtcctggggctcacgctgctgcgcttccgcgtcctgcctgaccacaccgagccccgcaggaagccggagctggtcctgcgcgcagagggcggactttggctgcgggtggagcccctgagcgttctgcag

SEQ ID NO: 124568 - DNA, 1889 bp, Homo sapiens
  Payload ID: 4464
  Gene Symbol: CYP4F8
  Gene Name: cytochrome P450, family 4, subfamily F, polypeptide 8
  Uniprot ID: P98187
  ENST ID: ENST00000612078
  CDS Start-End: 62-1624
aaaaacctcctggcaaaggaggagaggaggttgtgcgggacaaccttctcctgacagaaggatgtcgctgctgagcctgtcttggctgggcctcaggccggtggcagcatccccgtggctgctcctgctggtggtcggggcctcctggctcctggcccgcatcctggcctggacctatgccttctatcacaacggccgccgcctccggtgtttcccgcagccccggaaacagaactggttcttgggtcacctgggcctggtcactcccacagaggagggcttgagggtcctgacccagctggtggccacctacccccagggctttgtgaggtggttgggccccatcactcccatcatcaacttgtgccaccctgacatcgtccgatctgtcatcaatacctcagatgccattacagacaaggacatagtcttctacaagaccctgaagccctggctgggggatgggctcttgttaagtgttggtgacaagtggagacaccaccgtcgcttgctgacgcctgccttccatttcaacatcctgaagccctatataaagattttcagcaagagtgcaaacatcatgcatgccaagtggcaacgcctggccatggagggcagcacctgtctggatgtgtttgagcacatcagccttatgaccctggacagtctgcagaaatgcatcttcagctttgacagcaattgtcaggagaagcccagtgaatatattactgcgatcatggagctcagtgcccttgtagtgaaacggaataaccagttcttccggtacaaggacttcctgtacttcctcactccctgtggacggcgcttccacagggcctgcagactggtgcacgacttcacagatgccgtcatccaggagcggcgccgcaccctcactagccagggtgttgatgacttcctccaagccaaggccaagtccaagactttggactttattgatgtgctcctgctgagcgaggataaaaatggtaaagagttgtcagatgaggacataagagcagaagctgacactttcatgtttggaggccatgacaccacggccagtggcctctcctgggtcttgtacaacctcgcgaggcacccagaataccaagaacgctgccggcaggaggtgcaagagcttctgaaggaccgtgagcctaaagagattgaatgggacgacctggcccagttgcccttcctgaccatgtgcctgaaggagagcctgcggttgcatcccccaatccctacattcgcccgcggctgcacccaggacgtggtgctcccagacagccgagtcatccccaaagggaatgtctgtaacatcaacatcttcgcaatccatcacaacccctcagtctggccagaccctgaggtctatgaccccttccgcttcgacccagaaaacgcccagaagaggtcacctatggcttttattcctttctcggcggggcccaggaactgcatcgggcagaagttcgcgatggcagagatgaaggtggtcctggcgctcacgctgctgcgcttccgcatcctgcccgaccacagggagccacgcaggacgccggagattgttttgcgtgcggaggacggactttggctgcgagtagaacccctgggctgaggcctgcagtgacccacccacctacctttgcatcacctacctttgcaccaactaccttttcagatttccggtaataaatctgtgttggcccctgtgcctcagtcccgcggatggccagtagggggcgctggaggactgcggggatctagggcctggctgggaagaggcggggagatgtctctgtgcccaagatactcactgcctctctgggtgagcacaggagccccgtgctgagggtgggatctcccagagtctaagtaaagac

SEQ ID NO: 124569 - DNA, 778 bp, Homo sapiens
  Payload ID: 4464
  Gene Symbol: CYP4F8
  Gene Name: cytochrome P450, family 4, subfamily F, polypeptide 8
  ENST ID: ENST00000617645
  CDS Start-End: 145-778
agcaaaaacctcctggcaaaggaggagaggaggttgtgcgggacaaccttctcctgacagaaggtgccaggctgggggtggcagggctggatagggaggggcactgcccaagactgggatggctccagggagctggccctggtgatgggtgcttgcaggatgtcgctgctgagcctgtcttggctgggcctcaggccggtggcagcatccccgtggctgctcctgctggtggtcggggcctcctggctcctggcccgcatcctggcctggacctatgccttctatcacaacggccgccgcctccggtgtttcccgcagccccggaaacagaactggttcttgggtcacctgggcctggtcactcccacagaggagggcttgagggtcctgacccagctggtggccacctacccccagggctttgtgaggtggttgggccccatcactcccatcatcaacttgtgccaccctgacatcgtccgatctgtcatcaatacctcagatgccattacagacaaggacatagtcttctacaagaccctgaagccctggctgggggatgggctcttgttaagtgttggtgacaagtggagacaccaccgtcgcttgctgacgcctgccttccatttcaacatcctgaagccctatataaagattttcagcaagagtgcaaacatcatgcatgccaagtggcaacgcctggccatggagggcagcacctgtctggatgtgtttgagcacatcagccttatgaccctggacagtctgcagaaatgca

SEQ ID NO: 124570 - DNA, 1292 bp, Homo sapiens
  Payload ID: 4464
  Gene Symbol: CYP4F8
  Gene Name: cytochrome P450, family 4, subfamily F, polypeptide 8
  ENST ID: ENST00000325723
  CDS Start-End: 65-274
agcaaaaacctcctggcaaaggaggagaggaggttgtgcgggacaaccttctcctgacagaaggatgtcgctgctgagcctgtcttggctgggcctcaggccggtggcagcatccccgtggctgctcctgctggtggtcggggcctcctggctcctggcccgcatcctggcctggacctatgccttctatcacaacggccgccgcctccggtgtttcccgcagccccggaaacagaactggttcttgggtcacctgggcctggaagcccagtgaatatattactgcgatcatggagctcagtgcccttgtagtgaaacggaataaccagttcttccggtacaaggacttcctgtacttcctcactccctgtggacggcgcttccacagggcctgcagactggtgcacgacttcacagatgccgtcatccaggagcggcgccgcaccctcactagccagggtgttgatgacttcctccaagccaaggccaagtccaagactttggactttattgatgtgctcctgctgagcgaggataaaaatggtaaagagttgtcagatgaggacataagagcagaagctgacactttcatgtttggaggccatgacaccacggccagtggcctctcctgggtcttgtacaacctcgcgaggcacccagaataccaagaacgctgccggcaggaggtgcaagagcttctgaaggaccgtgagcctaaagagattgaatgggacgacctggcccagttgcccttcctgaccatgtgcctgaaggagagcctgcggttgcatcccccaatccctacattcgcccgcggctgcacccaggacgtggtgctcccagacagccgagtcatccccaaagggaatgtctgtaacatcaacatcttcgcaatccatcacaacccctcagtctggccagaccctgaggtctatgaccccttccgcttcgacccagaaaacgcccagaagaggtcacctatggcttttattcctttctcggcggggcccaggaactgcatcgggcagaagttcgcgatggcagagatgaaggtggtcctggcgctcacgctgctgcgcttccgcatcctgcccgaccacagggagccacgcaggacgccggagattgttttgcgtgcggaggacggactttggctgcgagtagaacccctgggctgaggcctgcagtgacccacccacctacctttgcatcacctacctttgcaccaactaccttttcagatttccggtaataaatctgtgttggcccctgtgcctcagtcccgcggatgg

SEQ ID NO: 124571 - DNA, 588 bp, Homo sapiens
  Payload ID: 4464
  Gene Symbol: CYP4F8
  Gene Name: cytochrome P450, family 4, subfamily F, polypeptide 8
  ENST ID: ENST00000589722
  CDS Start-End: 1-311
gcctgcggttgcatcccccaatccctacattcgcccgcggctgcacccaggacgtggtgctcccagacagccgagtcatccccaaagggaatgtctgtaacatcaacatcttcgcaatccatcacaacccctcagtctggccagaccctgaggtctatgaccccttccgcttcgacccagaaaacgcccagaagaggtcacctatggcttttattcctttctcggcggggcccagggagccacgcaggacgccggagattgttttgcgtgcggaggacggactttggctgcgagtagaacccctgggctgaggcctgcagtgacccacccacctacctttgcatcacctacctttgcaccaactaccttttcagatttccggtaataaatctgtgttggcccctgtgcctcagtcccgcggatggccagtagggggcgctggaggactgcggggatctagggcctggctgggaagaggcggggagatgtctctgtgcccaagatactcactgcctctctgggtgagcacaggagccccgtgctgagggtgggatctcccagagtctaagtaaagactttttccccccc

SEQ ID NO: 124572 - DNA, 2042 bp, Homo sapiens
  Payload ID: 4465
  Gene Symbol: CYP4V2
  Gene Name: cytochrome P450, family 4, subfamily V, polypeptide 2
  Uniprot ID: Q6ZWL3
  ENST ID: ENST00000378802
  CDS Start-End: 305-1882
gggcctccagtgcaatcactacgccctggggcccggaaaccgttttccggtctttcgctttcggctggggcgtggaggccgcggtgctgcgtaggccgggccgggcgcaggaacagccccgtggcgccctctctggccgccgcccgggcgggaaacgtcgttccggggaccgggcgaccccgcagcggggagcgcgccaggtccgcgcggggaagtgggcggtgtgcggccggcaccgcctcgcaccacgcccccgcgggcccgcactttcccggagtgcaccccgcggccgccagccggggcgatggcggggctctggctggggctcgtgtggcagaagctgctgctgtggggcgcggcgagtgccctttccctggccggcgccagtctggtcctgagcctgctgcagagggtggcgagctacgcgcggaaatggcagcagatgcggcccatccccacggtggcccgcgcctacccactggtgggccacgcgctgctgatgaagccggacgggcgagaattttttcagcagatcattgagtacacagaggaataccgccacatgccgctgctgaagctctgggtcgggccagtgcccatggtggccctttataatgcagaaaatgtggaggtaattttaactagttcaaagcaaattgacaaatcctctatgtacaagtttttagaaccatggcttggcctaggacttcttacaagtactggaaacaaatggcgctccaggagaaagatgttaacacccactttccattttaccattctggaagatttcttagatatcatgaatgaacaagcaaatatattggttaagaaacttgaaaaacacattaaccaagaagcatttaactgctttttttacatcactctttgtgccttagatatcatctgtgaaacagctatggggaagaatattggtgctcaaagtaatgatgattccgagtatgtccgtgcagtttatagaatgagtgagatgatatttcgaagaataaagatgccctggctttggcttgatctctggtaccttatgtttaaagaaggatgggaacacaaaaagagccttcagatcctacatacttttaccaacagtgtcatcgctgaacgggccaatgaaatgaacgccaatgaagactgtagaggtgatggcaggggctctgccccctccaaaaataaacgcagggcctttcttgacttgcttttaagtgtgactgatgacgaagggaacaggctaagtcatgaagatattcgagaagaagttgacaccttcatgtttgaggggcacgatacaactgcagctgcaataaactggtccttatacctgttgggttctaacccagaagtccagaaaaaagtggatcatgaattggatgacgtgtttgggaagtctgaccgtcccgctacagtagaagacctgaagaaacttcggtatctggaatgtgttattaaggagacccttcgcctttttccttctgttcctttatttgcccgtagtgttagtgaagattgtgaagtggcaggttacagagttctaaaaggcactgaagccgtcatcattccctatgcattgcacagagatccgagatacttccccaaccccgaggagttccagcctgagcggttcttccccgagaatgcacaagggcgccatccatatgcctacgtgcccttctctgctggccccaggaactgtataggtcaaaagtttgctgtgatggaagaaaagaccattctttcgtgcatcctgaggcacttttggatagaatccaaccagaaaagagaagagcttggtctagaaggacagttgattcttcgtccaagtaatggcatctggatcaagttgaagaggagaaatgcagatgaacgctaactatattattgggttgtgcctttatcatgagaaaggtctttattttaagagatccttgtcatttacaatttacagatcatgagttcaatatgcttgaatcccctagacctaatttttccttgatcccactgatcttgacatcaagtctaacaaagaaaaa

SEQ ID NO: 124573 - DNA, 2357 bp, Homo sapiens
  Payload ID: 4466
  Gene Symbol: CYP4X1
  Gene Name: cytochrome P450, family 4, subfamily X, polypeptide 1
  Uniprot ID: Q8N118
  ENST ID: ENST00000371901
  CDS Start-End: 251-1780
caaaagcagttgggccgaacgaagcgtgcgcgctttggtaaccggctagaaatcccgcacgcgcgcctgcctcctctccccaggcctgagctgcccctcccactgcctttccttcttcccgcgagtcagaagcttcgcgagggcccagagaggcggtggggtgggcgaccctacgccagctccgggcgggagaaagcccaccctctcccgcgccccaggaaaccgccggcgttcggcgctgcgcagagccatggaattctcctggctggagacgcgctgggcgcggcccttttacctggcgttcgtgttctgcctggccctggggctgctgcaggccattaagctgtacctgcggaggcagcggctgctgcgggacctgcgccccttcccagcgccccccacccactggttccttgggcaccagaagtttattcaggatgataacatggagaagcttgaggaaattattgaaaaataccctcgtgccttccctttctggattgggccctttcaggcatttttctgtatctatgacccagactatgcaaagacacttctgagcagaacagatcccaagtcccagtacctgcagaaattctcacctccacttcttggaaaaggactagcggctctagacggacccaagtggttccagcatcgtcgcctactaactcctggattccattttaacatcctgaaagcatacattgaggtgatggctcattctgtgaaaatgatgctggataagtgggagaagatttgcagcactcaggacacaagcgtggaggtctatgagcacatcaactcgatgtctctggatataatcatgaaatgcgctttcagcaaggagaccaactgccagacaaacagcacccatgatccttatgcaaaagccatatttgaactcagcaaaatcatatttcaccgcttgtacagtttgttgtatcacagtgacataattttcaaactcagccctcagggctaccgcttccagaagttaagccgagtgttgaatcagtacacagatacaataatccaggaaagaaagaaatccctccaggctggggtaaagcaggataacactccgaagaggaagtaccaggattttctggatattgtcctttctgccaaggatgaaagtggtagcagcttctcagatattgatgtacactctgaagtgagcacattcctgttggcaggacatgacaccttggcagcaagcatctcctggatcctttactgcctggctctgaaccctgagcatcaagagagatgccgggaggaggtcaggggcatcctgggggatgggtcttctatcacttgggaccagctgggtgagatgtcgtacaccacaatgtgcatcaaggagacgtgccgattgattcctgcagtcccgtccatttccagagatctcagcaagccacttaccttcccagatggatgcacattgcctgcagggatcaccgtggttcttagtatttggggtcttcaccacaaccctgctgtctggaaaaacccaaaggtctttgaccccttgaggttctctcaggagaattctgatcagagacacccctatgcctacttaccattctcagctggatcaaggaactgcattgggcaggagtttgccatgattgagttaaaggtaaccattgccttgattctgctccacttcagagtgactccagaccccaccaggcctcttactttccccaaccattttatcctcaagcccaagaatgggatgtatttgcacctgaagaaactctctgaatgttagatctcagggtacaatgattaaacgtactttgtttttcgaagttaaatttacagctaatgatccaagcagatagaaagggatcaatgtatggtgggaggattggaggttggtgggataggggtctctgtgaagagatccaaaatcatttctaggtacacagtgtgtcagctagatctgtttctatataactttgggagattttcagatcttttctgttaaactttcactactattaatgctgtatacaccaatagactttcatatattttctgttgtttttaaaatagttttcagaattatgcaagtaataagtgcatgtatgctcactgtcaaaaattcccaacactagaaaatcatgtagaataaaaattttaaatctcacttcacttagccgacattccatgccctgaccaatcctactgcttttcctaaaaacagaataatttggtgtgcattctttcagactttttcctatacattttatatgtagaaatgtagcaatgtatttgtatagatgtgatcattcctatattgttattgatttttttcacttaataaaaattcaccttattcctta

SEQ ID NO: 124574 - DNA, 1906 bp, Homo sapiens
  Payload ID: 4467
  Gene Symbol: CYP4Z1
  Gene Name: cytochrome P450, family 4, subfamily Z, polypeptide 1
  Uniprot ID: Q86W10
  ENST ID: ENST00000334194
  CDS Start-End: 4-1521
agaatggagccctcctggcttcaggaactcatggctcaccccttcttgctgctgatcctcctctgcatgtctctgctgctgtttcaggtaatcaggttgtaccagaggaggagatggatgatcagagccctgcacctgtttcctgcaccccctgcccactggttctatggccacaaggagttttacccagtaaaggagtttgaggtgtatcataagctgatggaaaaatacccatgtgctgttcccttgtgggttggaccctttacgatgttcttcagtgtccatgacccagactatgccaagattctcctgaaaagacaagatcccaaaagtgctgttagccacaaaatccttgaatcctgggttggtcgaggacttgtgaccctggatggttctaaatggaaaaagcaccgccagattgtgaaacctggcttcaacatcagcattctgaaaatattcatcaccatgatgtctgagagtgttcggatgatgctgaacaaatgggaggaacacattgcccaaaactcacgtctggagctctttcaacatgtctccctgatgaccctggacagcatcatgaagtgtgccttcagccaccagggcagcatccagttggacagtaccctggactcatacctgaaagcagtgttcaaccttagcaaaatctccaaccagcgcatgaacaattttctacatcacaacgacctggttttcaaattcagctctcaaggccaaatcttttctaaatttaaccaagaacttcatcagttcacagagaaagtaatccaggaccggaaggagtctcttaaggataagctaaaacaagatactactcagaaaaggcgctgggattttctggacatacttttgagtgccaaaagcgaaaacaccaaagatttctctgaagcagatctccaggctgaagtgaaaacgttcatgtttgcaggacatgacaccacatccagtgctatctcctggatcctttactgcttggcaaagtaccctgagcatcagcagagatgccgagatgaaatcagggaactcctaggggatgggtcttctattacctgggaacacctgagccagatgccttacaccacgatgtgcatcaaggaatgcctccgcctctacgcaccggtagtaaacatatcccggttactcgacaaacccatcacctttccagatggacgctccttacctgcaggaataactgtgtttatcaatatttgggctcttcaccacaacccctatttctgggaagaccctcaggtctttaaccccttgagattctccagggaaaattctgaaaaaatacatccctatgccttcataccattctcagctggattaaggaactgcattgggcagcattttgccataattgagtgtaaagtggcagtggcattaactctgctccgcttcaagctggctccagaccactcaaggcctccccagcctgttcgtcaagttgtcctcaagtccaagaatggaatccatgtgtttgcaaaaaaagtttgctaattttaagtcctttcgtataagaattaatgagacaattttcctaccaaaggaagaacaaaaggataaatataatacaaaatatatgtatatggttgtttgacaaattatataacttaggatacttctgactggttttgacatccattaacagtaattttaatttctttgctgtatctggtgaaacccacaaaaacacctgaaaaaactcaagctgacttccactgcgaagggaaattattggtttgtgtaactagtggtagagtggctttcaagcatagtttgatcaaaactccactcagtatctgcattacttttatctctgcaaatatctgcatgatagctttattctcagttatctttccccataataaaaaatatctgccac

SEQ ID NO: 124575 - DNA, 2181 bp, Homo sapiens
  Payload ID: 4468
  Gene Symbol: CYP46A1
  Gene Name: cytochrome P450, family 46, subfamily A, polypeptide 1
  Uniprot ID: Q9Y6A2
  ENST ID: ENST00000261835
  CDS Start-End: 105-1607
ggggccgaggcggcgcgcggcgctgacagctgagtcggctcgcggcctcccggccccctcggcgcccggcccgaccctggcctggcctgccctgccccggagccatgagccccgggctgctgctgctcggcagcgccgtcctgctcgccttcggcctctgctgcaccttcgtgcaccgcgctcgcagccgctacgagcacatccccgggccgccgcggcccagtttccttctaggacacctcccctgcttttggaaaaaggatgaggttggtggccgtgtgctccaagatgtgtttttggattgggctaagaagtatggacctgttgtgcgggtcaacgtcttccacaaaacctcagtcatcgtcacgagtcctgagtcggttaagaagttcctgatgtcaaccaagtacaacaaggactccaagatgtaccgtgcgctccagactgtgtttggtgagagactcttcggccaaggcttggtgtccgaatgcaactatgagcgctggcacaagcagcggagagtcatagacctggccttcagccggagctccttggttagcttaatggaaacattcaacgagaaggctgagcagctggtggagattctagaagccaaggcagatgggcagaccccagtgtccatgcaggacatgctgacctacaccgccatggacatcctggccaaggcagcttttgggatggagaccagtatgctgctgggtgcccagaagcctctgtcccaggcagtgaaacttatgttggagggaatcactgcgtcccgcaacactctggcaaagttcctgccagggaagaggaagcagctccgggaggtccgggagagcattcgcttcctgcgccaggtgggcagggactgggtccagcgccgccgggaagccctgaagaggggcgaggaggttcctgccgacatcctcacacagattctgaaagctgaagagggagcccaggacgacgagggtctgctggacaacttcgtcaccttcttcattgctggtcacgagacctctgccaaccacttggcgttcacagtgatggagctgtctcgccagccagagatcgtggcaaggctgcaggccgaggtggatgaggtcattggttctaagaggtacctggatttcgaggacctggggagactgcagtacctgtcccaggtcctcaaagagtcgctgaggctgtacccaccagcatggggcacctttcgcctgctggaagaggagaccttgattgatggggtcagagtccccggcaacaccccgctcttgttcagcacctatgtcatggggcggatggacacatactttgaggacccgctgactttcaaccccgatcgcttcggccctggagcacccaagccacggttcacctacttccccttctccctgggccaccgctcctgcatcgggcagcagtttgctcagatggaggtgaaggtggtcatggcaaagctgctgcagaggctggagttccggctggtgcccgggcagcgcttcgggctgcaggagcaggccacactcaagccactggaccccgtgctgtgcaccctgcggccccgcggctggcagcccgcacccccaccacccccctgctgagggggcctccaggcaggacgagactcctcgggcaagggccgtgcccgcccacctctgctgcccacggccacccacccttctcccctgccccgtcccctgggccacccttcacgctggcttccagcgggccctctgccgaccgcctgcttcacacccctcagcgctccctgtcgcctgcggactccatggcccttcctggactggcccttgcccaactcccagccaccaccactgtccctaccactgagcccttgcacaggccacttgctcagacgagacaccctaactcttgctcactccctaaagccctcttcaggggtcacctcctccaagaagccctccttgccaccccccgccggcaggggcccctcctctgtgctccctcggtcacctgtgctacctctaacaccacactgaccacactgtatcgtgagtgtccgttgacgtgaccaattgccctgccaggctgtcagcgcctcaagggtagggtctgcgtgtgatttgtctctgagccccctgtgcccacccagggcccggcacagagtcgatgctcaataaatgtgtgttgactgca

SEQ ID NO: 124576 - DNA, 1597 bp, Homo sapiens
  Payload ID: 4468
  Gene Symbol: CYP46A1
  Gene Name: cytochrome P450, family 46, subfamily A, polypeptide 1
  Uniprot ID: Q9Y6A2
  ENST ID: ENST00000380228
  CDS Start-End: 251-1462
cacagccgcagcagctgctgggcgcccaccgcgcacagctgggccccacaaacgtgatggcagccacagccctttcagtttccttctaggacacctcccctgcttttggaaaaaggatgaggttggtggccgtgtgctccaagatgtgtttttggattgggctaagaagtatggacctgttgtgcgggtcaacgtcttccacaaaacctcagtcatcgtcacgagtcctgagtcggttaagaagttcctgatgtcaaccaagtacaacaaggactccaagatgtaccgtgcgctccagactgtgtttggtgagagactcttcggccaaggcttggtgtccgaatgcaactatgagcgctggcacaagcagcggagagtcatagacctggccttcagccggagctccttggttagcttaatggaaacattcaacgagaaggctgagcagctggtggagattctagaagccaaggcagatgggcagaccccagtgtccatgcaggacatgctgacctacaccgccatggacatcctggccaaggcagcttttgggatggagaccagtatgctgctgggtgcccagaagcctctgtcccaggcagtgaaacttatgttggagggaatcactgcgtcccgcaacactctggcaaagttcctgccagggaagaggaagcagctccgggaggtccgggagagcattcgcttcctgcgccaggtgggcagggactgggtccagcgccgccgggaagccctgaagaggggcgaggaggttcctgccgacatcctcacacagattctgaaagctgaagagggagcccaggacgacgagggtctgctggacaacttcgtcaccttcttcattgctggtcacgagacctctgccaaccacttggcgttcacagtgatggagctgtctcgccagccagagatcgtggcaaggctgcaggccgaggtggatgaggtcattggttctaagaggtacctggatttcgaggacctggggagactgcagtacctgtcccaggtcctcaaagagtcgctgaggctgtacccaccagcatggggcacctttcgcctgctggaagaggagaccttgattgatggggtcagagtccccggcaacaccccgctcttgttcagcacctatgtcatggggcggatggacacatactttgaggacccgctgactttcaaccccgatcgcttcggccctggagcacccaagccacggttcacctacttccccttctccctgggccaccgctcctgcatcgggcagcagtttgctcagatggaggtgaaggtggtcatggcaaagctgctgcagaggctggagttccggctggtgcccgggcagcgcttcgggctgcaggagcaggccacactcaagccactggaccccgtgctgtgcaccctgcggccccgcggctggcagcccgcacccccaccacccccctgctgagggggcctccaggcaggacgagactcctcgggcaagggccgtgcccgcccacctctgctgcccacggccacccacccttctcccctgccccgtcccctgggccacccttcacgctggcttccagcgggccctctg

SEQ ID NO: 124577 - DNA, 6609 bp, Homo sapiens
  Payload ID: 4468
  Gene Symbol: CYP46A1
  Gene Name: cytochrome P450, family 46, subfamily A, polypeptide 1
  ENST ID: ENST00000554611
  CDS Start-End: 115-405
cgcctggcctggggccgaggcggcgcgcggcgctgacagctgagtcggctcgcggcctcccggccccctcggcgcccggcccgaccctggcctggcctgccctgccccggagccatgagccccgggctgctgctgctcggcagcgccgtcctgctcgccttcggcctctgctgcaccttcgtgcaccgcgctcgcagccgctacgagcacatccccgggccgccgcggcccagtttccttctaggacacctcccctgcttttggaaaaaggatgaggttggtggccgtgtgctccaagatgtgtttttggattgggctaagaagtatggacctgttgtgcgggtcaacgtcttccacaaaacctcagtcatcgtcacgagtcctgagtcggttaagttccattagtttggcttcctgcattttgaagttctgttatcagaagttcctgatgtcaaccaagtacaacaaggactccaagatgtaccgtgcgctccagactgtgtttggtgagagactcttcggccaaggcttggtgtccgaatgcaactatgagcgctggcacaagcagcggagagtcatagacctggccttcagccggagctccttggttagcttaatggaaacattcaacgagaaggctgagcagctggtggagattctagaagccaaggcagatgggcagaccccagtgtccatgcaggacatgctgacctacaccgccatggacatcctggccaaggcagcttttgggatggagaccagtatgctgctgggtgcccagaagcctctgtcccaggcagtgaaacttatgttggagggaatcactgcgtcccgcaacactctggcaaaggtactgcctcagcaccccctctggtgaccagccaccagagctgttgtcttcatttgctgaagaacctccttcagtgattttttttttttttcccagaatgggttttgagttctggtatgtctgaagtgacttctgaatcaggatttgcatgcattgcctaaagtaaaggcttaaaatcaaattgccttaaagtaaattaggagttaatctttctctcatgtgaaatgatccccaaagcaggcaatgtaggatgactatgatggctccatggtgtcagattttctggatccttctgtcttcctgttccactgtctcagcacatcacctcattgtcataagatggctgctgcgaaaggtgcaccctgcctgccactgcccgtgcccacatggggcctgggaaccaatctgccccacccgctgcagctaccaccacctgcacgcactgtccagggaccagacatgccccacccactgccagcacccgtgcgcatcatctaggggcctgaggaatggtctaccatgagtgctgccaccagcgcctgccactgagagggcctgaggagaggcctgccccacttgccgacactggcccccacatgcatcatccacgggcctgaggaatggtctaccatgactgctgccaccagcgcctgccactgagagggcctgaggagaggcctgccccacttgccgacactggcccccacatgcatcagccaggggcctgaggaatggtctaccatgagtgctgccaccagcgcctgccactgagagggcctgaggagaggcctgccccgcttgccgacactggcccccacatgcatcatccaggggcctgaggaatggtctaccatgactgctgccactagcgcctgccattgagagggcctgaggagaggcctgccccacttgccgacactggcccccacatgcatcatccacgggcctgaggacaagcctgcccagcccaccacccactgttgcctgcacccaagcatgccatctggaggcctggggattggcttgccctgcctaatgtaggtagtgcctgtgtgcaatattggaggacacctgaggataggcccatccctcccgctactgctggcgcccacatatgccatccaagggcctgagcacaggcccatcctacccactgttgccaccagtgatgctcaaggactggcctgcctggcatctccatcctcagcaaagcctcaggatggcctccactaacaatgacagtctaagccactgagaaactcagagataccactgacactgattacagctgaagaaattaaacagaaactatgttactgtgccaatccataatcaagccaaagcaccctacccacccaacactataaatgcccctatagaaaagtctttccctatgaaagccaatccataaaattggaagaagtaactattacactagatgcacaaaggggcaaaagaaacatggaaaaagcaaggaaatactataccttcaaagaaacaataactctccagcaacagattccaaagaaaataaaatttattatatgtctgaaaaagaattcaaaataatgatattaaactctgagatacaagagaacacagataaaaatgcaaagaaatcaggaaaacaattcatcacctgaatgagaaattcaacagagagacagatagatgtaaaagagaaacaaacagaaatcttaaaactgaggaattcagtgaatagaataaaaatataattgaaaacttcaacaatagactagattaagcagaagaaagaatttctgaacttgaagacaggtcttttttgaagcaacccaatcagaccaaaaaaagaaaagattgaagaaagcctttgtgacatgagacagcagtaagtgaccaaatattccagttccgggaatttcaggagaagagatgggcaaaggcatatgaaacctatttaatcaaataatagctgaaaacttctcaagtcttgcaaaagatatagacatccaggtacaggaaatatagagatccaggtatagtcatgctttgtataatgatgggagctcaaaaatctccgagtagattcaacccaaaaaggtctgccttctccaaggcacattatagtcaaagtgttgaaagtcaaagacacagagagaattttaaaaacagcaagagagaagcatgaattcacatataaaggaatcagactaaagtagattgctcagtgaaaatcttacaagccaggagtgattgggataatatattcaaagtgctggaaattaaaaactgtcagtcaagattatagtacccagtaatgctatacttccaaactgaaagagaaataaagtctgtcccaaacaagcaaaaaccgaggtaagtcatcactactagactggccctacaagaaatgtttaagggaattctgcatctggaagtgaaaggacaatctctatcatcatgaaaacacatgaaagtataaagcccactgatagggcagatcagcaaatgagaaagagaaaggagttaaacattactattatagaatgtttaccaaactgcaatgataaacagtaagagaggaagacaggcacaaaatatatacagaaaacaattaatcaaacaaccagaaaacaattaaccaaatgactagagtaagtccttacctatcaataataaccttgaatgtaactagattaaattcccccacttaaaagatatagattgactgaatggataaaaaaattacccaactatatgctgcttacaagaaactcacttcgcctgtaaagacacatacagactgaaagtaaaggaatggaaaaagatattccacacaaacacaagccaaagctgtcaggagtagctataattatatcaaataaaacagactttaagtcaaaaactgtaaaaagagacaaggtcattatataatgataaagggatcaattctgcaagaagataaaatacttctaaatatatttgcacccaataccagagcacccagagatagaaagcaaagatctaaaggaaaagatagactctaatacagtaatagctggggacttcaacaccccactctcagcactggacagatcatctagacagaaaatcatcacagaaacattggatttaactacactttagaccgtatagacctaatagacatttacagaacttttcatctaatagctgcagaacatacattcttctcatcagcacatgaaagattctccaggatagatcatatcttaggccacaaaacaaattttaagaaattgaaatcatatcaagtatcttctcagaccacaatggaataaaactagaaatcaataacaagtgaaactttggaaattgtacaaatacatggaaattaaacaatatactcctgaatgaccactgggtcaatgaagaaattaagaaggaaataaaaaaattcttgaaacaaatgaaaaggggaacacaacataccaaaacctgtgggatacagcaaaagcagtgctaagagcgatgtttataacagtaaacacttacatcaaaaaagtaggaagatttcaaataaacagccaaatgatatatctcaaggaattagaaaagcaagaacaaatcaaagccaaaattagtagaaggaaataaatatcagtgcagaattaaaggaactaaagactaaaaaagtacaaagaccaatgaagtgaaaggttgatttttggaaaagataaaatcaataaaccaagccaagaaaaaaaagaagacccatataaataaaagcagaaactaaaaaggagacattacaactgataccacagaaatacaaaggaacattacagatttttatgaaccactatacactaacgattggaaaacttaaaagaaatggaattcctggacacatacaccctgccaagatgattgaacaaagaagaaatagaaaacctgaacagaccaatggtgagtaatgagattgaaatactaataaaaagtcttccaacaaagaaaagcccgtgaccagatgtctttactgctgaattctcccaaacccatgaagaagaacaccaattcttctcaaactattccaaaaaattgaagaagagggaactcttcctaacttattctatgaggccagcactaccctaccctgataccacaaacagacaaggacacaataaaaaaagaaaaactacatgccaacgtccctgatgaacatagatgcaaaaatattcaacaaaatactagcaaacaaacctaatccaacaacacattaaaaaggtaattcaccatgattaagtgggatttatcccagggatgcaagggtgcttcaacatacacaagtcaataaatgttatacatcatattaacaggatgaaggacaaaagccatatgatcatctcaatagatgcagaaaaagcacttgataaaatttaacaccacttcatgattaaaaactctcaacgaattatgaatagaaggaacgtagctcaacataatgaaggtcgtatatgatatacccacagctaacatcatacttagtggggaaaagctaaaagtctttcctttaagaactggaacaggataaggatgcccactttcatcactcttattcaacgtagtactattaatagaagtgctagccagagcagtcaggcaagagaaagaaataaaagacgtccaaattggaaaagaagaagtcaaactgtccctctttgcagaagacatgatcttatatttagaaattcctaaagactctaccaaaaaactcttagaactgatgaatgacttcagtaaagttgtggggtaaaaaaaaatcagcatacaaaaatcagtagcaattctatacaccaataatgaactcatggaagaagaaaccaataaagcaatcccatttacaattgttatgtagaaaataaaatacctaggaataaatttaaccaaggaggtgaaagacctatacaaggaaaactacaaaacactgatgaaagaaattgaagaagacacaaacaaatgaaaaaacatcccatgctcatggatcgaaagaattaatattgttaaaatgaccatgctacctaaagcaatctaaagattcaatgcaatctctgtcaaaataccaatgacattcttcacagaaatagaaaaagcaatcttaaaatttgcgtgaaaccacgaaagagccaaatagccaaagcaactctgagcaaaaagaacaaagctggaggcaccatactacccgatttcaaaatctactataaagctacaataaccaaaacagcatggtattggtttaaaaaataacaacagacatagaccaatgtaacagaatagacagcccagaaatatattcatgtatttacaggaaacagactcaacaaaggcaccaagaacatacactggggaaagggcagtgctgggaaaactggatatctaaatgcagaagaattaaaccatacccctgtctctcaccatatacaaaaatcaccttaaaatgaatagacttggccgggcgcagtagctcacgcctgtaataccagcactttgggaggccaagatgggcggatcacgaggtcaggagatggagaccatcctggctaatatggtgaaaccctgtctctactaaaaatacaaaaaattagctgggtgtggtggcacacacctatagtcccagctacttgggaggctgaggcaggagaatcacttgaacccgggaggcagaggttgcagtgagctgagatcatgccactgcactccagcctgggcgacagagcgagactacaagactacatctc

SEQ ID NO: 124578 - DNA, 682 bp, Homo sapiens
  Payload ID: 4468
  Gene Symbol: CYP46A1
  Gene Name: cytochrome P450, family 46, subfamily A, polypeptide 1
  ENST ID: ENST00000556313
  CDS Start-End: 1-495
cgcttcctgcgccaggtgggcagggactgggtccagcgccgccgggaagccctgaagaggggcgaggaggttcctgccgacatcctcacacagattctgaaagctgaagagggagcccaggacgacgagggtctgctggacaacttcgtcaccttcttcattgctggtcacgagacctctgccaaccacttggcgttcacagtgatggagctgtctcgccagccagagatcgtggcaaggctgcaggccgaggtggatgaggtcattggttctaagaggtacctggatttcgaggacctggggagactgcagtacctgtcccaggtcctcaaagagtcgctgaggctgtacccaccagcatggggcacctttcgcctgctggaagaggagaccttgattgatggggtcagagtccccggcaacaccccgctcttggaacagtgtgcaagccagctcctcggacatttacccagaagtgagagggctgggttgtaggacccctgactgttcagctttacaaacgaacgccacattgttttccaaagtggctgcaccaacttggatgcccagtagtggtgagagagagcacctgctgttcttcatcatctccagcacttagcatggtccgattttgtatctgctgccatccaaatatgtgtttttaaaaaagtatttcactgtg

SEQ ID NO: 124579 - DNA, 622 bp, Homo sapiens
  Payload ID: 4468
  Gene Symbol: CYP46A1
  Gene Name: cytochrome P450, family 46, subfamily A, polypeptide 1
  ENST ID: ENST00000554917
  CDS Start-End: 1-155
ttcctgccagggaagaggaagcagctccgggaggtccgggagagcattcgcttcctgcgccaggtgggcagggactgggtccagcgccgccgggaagccctgaagaggggcgaggaggttcctgccgacatcctcacacagattctgaaagctgaagagggagcccaggacgacgagggtctgctggacaacttcgtcaccttcttcattgctggtcacgagacctctgccaaccacttggcgttcacagtgatggagctgtctcgccagccagagatcgtggcaaggctgcaggccgaggtggatgaggtcattggttctaagaggtacctggatttcgaggacctggggagactgcagtacctgtcccaggtcctcaaagagtcgctgaggctgtacccaccagcatggggcacctttcgcctgctggaagaggagaccttgattgatgggttcagcacctatgtcatggggcggatggacacatactttgaggacccgctgactttcaaccccgatcgcttcggccctggagcacccaagccacggttcacctacttccccttctccctgggccaccgctcctgcatcgggcagcagtttgctcaggtaggaggggcag

SEQ ID NO: 124580 - DNA, 3210 bp, Homo sapiens
  Payload ID: 4469
  Gene Symbol: CYP51A1
  Gene Name: cytochrome P450, family 51, subfamily A, polypeptide 1
  ENST ID: ENST00000003100
  CDS Start-End: 167-1696
ttctgtgacgcacggggtggcgcgcgtgggacccgaggggtggggctgggtttagtaggagacctggggcaaggccccctgtggacgaccatctgccagcttctctcgttccgtcgattgggaggagcggtggcgacctcggccttcagtgtttccgacggagtgaatggcggcggcggctgggatgctgctgctgggcttgctgcaggcgggtgggtcggtgctgggccaggcgatggagaaggtgacaggcggcaacctcttgtccatgctgctgatcgcctgcgccttcaccctcagcctggtctacctgatccgtctggccgccggccacctggtccagctgcccgcaggggtgaaaagtcctccatacattttctccccaattccattccttgggcatgccatagcatttgggaaaagtccaattgaatttctagaaaatgcatatgagaagtatggacctgtatttagttttaccatggtaggcaagacatttacttaccttctggggagtgatgctgctgcactgctttttaatagtaaaaatgaagacctgaatgcagaagatgtctacagtcgcctgacaacacctgtgtttgggaagggagttgcatacgatgtgcctaatccagttttcttggagcagaagaaaatgttaaaaagtggccttaacatagcccactttaaacagcatgtttctataattgaaaaagaaacaaaggaatactttgagagttggggagaaagtggagaaaaaaatgtgtttgaagctctttctgagctcataattttaacagctagccattgtttgcatggaaaggaaatcagaagtcaactcaatgaaaaggtagcacagctgtatgcagatttggatggaggtttcagccatgcagcctggctcttaccaggttggctgcctttgcctagtttcagacgcagggacagagctcatcgggaaatcaaggatattttctataaggcaatccagaaacgcagacagtctcaagaaaaaattgatgacattctccaaactttactagatgctacatacaaggatgggcgtcctttgactgatgatgaagtagcagggatgcttattggattactcttggcagggcagcatacatcctcaactactagtgcttggatgggcttctttttggccagagacaaaacacttcaaaaaaaatgttatttagaacagaaaacagtctgtggagagaatctgcctcctttaacttatgaccagctcaaggatctaaatttacttgatcgctgtataaaagaaacattaagacttagacctcctataatgatcatgatgagaatggccagaactcctcagactgtggcagggtataccattcctccaggacatcaggtgtgtgtttctcccactgtcaatcaaagacttaaagactcatgggtagaacgcctggactttaatcctgatcgctacttacaggataacccagcatcaggggaaaagtttgcctatgtgccatttggagctgggcgtcatcgttgtattggggaaaattttgcctatgttcaaattaagacaatttggtccactatgcttcgtttatatgaatttgatctcattgatggatactttcccactgtgaattatacaactatgattcacacccctgaaaacccagttatccgttacaaacgaagatcaaaatgaaaaaggttgcaaggaacgaatatatgtgattatcactgtaagccacaaaggcattcgaagagaatgaagtgtacaaaacaactcttgtagtttactgtttttttaagtgtgtaattctaaaagccagtttatgatttaggattttgttaactgaatggttctatcaaatataatagcatttgaaacattttctaatagttatgatacttatacatgtgctttcaggaagttccttggtgaaacaattgttgaggggggatctaggtaattggcagattctaaataatataatttccagatagtaattttaagagtactcatcgctcttgccaaataagttcagggtattcaaatcttggactagtcctgcaaggtataaagaataaaaatcccagtgagatacttggaaaccacagtttattattatttatctgggcaattattgtgtgtgtgaggatggaagggtagggaataatcgaacatctaaagccttgaataagagaatactaattgttttggtatgatgatactcagaaatggagatattataggaaaaagaaatcctttggaattttaactaaaatcactgcatatgggaaattaagagatccaggaccatatttgataagagttcctaaaaataatgtaattattaatgctaaagactgctcatgtatcttgatctaattactaaataattacatatttatttacctgataaatatgtatctagttctacaaggtcacatttatgtggaagtccaaagtcaagtccttaggggataattttgttttggctcagttgttccctgcttcctttttttttttttttttttgagatggagtctcgctctgttgcccaggctggagtgcagtggtgcgatctcagctcactgcatcctctgcctcccgggttcaagcaattctctgcctcagcctcccaagtagttgggattacaggcacctgccaccatgcctggctaattttttgtatttttagtagagacgggggtttcactatgttggctaggctggtcttgaactcctgacctcgtgatccacccgccttggcctcccaaagtgctgggattacaggcatgagccaccgcacctggccttccctgcttcctctctagaatccaattagggatgtttgttactactcatattgattaaaacagttaacaaacttttttctttttaaaatgtgagatcagtgaactctggttttaagataatctgaaacaaggtccttgggagtaataaaattggtcacattctgtaaagcacattctgtttaggaatcaacttatctcaaattgtaactcggggcctaactatatgagatggctgaaaaaataccacatcgtctgttttcactaggtgatgccaaaatattttgctttatgtatattacagttctttttaaaacactggaagactcatgttaaactctaattgtgaaggcagaatctctgctaatttttcagattaaaattctctttgaaaaaata

SEQ ID NO: 124581 - DNA, 747 bp, Homo sapiens
  Payload ID: 4469
  Gene Symbol: CYP51A1
  Gene Name: cytochrome P450, family 51, subfamily A, polypeptide 1
  ENST ID: ENST00000422867
  CDS Start-End: 1-667
cagagctcatcgggaaatcaaggatattttctataaggcaatccagaaacgcagacagtctcaagaaaaaattgatgacattctccaaactttactagatgctacatacaaggatgggcgtcctttgactgatgatgaagtagcagggatgcttattggattactcttggcagggcagcatacatcctcaactactagtgcttggatgggcttctttttggccagagacaaaacacttcaaaaaaaatgttatttagaacagaaaacagtctgtggagagaatctgcctcctttaacttatgaccagctcaaggatctaaatttacttgatcgctgtataaaagaaacattaagacttagacctcctataatgatcatgatgagaatggccagaactcctcagactgtggcagggtataccattcctccaggacatcaggataacccagcatcaggggaaaagtttgcctatgtgccatttggagctgggcgtcatcgttgtattggggaaaattttgcctatgttcaaattaagacaatttggtccactatgcttcgtttatatgaatttgatctcattgatggatactttcccactgtgaattatacaactatgattcacacccctgaaaacccagttatccgttacaaacgaagatcaaaatgaaaaaggttgcaaggaacgaatatatgtgattatcactgtaagccacaaaggcattcgaagagaatgaagtgtacaaaaca

SEQ ID NO: 124582 - DNA, 1729 bp, Homo sapiens
  Payload ID: 4469
  Gene Symbol: CYP51A1
  Gene Name: cytochrome P450, family 51, subfamily A, polypeptide 1
  Uniprot ID: Q16850
  ENST ID: ENST00000450723
  CDS Start-End: 262-1476
acagagcgcgccgtcgccgctcgagctcgccctgagatccctccgctcagcgccttcaacgccgtgtcccggcaccccgcacccgggcacacaaaaaacgggtcgcccgcgattctcagggattgatcgcctcttcagaaaagtcctccatacattttctccccaattccattccttgggcatgccatagcatttgggaaaagtccaattgaatttctagaaaatgcatatgagaagtatggacctgtatttagttttaccatggtaggcaagacatttacttaccttctggggagtgatgctgctgcactgctttttaatagtaaaaatgaagacctgaatgcagaagatgtctacagtcgcctgacaacacctgtgtttgggaagggagttgcatacgatgtgcctaatccagttttcttggagcagaagaaaatgttaaaaagtggccttaacatagcccactttaaacagcatgtttctataattgaaaaagaaacaaaggaatactttgagagttggggagaaagtggagaaaaaaatgtgtttgaagctctttctgagctcataattttaacagctagccattgtttgcatggaaaggaaatcagaagtcaactcaatgaaaaggtagcacagctgtatgcagatttggatggaggtttcagccatgcagcctggctcttaccaggttggctgcctttgcctagtttcagacgcagggacagagctcatcgggaaatcaaggatattttctataaggcaatccagaaacgcagacagtctcaagaaaaaattgatgacattctccaaactttactagatgctacatacaaggatgggcgtcctttgactgatgatgaagtagcagggatgcttattggattactcttggcagggcagcatacatcctcaactactagtgcttggatgggcttctttttggccagagacaaaacacttcaaaaaaaatgttatttagaacagaaaacagtctgtggagagaatctgcctcctttaacttatgaccagctcaaggatctaaatttacttgatcgctgtataaaagaaacattaagacttagacctcctataatgatcatgatgagaatggccagaactcctcagactgtggcagggtataccattcctccaggacatcaggtgtgtgtttctcccactgtcaatcaaagacttaaagactcatgggtagaacgcctggactttaatcctgatcgctacttacaggataacccagcatcaggggaaaagtttgcctatgtgccatttggagctgggcgtcatcgttgtattggggaaaattttgcctatgttcaaattaagacaatttggtccactatgcttcgtttatatgaatttgatctcattgatggatactttcccactgtgaattatacaactatgattcacacccctgaaaacccagttatccgttacaaacgaagatcaaaatgaaaaaggttgcaaggaacgaatatatgtgattatcactgtaagccacaaaggcattcgaagagaatgaagtgtacaaaacaactcttgtagtttactgtttttttaagtgtgtaattctaaaagccagtttatgatttaggattttgttaactgaatggttctatcaaatataatagcatttgaaacattttctaatagttatgatacttatacatgtgctttcaggaagttccttggtgaaacaattgttgag

SEQ ID NO: 124583 - DNA, 556 bp, Homo sapiens
  Payload ID: 4469
  Gene Symbol: CYP51A1
  Gene Name: cytochrome P450, family 51, subfamily A, polypeptide 1
  ENST ID: ENST00000435873
  CDS Start-End: 467-556
aacctgttccggtccccttccacactgcggaagcattgttctttcgctctttgcaataaatcttgctgctgctctctctttgggtccacactgcctttatgagctgtaacactcaacacgcaggtctgcagcttcactcttgaagccagcaagaccaggaacccaccgggagaaaggaacaactccagacgcgccgccttaagagctgtaacactcactgcgaaggtctgcagcttcactcctgagccagcgagaccacgatcccaccagaaggaagaaactccgaacacatccgaacatcagaaggaacaaactccagaggcgccatcttaagagctgtaacactgaccgtgagggtcggcttcatacttgaagtcagtgagacgaagaacccaccaattccggacacaatttgacttaagccaggccattaacagtttcttttggatctttttgcagagctactatggaagatgcactctttctgcggaaaagtcctccatacattttctccccaattccattccttgggcatgccatagcatttgggaaaagt

SEQ ID NO: 124584 - DNA, 2950 bp, Homo sapiens
  Payload ID: 4470
  Gene Symbol: CYP7A1
  Gene Name: cytochrome P450, family 7, subfamily A, polypeptide 1
  Uniprot ID: P22680
  ENST ID: ENST00000301645
  CDS Start-End: 139-1653
gctttgtcaaccaagctcaagttaatggatctggatactatgtatataaaaagcctagcttgagtctcttttcagtggcatccttccctttctaatcagagattttcttcctcagagattttggcctagatttgcaaaatgatgaccacatctttgatttgggggattgctatagcagcatgctgttgtctatggcttattcttggaattaggagaaggcaaacgggtgaaccacctctagagaatggattaattccatacctgggctgtgctctgcaatttggtgccaatcctcttgagttcctcagagcaaatcaaaggaaacatggtcatgtttttacctgcaaactaatgggaaaatatgtccatttcatcacaaatcccttgtcataccataaggtgttgtgccacggaaaatattttgattggaaaaaatttcactttgctacttctgcgaaggcatttgggcacagaagcattgacccgatggatggaaataccactgaaaacataaacgacactttcatcaaaaccctgcagggccatgccttgaattccctcacggaaagcatgatggaaaacctccaacgtatcatgagacctccagtctcctctaactcaaagaccgctgcctgggtgacagaagggatgtattctttctgctaccgagtgatgtttgaagctgggtatttaactatctttggcagagatcttacaaggcgggacacacagaaagcacatattctaaacaatcttgacaacttcaagcaattcgacaaagtctttccagccctggtagcaggcctccccattcacatgttcaggactgcgcacaatgcccgggagaaactggcagagagcttgaggcacgagaacctccaaaagagggaaagcatctcagaactgatcagcctgcgcatgtttctcaatgacactttgtccacctttgatgatctggagaaggccaagacacacctcgtggtcctctgggcatcgcaagcaaacaccattccagcgactttctggagtttatttcaaatgattaggaacccagaagcaatgaaagcagctactgaagaagtgaaaagaacattagagaatgctggtcaaaaagtcagcttggaaggcaatcctatttgtttgagtcaagcagaactgaatgacctgccagtattagatagtataatcaaggaatcgctgaggctttccagtgcctccctcaacatccggacagctaaggaggatttcactttgcaccttgaggacggttcctacaacatccgaaaagatgacatcatagctctttacccacagttaatgcacttagatccagaaatctacccagaccctttgacttttaaatatgataggtatcttgatgaaaacgggaagacaaagactaccttctattgtaatggactcaagttaaagtattactacatgccctttggatcgggagctacaatatgtcctggaagattgttcgctatccacgaaatcaagcaatttttgattctgatgctttcttattttgaattggagcttatagagggccaagctaaatgtccacctttggaccagtcccgggcaggcttgggcattttgccgccattgaatgatattgaatttaaatataaattcaagcatttgtgaatacatggctggaataagaggacactagatgatattacaggactgcagaacaccctcaccacacagtccctttggacaaatgcatttagtggtggtagaaatgattcaccaggtccaatgttgttcaccagtgcttgcttgtgaatcttaacattttggtgacagtttccagatgctatcacagactctgctagtgaaaagaactagtttctaggagcacaataatttgttttcatttgtataagtccatgaatgttcatatagccagggattgaagtttattattttcaaaggaaaacacctttattttattttttttcaaaatgaagatacacattacagccaggtgtggtagcaggcacctgtagtcttagctactcgagaggccaaagaaggaggatggcttgagcccaggagttcaagaccagcctggacagcttagtgagatcccgtctccgaagaaaagatatgtattctaattggcagattgttttttcctaaggaaactgctttatttttataaaactgcctgacaattatgaaaaaatgttcaaattcacgttctagtgaaactgcattatttgttgactagatggtggggttcttcgggtgtgatcatatatcataaaggatatttcaaatgattatgattagttatgtcttttaataaaaaggaaatatttttcaacttcttctatatccaaaattcagggctttaaacatgattatcttgatttcccaaaaacactaaaggtggttttattttcccttcatgttttaacttattgttgctgaaaactctatgtccggctttaactatcttctctatatttttatttcattcacattaatgagaagagttttctcagagattaaaaaaggtagtttttctgtcattgttaaatacacattatcactgaaaaaatgtagcttttatgtgatatgttttaaagttaaaactggatggaaatagccatttggaagctttggttatgaaacatgtggagtgtattaagtgcagcttgacattatgttttatttaaatgctttttatcgctaaatgacttgcagatgaaaaaaactaaggtgactcgagtgtttaaatgctgtgtacaacaatgctttgataaaatattttaagtatgagttatcagctctatgtcaattgatatttctgtgtagtatttatatttaaattatatttacctttttgcttattttacaaatattaagaaaatattctaacatttgataattttgaaatgattcatctttcagaaataaaagtatgaatcta

SEQ ID NO: 124585 - DNA, 2202 bp, Homo sapiens
  Payload ID: 4471
  Gene Symbol: CYP7B1
  Gene Name: cytochrome P450, family 7, subfamily B, polypeptide 1
  Uniprot ID: O75881
  ENST ID: ENST00000310193
  CDS Start-End: 175-1695
tcattcagcctgggagaccacggtgacattcctgtctgcgctgcgggcaggccagcctctccggccctggactagggggcgccgccgagagaagccgccgcaggctgcagagtcgccgaccgcgctgttcgcaggcagaccccgggctgcccaccgcggcctagcgcgcgccggatggcaggagaagtgtccgcggccacgggccgcttttcgctggagcggttgggcctcccgggcctggccctcgccgcggccctgctgctcctggccctctgcttgcttgtccggcgcaccaggagacccggtgagcctccattgataaaaggttggcttccttatcttggagtggtcctgaacttacgaaaagaccccttaaggttcatgaaaacacttcaaaagcaacatggtgacactttcacagttcttcttggtggaaagtacataacatttatcctggaccccttccagtaccagctagtgataaaaaatcataaacaattaagctttcgagtattttctaataaattattagagaaagcatttagcatcagtcagttgcaaaaaaatcatgacatgaatgatgagcttcacctctgctatcaatttttgcaaggcaaatctttggacatactcttggaaagcatgatgcagaatctaaaacaagtttttgaaccccagctgttaaaaaccacaagttgggacacggcagaactgtatccattctgcagctcaataatatttgagatcacatttacaactatatatggaaaagttattgtttgtgacaacaacaaatttattagtgagctaagagatgattttttaaaatttgatgacaagtttgcatatttagtatccaacatacccattgagcttctaggaaatgtcaagtctattagagagaaaattataaaatgcttctcatcagaaaagttagccaagatgcaaggatggtcagaagtttttcaaagcaggcaagatgtcctggagaaatattatgtgcacgaggaccttgaaataggagcacatcatttaggctttctctgggcctctgtggcaaacactattccaactatgttctgggcaatgtattatcttctgcggcacccagaagctatggcagcagtgcgtgacgaaattgaccgtttgctgcagtcaacaggtcaaaagaaagggtctggatttcccatccacctcaccagagaacaattggacagcctaatctgcctagaaagcagcatttttgaagctttacgactgtcctcatattcaaccaccattcgttttgttgaggaggatttgactctcagttcagagaccggggactactgtgtgcgaaagggagacttggtagccatctttcctccagtcctacatggtgaccctgaaatctttgaagctccagaggagtttagatatgatcgttttatagaagatggtaagaagaaaaccacctttttcaaaagagggaaaaagctgaagtgttacctaatgccgtttggaactggaaccagcaaatgtccaggccgattttttgcacttatggaaataaaacaattgttggttatacttttaacttattttgatttagaaataattgatgataagcccataggactaaactacagccgcttgttgtttggtattcagtatccagattctgatgttttatttagatacaaagtgaaatcttagagaagctaaaaggaaagaaaataaatctatcaaaattaccctaaacatcctaagctcatctatttctttttaatttctgcaaatgtaattgatttatttgtttaaaaagcgctaatttctatttgatctgatatcagtccagtttgtccttagtcacaaagcccatcataatataaaacaggatggtggcaggaaaatggacatcaaaatcaacttaagggtaggctcaaaacagggttgttgttgtttttttagtttctccttgttgtgattttcacctgttataataaatgtaccttcacaccaatagattgggcactgtggaatttaaatcactcaaattgttctctaatatgtaaaattacactttgaactactagaaaattgtgctggaaatggacacagtctaacaaattccaaattctcacagaagaaggaaattgaatttccatgagttacactggatgaaaatgttcccttcaagtataatattaataatacctatat

SEQ ID NO: 124586 - DNA, 3974 bp, Homo sapiens
  Payload ID: 4472
  Gene Symbol: CYP8B1
  Gene Name: cytochrome P450, family 8, subfamily B, polypeptide 1
  Uniprot ID: Q9UNU6
  ENST ID: ENST00000316161
  CDS Start-End: 350-1855
gtgggctcaaggcaggcttagagagaaggtgcaagagctgtctgaaaaggtcagagcaaagcatgaagctggtgagcagctgtgaccatagctggaagcttctctctgagctttctcctggttacctcctcctcccctacgtgaccagtcagccaagtgttaagtccaggggaacattttgctgcttccaagtactgtctcactagtgttatttgccataacttgcggccacagggcaaggtccaggtgctcagacctttacatcctggactttccaaggcctcccaaagctctctggcacccagggaacagtgtgcgtgtcgagagcttaatccgcaggagcatagccatggttctctggggtccagtgctgggagctctgctggtggtcattgctggatacctgtgcctgccagggatgctccgacaacgcaggccatgggagccccctctggacaagggtaccgtgccctggcttggccatgccatggctttccggaagaatatgtttgaatttctgaagcgcatgaggaccaagcatggggatgtgttcacagtgcagctagggggccagtacttcaccttcgtcatggaccccctctcctttggctccatcctcaaggacacacagagaaaactagactttgggcaatatgcaaaaaaactggtgctgaaggtatttggataccgttcagtgcaaggggaccatgagatgatacactcagccagcaccaagcatctgaggggggatggcttgaaggatcttaatgagaccatgctggacagcctgtcctttgtaatgctgacgtccaaaggctggagtctggatgccagttgctggcatgaggacagcctctttcgcttctgctattacatcttgttcacagctggctacctgagcttgttcggctacacgaaggacaaggagcaggacctgctacaggcaggagagttattcatggagttccgcaagtttgaccttcttttcccaaggtttgtctactccctgctgtggccccgggagtggctagaagtgggccgactccagcgtctctttcacaagatgctctccgtgagccacagccaggagaaggagggcatcagcaactggctgggcaacatgcttcagtttctgagggagcagggggtaccctcagctatgcaggacaagttcaacttcatgatgctctgggcctcccaggggaacacggggcctacctctttctgggccctcttgtacctcctgaagcacccagaagctattcgggctgtgagggaggaagctacccaggtcctgggtgaggccaggctggagaccaagcagtcctttgccttcaaactcggtgccctgcaacacaccccagttctagacagcgtggtggaggagacgctgcggctgagggctgcacccaccctcctcaggttggttcatgaagactataccctgaagatgtccagtgggcaggagtatctgttccgccatggagacatcctggccctctttccctacctctcagtgcacatggaccctgacatccaccctgagcccaccgtcttcaagtacgatcgcttcctcaaccctaatggcagccggaaagtggacttcttcaagacaggcaagaagatccaccactacaccatgccctggggttcgggcgtttccatctgccctgggaggttctttgcactcagtgaggtgaagctctttatcctgcttatggtcacacactttgacttagagttggtggaccctgacacaccactaccccatgttgacccgcagcgctggggttttggcaccatgcagcccagccacgatgtgcgcttccgctaccgcctgcatcctacagagtgagcttggccaagccagctgcaaacctggccagaggagttctattgcatctctcacctgttctcacccctctgcagccccaagaccccactggccacccctccctctggtcctgtggcaccccctacctctgttctgcctgtcctcgctctctccccgcctagtcatctgacaggcttatcattctctttaaaataccatctctcagagtgggttctgccgaaccctcctctcacaggaagtccagaggaagggggagtatctgtgggcaacttggtttgggagatgatgcctgccttgagaagtcctgagtacagagactggttccccccagacacgagtaacatggcatcttgcaaacatcagcctccactctcccagcttgctttagttttttcagcaacacttatcccacatcctatggaattcaggttctagaacagtgtcatccaacataaatatgaagcaagctacatgagtagtggggttttttggttttgtttgtttgttttgagacagagtcttgctctgtcgccgaggctgcagtgcagcggtgcgatctctgctcactgcaacctctgcctcctgggtttaagcaattctcctgcctcagcctccccagtagctgggattacaggcacctaccaccttgcccagctaatttagtttcctggtaaacacatttttaaaaagtaaaatgaaacaattcatttttataatatactttacttaatccaatatatccaaaatattggcatttcaacgtgatcactattaaaaattttaacgtaatagtttttaccttccctttttcatcctgtcttcaaagtctggtatgtactgtacttttgcagttcttcccagttcagactagccacattccaagtgcttaattgccgtgtgtggcaggtggctgccctattggatagcacaggtctagagaaatgatacctttttttttttttgagacagagtctcactctgttgcccaggctgcagtgcagtggtgtgatcttggctcactacaacctctgcctcccgggttcaagtaattctcctgcctcaggcttctgagtagctgggattataggtgcgcaccaccacacccggctagtttctgtatttttagtagagacggcgtttcaccattttggccggcctcctcggcctcccaaagttctgggattacaggcatgagccactgtgcccagtcaggatgtctttaatgtaggaatcattcaagatccctcctcagtgcccatgtctcccccacctcagggtgctgtcaaccctcccttggtttccatgatcattgctgaactcagagctttcttctatccccagacccacatgggagtctcccagcacctctgactcagcttggccaatgcagaacttggcatctgaacccctgcctcttccctgaaccactcctcctcctgatttccctgctctctctgctcagaacactaccattcaccccatctcccagagacactctccctcctcctctttcaccttcatacaagcaggcccccgtcctatcagtacacccccctgtgatgcctctgaaatatgtaccctcctcccctctcctactgtcattcttatacctgtgatctctgcgtttctcttctacactgctgccagaggcctttttgccaaaagcactgctgattgtcactcttttactttcctggttcccctttgacttcacacacttgacgtttacattttgtcacagttggtcccccttgccttcacatacctgatgtttaaattttgtcacggttagtctccaaacttctcaactttgccagctttctccaatgaaaccatcagtagagacattgctgttcctgcccatcccagtgccagctactccttcctggaagccttcctggatttcacgcatcccatcctctggccagaaatggcctccgaactgtgcagctcctgcagcaccatttgtatcatagcatatctgttatgtgtcgttgctttctgtgtcttggtttctgcctgctgcccacttccctagactggagcctactggggcatggtattttattcatttctgacctccaattccctaagtggagattaaatgttagaaacctga

SEQ ID NO: 124587 - DNA, 1896 bp, Homo sapiens
  Payload ID: 4472
  Gene Symbol: CYP8B1
  Gene Name: cytochrome P450, family 8, subfamily B, polypeptide 1
  ENST ID: ENST00000437102
  CDS Start-End: 83-1573
ggactttccaaggcctcccaaagctctctggcacccagggaacagtgtgcgtgtcgagagcttaatccgcaggagcatagccatggttctctggggtccagtgctgggagctctgctggtggtcattgctggatacctgtgcctgccagggatgctccgacaacgcaggccatgggagccccctctggacaagggtaccgtgccctggcttggccatgccatggctttccggaagaatatgtttgaatttctgaagcgcatgaggaccaagcatggggatgtgttcacagtgcagctagggggccagtacttcaccttcgtcatggaccccctctcctttggctccatcctcaaggacacacagagaaaactagactttgggcaatatgcaaaaaaactggtgctgaaggtatttggataccgttcagtgcaaggggaccatgagatgatacactcagccagcaccaagcatctgaggggggatggcttgaaggatcttaatgagaccatgctggacagcctgtcctttgtaatgctgacgtccaaaggctggagtctggatgccagttgctggcatgaggacagcctctttcgcttctgctattacatcttgttcacagctggctacctgagcttgttcggctacacgaaggacaaggagcaggacctgctacaggcaggagagttattcatggagttccgcaagtttgaccttcttttcccaaggtttgtctactccctgctgtggccccgggagtggctagaagtgggccgactccagcgtctctttcacaagatgctctccgtgagccacagccaggagaaggagggcatcagcaactggctgggcaacatgcttcagtttctgagggagcagggggtaccctcagctatgcaggacaagttcaacttcatgatgctctgggcctcccaggggaacacggggcctacctctttctgggccctcttgtacctcctgaagcacccagaagctattcgggctgtgagggaggaagctacccaggtcctgggtgaggccaggctggagaccaagcagtcctttgccttcaaactcggtgccctgcaacacaccccagttctagacagcgtggtggaggagacgctgcggctgagggctgcacccaccctcctcaggttggttcatgaagactataccctgaagatgtccagtgggcaggagtatctgttccgccatggagacatcctggccctctttccctacctctcagtgcacatggaccctgacatccaccctgagcccaccgtcttcaagtacgatcgcttcctcaaccctaatggcagccggaaagtggacttcttcaagacaggcaagaagatccaccactacaccatgccctggggttcgggcgtttccatctgccctgggaggttctttgcactcagtgaggcagacttcgaaagaaatgttgactcgggtcctcagttgacccaaagtatctatgataccatgatctcatggctgatggaactattcagtgctgctgaaacagaacctctcctgagggagccctggagtcctcccactctgtgagcttctgccccacccttgggctcctatccgatggcatctggaccagatgctgtggaaaccacacatgacctgcccccaccccaggagctcagcctgagtggctttatctaaggcccaactctgttcctgatcaaccttaggaactttacccagtgcctttttctgctggtcttcctgtcctctcctctgcaccaggggcctcctggccttcaactcctcccttttctgggcagcagtaaggacactcctagcacatggctggtgctgggagcctgtgagctgctgcagaaggaggatgtgaggagtatactcgggtcttatca

SEQ ID NO: 124588 - DNA, 2158 bp, Homo sapiens
  Payload ID: 4473
  Gene Symbol: CYGB
  Gene Name: cytoglobin
  Uniprot ID: Q8WWM9
  ENST ID: ENST00000293230
  CDS Start-End: 364-936
ggtgggcgggcggcagtcgcgtcgcccccaccccgcgcagccttcaccttgccggcattggctcttacccacacggggctgggggtttggagcggatttgtttttttaaacattttccagcagaccacatccccgccccaccgctggctgtcccccgccccccgcacatataccctgcacacacgcacgcacacacacacacacacccggcgcgcacagacacacgctccctccctccgcgctctacccctcgcccgcccgccgcgcacgcagccggccccggctcccggcgccccgcgccccgcgccccgcgccccgccaccgccgccgccgagcaaagccgggctgggcttggagctgctcatggagaaagtgccaggcgagatggagatcgagcgcagggagcggagcgaggagctgtccgaggcggagaggaaggcggtgcaggctatgtgggcccggctctatgccaactgcgaggacgtgggggtggccatcctggtgaggttctttgtgaacttcccctcggccaagcagtacttcagccagttcaagcacatggaggatcccctggagatggagcggagcccccagctgcggaagcacgcctgccgagtcatgggggccctcaacactgtcgtggagaacctgcatgaccccgacaaggtgtcctctgtgctcgcccttgtggggaaagcccacgccctcaagcacaaggtggaaccggtgtacttcaagatcctctctggggtcattctggaggtggtcgccgaggaatttgccagtgacttcccacctgagacgcagagagcctgggccaagctgcgtggcctcatctacagccacgtgaccgctgcctacaaggaagtgggctgggtgcagcaggtccccaacgccaccaccccaccggccacactgccctcttcggggccgtaggacccctaactccacccccctccctggcagcacctcgagcagaaggccgagttctgaagaccctccttgacgctccatttctgggtgccaaggaagctggaggaatccctgactcaacttccccgaaggaggcctctgtggcggccagggtccccccctggagctgctgggaggcggcgctggctgcctggatgctgaccccagcgcggcgggcagagcggggcccactcttcttagcttttctactcactgttagagagagacctagctgagcggctggcaggaagcgggacaggtctaggagtcccttagggaataaaccagccccgtttctatcagcccggccagcatgcaggtctccacatcaccatctagagtatcacgcacacatctaccatatatacagatatattctatatacgagctatatataaatatatatatacatatatatatacacacatacatatctagaatgtgtatccgcggcgcccagaagcctcggtttggcccacctgtgagtggggcagggaggggttccggttgtgcagagaacagagtgttctggcaaagaggaaatcccacagcagcgcagaggacctgggcctggaggggcagggctggggcaacccggcttggcggcaaagcccagccccttctcagaccagctccccacattcctgaattccacttccaggcagaaaggagtgggctccccctactccctcagaggaactgactcaccggctgtcctagaatgggcaggggcagagcgaagttctgggtgggatgaccgcactgggggaggggcctcagtccagaaacctcgaccgctagctccacctgccttggccaccagggcagccccgggggatccgggctgctgggcagcaggtcggcgggaccacatgcctgggtctcaccctcagctccgagggccgagggctttccccaccccaccctcctcctggccggcagtcggccctgtctattcatctgcgtcaggcttgccaggggggccccccgtgtgtgccccttggtcacgtgtgtcgtcttcaaggatgttttgctgctgtggctcctgctgtgtcccctcctggcccatcctcatcctcatcttcatcctcatcctcatctgtgcaaccgcccgtcctccttttctagtttctgatgtttgtaaccagacccagctgtgtcattaaacagacccgttcttgctgta

SEQ ID NO: 124589 - DNA, 830 bp, Homo sapiens
  Payload ID: 4473
  Gene Symbol: CYGB
  Gene Name: cytoglobin
  ENST ID: ENST00000590175
  CDS Start-End: 243-620
aggatttaatttcagatcaactcatgattccagaacctgagttcttaccctctcggctatgactagagcagggcttgaagggggtgtagagtttgggaaggaagcaagaagcgaggaagacagaggcctaggagatgaagccgccagcctgagcaagcctggcagatagacatggccagacttggtaggggttctttgtgaacttcccctcggccaagcagtacttcagccagttcaagcacatggaggatcccctggagatggagcggagcccccagctgcggaagcacgcctgccgagtcatgggggccctcaacactgtcgtggagaacctgcatgaccccgacaaggtgtcctctgtgctcgcccttgtggggaaagcccacgccctcaagcacaaggtggaaccggtgtacttcaagatcctctctggggtcattctggaggtggtcgccgaggaatttgccagtgacttcccacctgagacgcagagagcctgggccaagctgcgtggcctcatctacagccacgtgaccgctgcctacaaggaagtgggctgggtgcagcaggtccccaacgccaccaccccaccggccacactgccctcttcggggccgtaggacccctaactccacccccctccctggcagcacctcgagcagaaggccgagttctgaagaccctccttgacgctccatttctgggtgccaaggaagctggaggaatccctgactcaacttccccgaaggaggcctctgtggcggccagggtccccccctggagctgctgggaggcggcgctggctgcctggatgctgaccccagcgcggc

SEQ ID NO: 124590 - DNA, 815 bp, Homo sapiens
  Payload ID: 4473
  Gene Symbol: CYGB
  Gene Name: cytoglobin
  ENST ID: ENST00000589342
  CDS Start-End: 111-791
cccgcccgccgcgcacgcagccggccccggctcccggcgccccgcgccccgcgccccgcgccccgccaccgccgccgccgagcaaagccgggctgggcttggagctgctcatggagaaagtgccaggcgagatggagatcgagcgcagggagcggagcgaggagctgtccgaggcggagaggaaggcggtgcaggctatgtgggcccggctctatgccaactgcgaggacgtgggggtggccatcctggtgaggttctttgtgaacttcccctcggccaagcagtacttcagccagttcaagcacatggaggatcccctggagatggagcggagcccccagctgcggaagcacgcctgccgagtcatgggggccctcaacactgtcgtggagaacctgcatgaccccgacaaggtgtcctctgtgctcgcccttgtggggaaagcccacgccctcaagcacaaggtggaaccggtgtacttcaagcccaccggccacactgccctcttcggggccgtaggacccctaactccacccccctccctggcagcacctcgagcagaaggccgagttctgaagaccctccttgacgctccatttctgggtgccaaggaagctggaggaatccctgactcaacttccccgaaggaggcctctgtggcggccagggtccccccctggagctgctgggaggcggcgctggctgcctggatgctgaccccagcgcggcgggcagagcggggcccactcttcttagcttttctactcactgttagagagagacctagctgagcggctggcaggaagcgggacagg

SEQ ID NO: 124591 - DNA, 788 bp, Homo sapiens
  Payload ID: 4473
  Gene Symbol: CYGB
  Gene Name: cytoglobin
  ENST ID: ENST00000589145
  CDS Start-End: 367-744
tgcaaattccagcttgtacttaaatacttcctgcgaagttttgactgagacgctgcaacaattcccgagctgtttcatcgtggcaccttcctggtggcaggtggattagcacattgtctgcaacccaggaggacttggaggaaagtcccagctctgctgattctagctgagtaaccttggcaaaggtcacctcacttctctctgagtcttattttctcatctgtaaaatgaggaggaggaggaggatcatccaaacatcacgggacttcgttaaatcagtgcttcggggcacttagcacagcgcctggcgcaaggttctttgtgaacttcccctcggccaagcagtacttcagccagttcaagcacatggaggatcccctggagatggagcggagcccccagctgcggaagcacgcctgccgagtcatgggggccctcaacactgtcgtggagaacctgcatgaccccgacaaggtgtcctctgtgctcgcccttgtggggaaagcccacgccctcaagcacaaggtggaaccggtgtacttcaagatcctctctggggtcattctggaggtggtcgccgaggaatttgccagtgacttcccacctgagacgcagagagcctgggccaagctgcgtggcctcatctacagccacgtgaccgctgcctacaaggaagtgggctgggtgcagcaggtccccaacgccaccaccccaccggccacactgccctcttcggggccgtaggacccctaactccacccccctccctggcagcacctcgagcagaa

SEQ ID NO: 124592 - DNA, 3311 bp, Homo sapiens
  Payload ID: 4474
  Gene Symbol: CYTH1
  Gene Name: cytohesin 1
  Uniprot ID: Q15438
  ENST ID: ENST00000361101
  CDS Start-End: 72-1268
gcgagcgggggcgcgggtggcgcggcgggacgcgagcggcgagccggagcgcggagcccggctcccgcaccatggaggaggacgacagctacgttcccagtgacctgacagcagaggagcgtcaagaactggagaacatccgacggagaaaacaggagctgctggctgacattcagaggctgaaggatgagatagcagaagtagctaatgaaattgaaaacctgggatccacagaggaaaggaaaaacatgcagaggaacaaacaggtagccatgggcaggaaaaaatttaatatggaccctaaaaaggggatccagttcttaatagagaacgacctcctgaagaacacttgtgaagacattgcccagttcttatataaaggcgaagggctcaacaagacagccatcggcgactacctaggggagagagatgagtttaatatccaggttcttcatgcatttgtggagctgcatgagttcactgatcttaatctcgtccaggcactacggcagttcctgtggagcttccggctacccggagaggcccagaagatcgaccggatgatggaggcgtttgcccagcgatattgtcagtgcaataatggcgtgttccagtccacggatacttgttacgtcctctcctttgccatcatcatgttgaacaccagtctgcacaaccccaatgtcaaagataagcccactgtggagaggttcattgccatgaaccgaggcatcaatgatgggggagacctgccggaggagctcctccggaatctctatgagagcataaaaaatgaaccctttaaaatcccagaagacgacgggaatgacctcactcacactttcttcaatccagaccgagaaggctggctattgaaactcggaggtggcagggtaaagacttggaagagacgctggttcattctgactgacaactgcctttactactttgagtataccacggataaggagccccgtggaatcatccctttagagaatctgagtatccgggaagtggaggactccaaaaaaccaaactgctttgagctttatatccccgacaataaagaccaagttatcaaggcctgcaagaccgaggctgacgggcgggtggtggaggggaaccacactgtttaccggatctcagctccgacgcccgaggagaaggaggagtggattaagtgcattaaagcagccatcagcagggaccctttctacgaaatgctcgcagcacggaaaaagaaggtctcctccacgaagcgacactgagcgtgcagccaagggcgttggtctgcgggggccttggagctcctgctcttctcccgcacctccatggatgcactgctgccgagcagagcgtcctctgccaggccccgccctggattcctagagactagcttcagcttttgctattttttttaagtgggagaagggtgggcagttatcactggggaagagaggaccggccacctgtccagcatgggctccagagccttcctctctcacagggcagagctcttgtcggcagggcagcctcctggccagtttctctgctcagtgttctggtagcagagctcagagccaactgtttacctcttggttgtccccgtgaagaagccttcaaaccctgcaccataaatacatgtgtccatatattattatatgttaagagaaaaaggtggaaaggaagagaagccacatactataaagatctatttttttttttttaagagagaacgtagggctgttcaggtgcattctgccctggctgcgctggggagcttctccctggagaagagcacctggggctgcggccaaggggcatcagcctgggcccgcggcagggcctggcctgcctctcctgtgctgtgggagctcgctgcctggtgcttgtctgggcgagatggacaggtgaggtcgaggacgcagagggcagaggcccagtggagcctcagacggcacagtcagagtcgggggcctgccctggccggggtcgcagtcggcagcagcgtgcagtccggcatctcccgcggatgcttttccatcccaagtgcctgcggagcgccgaggagaggagagagctgactggacgcttacgttattttcctccttcagaatccaagttcttgttgggctttaaagtagaaagtcagcattttccttgagctaaatacctaataaccaaaactgtgaggaaggttatcgggacagaggttccggataacctgtttcattttgggttttcttcctcttccccagactccagtcctcgttctagaggaaggagtaggacttccccgatccccgtagggcttcagctttttctgcctcaaaaccagccctaactggactactctggatgcattttgtggtgggccccctagaggggaagatgggcctttatctgctccgtggggtgcactggagtgaggggggtggccgggctgcctctcgcatctctgtcttcccctgcaggcgctgtgtgagctggccctgcccctcctcattacagtatgaagggagccgtgacacgcagcattttcctgccgttctctcagggactctcagggcagctcctgccactccgccagggccagcatgccagtccaggcagagcaggtggctggctgtctggccgtctcgccccgcccctccacaggaccctggaccagggcggtgcagggcgcagccctgaggaggcaggtggaggagctgcgggttttcacagggccgcgtcgccacggctcctctgatcctttagggttggcgagcatctctggaaatagcttttgcagaggagtggtgggaggaatagagggggacagtctgtcacctccctccccgccactttgtgtagatcctacctggagggaatggctttaggcacttttgtgccagagcttgtgagggtgacagaagagggtccaggctggaaacctgaactttctgggtgggagaaccaggtggtgcctgccgaggtctgggcgtgtttgggccggtgctggagcctgtccagctggcccgggccctggcctggttctcaagtgtttcctagacagagaggcacctgggtcagtattagtctatttatcagaggtgtaaataatctatgtatagtttttctccttttagattattttgtatttgtttaaaagaagttttgtcaaaatacaaaaatataaagaaatgactgaaagttgttgacagggtttttaagaaataattattctaattgtttttgtttgtttgtttttgccttgtaaactagcgccaaggaactgcagcaaataaactccaactctgcccaagcca

SEQ ID NO: 124593 - DNA, 3311 bp, Homo sapiens; identical to SEQ ID NO: 124592
  Payload ID: 4474
  Gene Symbol: CYTH1
  Gene Name: cytohesin 1
  Uniprot ID: Q15438
  ENST ID: ENST00000446868
  CDS Start-End: 72-1268

SEQ ID NO: 124594 - DNA, 2159 bp, Homo sapiens
  Payload ID: 4474
  Gene Symbol: CYTH1
  Gene Name: cytohesin 1
  ENST ID: ENST00000589296
  CDS Start-End: 75-269
gaggcgagcgggggcgcgggtggcgcggcgggacgcgagcggcgagccggagcgcggagcccggctcccgcaccatggaggaggacgacagctacgttcccagtgacctgacagcagaggagcgtcaagaactggagaacatccgacggagaaaacaggagctgctggctgacattcagaggctgaaggatgagatagcagaagtagctaatgaaattgaaaacctgggatccacagaggaaagcttcagcttttgctattttttttaagtgggagaagggtgggcagttatcactggggaagagaggaccggccacctgtccagcatgggctccagagccttcctctctcacagggcagagctcttgtcggcagggcagcctcctggccagtttctctgctcagtgttctggtagcagagctcagagccaactgtttacctcttggttgtccccgtgaagaagccttcaaaccctgcaccataaatacatgtgtccatatattattatatgttaagagaaaaaggtggaaaggaagagaagccacatactataaagatctatttttttttttttaagagagaacgtagggctgttcaggtgcattctgccctggctgcgctggggagcttctccctggagaagagcacctggggctgcggccaaggggcatcagcctgggcccgcggcagggcctggcctgcctctcctgtgctgtgggagctcgctgcctggtgcttgtctgggcgagatggacaggtgaggtcgaggacgcagagggcagaggcccagtggagcctcagacggcacagtcagagtcgggggcctgccctggccggggtcgcagtcggcagcagcgtgcagtccggcatctcccgcggatgcttttccatcccaagtgcctgcggagcgccgaggagaggagagagctgactggacgcttacgttattttcctccttcagaatccaagttcttgttgggctttaaagtagaaagtcagcattttccttgagctaaatacctaataaccaaaactgtgaggaaggttatcgggacagaggttccggataacctgtttcattttgggttttcttcctcttccccagactccagtcctcgttctagaggaaggagtaggacttccccgatccccgtagggcttcagctttttctgcctcaaaaccagccctaactggactactctggatgcattttgtggtgggccccctagaggggaagatgggcctttatctgctccgtggggtgcactggagtgaggggggtggccgggctgcctctcgcatctctgtcttcccctgcaggcgctgtgtgagctggccctgcccctcctcattacagtatgaagggagccgtgacacgcagcattttcctgccgttctctcagggactctcagggcagctcctgccactccgccagggccagcatgccagtccaggcagagcaggtggctggctgtctggccgtctcgccccgcccctccacaggaccctggaccagggcggtgcagggcgcagccctgaggaggcaggtggaggagctgcgggttttcacagggccgcgtcgccacggctcctctgatcctttagggttggcgagcatctctggaaatagcttttgcagaggagtggtgggaggaatagagggggacagtctgtcacctccctccccgccactttgtgtagatcctacctggagggaatggctttaggcacttttgtgccagagcttgtgagggtgacagaagagggtccaggctggaaacctgaactttctgggtgggagaaccaggtggtgcctgccgaggtctgggcgtgtttgggccggtgctggagcctgtccagctggcccgggccctggcctggttctcaagtgtttcctagacagagaggcacctgggtcagtattagtctatttatcagaggtgtaaataatctatgtatagtttttctccttttagattattttgtatttgtttaaaagaagttttgtcaaaatacaaaaatataaagaaatgactgaaagttgttgacagggtttttaagaaataattattctaattgtttttgtttgtttgtttttgccttgtaaactagcgccaaggaactgcagcaaataaactccaactctgcccaagcca

SEQ ID NO: 124595 - DNA, 553 bp, Homo sapiens
  Payload ID: 4474
  Gene Symbol: CYTH1
  Gene Name: cytohesin 1
  ENST ID: ENST00000587308
  CDS Start-End: 242-553
acactcggagcgtctgctagggctgcagctctgcgcgtccatctctgcgctctgcgccagccttccccaccgggcccagcgagtttccacctgcagggccggtgctctcagcttttgttttctctggacaccttcttctctacccctgctgtgctggcgcacacatgctaggctgaaggatgagatagcagaagtagctaatgaaattgaaaacctgggatccacagaggaaaggaaaaacatgcagaggaacaaacaggtagccatgggcaggaaaaaatttaatatggaccctaaaaaggggatccagttcttaatagagaacgacctcctgaagaacacttgtgaagacattgcccagttcttatataaaggcgaagggctcaacaagacagccatcggcgactacctaggggagagagatgagtttaatatccaggttcttcatgcatttgtggagctgcatgagttcactgatcttaatctcgtccaggcactacggcagttcctgtggagcttccggctacccggagaggcccagaagatcgaccgg

SEQ ID NO: 124596 - DNA, 3286 bp, Homo sapiens
  Payload ID: 4474
  Gene Symbol: CYTH1
  Gene Name: cytohesin 1
  Uniprot ID: Q15438
  ENST ID: ENST00000591455
  CDS Start-End: 50-1243
cggcgggacgcgagcggcgagccggagcgcggagcccggctcccgcaccatggaggaggacgacagctacgttcccagtgacctgacagcagaggagcgtcaagaactggagaacatccgacggagaaaacaggagctgctggctgacattcagaggctgaaggatgagatagcagaagtagctaatgaaattgaaaacctgggatccacagaggaaaggaaaaacatgcagaggaacaaacaggtagccatgggcaggaaaaaatttaatatggaccctaaaaaggggatccagttcttaatagagaacgacctcctgaagaacacttgtgaagacattgcccagttcttatataaaggcgaagggctcaacaagacagccatcggcgactacctaggggagagagatgagtttaatatccaggttcttcatgcatttgtggagctgcatgagttcactgatcttaatctcgtccaggcactacggcagttcctgtggagcttccggctacccggagaggcccagaagatcgaccggatgatggaggcgtttgcccagcgatattgtcagtgcaataatggcgtgttccagtccacggatacttgttacgtcctctcctttgccatcatcatgttgaacaccagtctgcacaaccccaatgtcaaagataagcccactgtggagaggttcattgccatgaaccgaggcatcaatgatgggggagacctgccggaggagctcctccggaatctctatgagagcataaaaaatgaaccctttaaaatcccagaagacgacgggaatgacctcactcacactttcttcaatccagaccgagaaggctggctattgaaactcggtggcagggtaaagacttggaagagacgctggttcattctgactgacaactgcctttactactttgagtataccacggataaggagccccgtggaatcatccctttagagaatctgagtatccgggaagtggaggactccaaaaaaccaaactgctttgagctttatatccccgacaataaagaccaagttatcaaggcctgcaagaccgaggctgacgggcgggtggtggaggggaaccacactgtttaccggatctcagctccgacgcccgaggagaaggaggagtggattaagtgcattaaagcagccatcagcagggaccctttctacgaaatgctcgcagcacggaaaaagaaggtctcctccacgaagcgacactgagcgtgcagccaagggcgttggtctgcgggggccttggagctcctgctcttctcccgcacctccatggatgcactgctgccgagcagagcgtcctctgccaggccccgccctggattcctagagactagcttcagcttttgctattttttttaagtgggagaagggtgggcagttatcactggggaagagaggaccggccacctgtccagcatgggctccagagccttcctctctcacagggcagagctcttgtcggcagggcagcctcctggccagtttctctgctcagtgttctggtagcagagctcagagccaactgtttacctcttggttgtccccgtgaagaagccttcaaaccctgcaccataaatacatgtgtccatatattattatatgttaagagaaaaaggtggaaaggaagagaagccacatactataaagatctatttttttttttttaagagagaacgtagggctgttcaggtgcattctgccctggctgcgctggggagcttctccctggagaagagcacctggggctgcggccaaggggcatcagcctgggcccgcggcagggcctggcctgcctctcctgtgctgtgggagctcgctgcctggtgcttgtctgggcgagatggacaggtgaggtcgaggacgcagagggcagaggcccagtggagcctcagacggcacagtcagagtcgggggcctgccctggccggggtcgcagtcggcagcagcgtgcagtccggcatctcccgcggatgcttttccatcccaagtgcctgcggagcgccgaggagaggagagagctgactggacgcttacgttattttcctccttcagaatccaagttcttgttgggctttaaagtagaaagtcagcattttccttgagctaaatacctaataaccaaaactgtgaggaaggttatcgggacagaggttccggataacctgtttcattttgggttttcttcctcttccccagactccagtcctcgttctagaggaaggagtaggacttccccgatccccgtagggcttcagctttttctgcctcaaaaccagccctaactggactactctggatgcattttgtggtgggccccctagaggggaagatgggcctttatctgctccgtggggtgcactggagtgaggggggtggccgggctgcctctcgcatctctgtcttcccctgcaggcgctgtgtgagctggccctgcccctcctcattacagtatgaagggagccgtgacacgcagcattttcctgccgttctctcagggactctcagggcagctcctgccactccgccagggccagcatgccagtccaggcagagcaggtggctggctgtctggccgtctcgccccgcccctccacaggaccctggaccagggcggtgcagggcgcagccctgaggaggcaggtggaggagctgcgggttttcacagggccgcgtcgccacggctcctctgatcctttagggttggcgagcatctctggaaatagcttttgcagaggagtggtgggaggaatagagggggacagtctgtcacctccctccccgccactttgtgtagatcctacctggagggaatggctttaggcacttttgtgccagagcttgtgagggtgacagaagagggtccaggctggaaacctgaactttctgggtgggagaaccaggtggtgcctgccgaggtctgggcgtgtttgggccggtgctggagcctgtccagctggcccgggccctggcctggttctcaagtgtttcctagacagagaggcacctgggtcagtattagtctatttatcagaggtgtaaataatctatgtatagtttttctccttttagattattttgtatttgtttaaaagaagttttgtcaaaatacaaaaatataaagaaatgactgaaagttgttgacagggtttttaagaaataattattctaattgtttttgtttgtttgtttttgccttgtaaactagcgccaaggaactgcagcaaataaactccaactctgcccaagcca

SEQ ID NO: 124597 - DNA, 3315 bp, Homo sapiens
  Payload ID: 4474
  Gene Symbol: CYTH1
  Gene Name: cytohesin 1
  Uniprot ID: Q15438
  ENST ID: ENST00000585509
  CDS Start-End: 253-1272
agtttaaccctaatggctacacaggagagaagcggcatgaatagacgggtttcccagggtgcggacggtgctttcccagaaactcccgggctgtgagttcccagtgacctgacagcagaggagcgtcaagaactggagaacatccgacggagaaaacaggagctgctggctgacattcagaggctgaaggatgagatagcagaagtagctaatgaaattgaaaacctgggatccacagaggaaaggaaaaacatgcagaggaacaaacaggtagccatgggcaggaaaaaatttaatatggaccctaaaaaggggatccagttcttaatagagaacgacctcctgaagaacacttgtgaagacattgcccagttcttatataaaggcgaagggctcaacaagacagccatcggcgactacctaggggagagagatgagtttaatatccaggttcttcatgcatttgtggagctgcatgagttcactgatcttaatctcgtccaggcactacggcagttcctgtggagcttccggctacccggagaggcccagaagatcgaccggatgatggaggcgtttgcccagcgatattgtcagtgcaataatggcgtgttccagtccacggatacttgttacgtcctctcctttgccatcatcatgttgaacaccagtctgcacaaccccaatgtcaaagataagcccactgtggagaggttcattgccatgaaccgaggcatcaatgatgggggagacctgccggaggagctcctccggaatctctatgagagcataaaaaatgaaccctttaaaatcccagaagacgacgggaatgacctcactcacactttcttcaatccagaccgagaaggctggctattgaaactcggaggtggcagggtaaagacttggaagagacgctggttcattctgactgacaactgcctttactactttgagtataccacggataaggagccccgtggaatcatccctttagagaatctgagtatccgggaagtggaggactccaaaaaaccaaactgctttgagctttatatccccgacaataaagaccaagttatcaaggcctgcaagaccgaggctgacgggcgggtggtggaggggaaccacactgtttaccggatctcagctccgacgcccgaggagaaggaggagtggattaagtgcattaaagcagccatcagcagggaccctttctacgaaatgctcgcagcacggaaaaagaaggtctcctccacgaagcgacactgagcgtgcagccaagggcgttggtctgcgggggccttggagctcctgctcttctcccgcacctccatggatgcactgctgccgagcagagcgtcctctgccaggccccgccctggattcctagagactagcttcagcttttgctattttttttaagtgggagaagggtgggcagttatcactggggaagagaggaccggccacctgtccagcatgggctccagagccttcctctctcacagggcagagctcttgtcggcagggcagcctcctggccagtttctctgctcagtgttctggtagcagagctcagagccaactgtttacctcttggttgtccccgtgaagaagccttcaaaccctgcaccataaatacatgtgtccatatattattatatgttaagagaaaaaggtggaaaggaagagaagccacatactataaagatctatttttttttttttaagagagaacgtagggctgttcaggtgcattctgccctggctgcgctggggagcttctccctggagaagagcacctggggctgcggccaaggggcatcagcctgggcccgcggcagggcctggcctgcctctcctgtgctgtgggagctcgctgcctggtgcttgtctgggcgagatggacaggtgaggtcgaggacgcagagggcagaggcccagtggagcctcagacggcacagtcagagtcgggggcctgccctggccggggtcgcagtcggcagcagcgtgcagtccggcatctcccgcggatgcttttccatcccaagtgcctgcggagcgccgaggagaggagagagctgactggacgcttacgttattttcctccttcagaatccaagttcttgttgggctttaaagtagaaagtcagcattttccttgagctaaatacctaataaccaaaactgtgaggaaggttatcgggacagaggttccggataacctgtttcattttgggttttcttcctcttccccagactccagtcctcgttctagaggaaggagtaggacttccccgatccccgtagggcttcagctttttctgcctcaaaaccagccctaactggactactctggatgcattttgtggtgggccccctagaggggaagatgggcctttatctgctccgtggggtgcactggagtgaggggggtggccgggctgcctctcgcatctctgtcttcccctgcaggcgctgtgtgagctggccctgcccctcctcattacagtatgaagggagccgtgacacgcagcattttcctgccgttctctcagggactctcagggcagctcctgccactccgccagggccagcatgccagtccaggcagagcaggtggctggctgtctggccgtctcgccccgcccctccacaggaccctggaccagggcggtgcagggcgcagccctgaggaggcaggtggaggagctgcgggttttcacagggccgcgtcgccacggctcctctgatcctttagggttggcgagcatctctggaaatagcttttgcagaggagtggtgggaggaatagagggggacagtctgtcacctccctccccgccactttgtgtagatcctacctggagggaatggctttaggcacttttgtgccagagcttgtgagggtgacagaagagggtccaggctggaaacctgaactttctgggtgggagaaccaggtggtgcctgccgaggtctgggcgtgtttgggccggtgctggagcctgtccagctggcccgggccctggcctggttctcaagtgtttcctagacagagaggcacctgggtcagtattagtctatttatcagaggtgtaaataatctatgtatagtttttctccttttagattattttgtatttgtttaaaagaagttttgtcaaaatacaaaaatataaagaaatgactgaaagttgttgacagggtttttaagaaataattattctaattgtttttgtttgtttgtttttgccttgtaaactagcgccaaggaactgcagcaaataaactccaactctgcccaagcca

SEQ ID NO: 124598 - DNA, 1043 bp, Homo sapiens
  Payload ID: 4474
  Gene Symbol: CYTH1
  Gene Name: cytohesin 1
  ENST ID: ENST00000591574
  CDS Start-End: 67-102
cgggggcgcgggtggcgcggcgggacgcgagcggcgagccggagcgcggagcccggctcccgcaccatggaggaggacgacagctacgaggctgaaggatgagatagcagaagtagctaatgaaattgaaaacctgggatccacagaggaaaggggatccagttcttaatagagaacgacctcctgaagaacacttgtgaagacattgcccagttcttatataaaggcgaagggctcaacaagacagccatcggcgactacctaggggagagagatgagtttaatatccaggttcttcatgcatttgtggagctgcatgagttcactgatcttaatctcgtccaggcactacggcagttcctgtggagcttccggctacccggagaggcccagaagatcgaccggatgatggaggcgtttgcccagcgatattgtcagtgcaataatggcgtgttccagtccacgggataaggagccccgtggaatcatccctttagagaatctgagtatccgggaagtggaggactccaaaaaaccaaactgctttgagctttatatccccgacaataaagaccaagttatcaaggcctgcaagaccgaggctgacgggcgggtggtggaggggaaccacactgtttaccggatctcagctccgacgcccgaggagaaggaggagtggattaagtgcattaaagcagccatcagcagggaccctttctacgaaatgctcgcagcacggaaaaagaaggtctcctccacgaagcgacactgagcgtgcagccaagggcgttggtctgcgggggccttggagctcctgctcttctcccgcacctccatggatgcactgctgccgagcagagcgtcctctgccaggccccgccctggattcctagagactagcttcagcttttgctattttttttaagtgggagaagggtgggcagttatcactggggaagagaggaccggccacctgtccagcatgggctccagagccttcctctctcacagggcagagctcttgtcggcagggcagcctcctg

SEQ ID NO: 124599 - DNA, 3756 bp, Homo sapiens
  Payload ID: 4474
  Gene Symbol: CYTH1
  Gene Name: cytohesin 1
  Uniprot ID: Q15438
  ENST ID: ENST00000589297
  CDS Start-End: 694-1713
ggcattcttgcagtgaaagcaggcattaggcttttgcttctgagggagagaggaaagcaagtgcagcctgtgcgcaaatgctggtggtgcctcccctcccccccgggaggccgggaatgggggatagtaggaggggctggctgtgactgcattcatggaaatgagcctggaggagcggagcagcacacactcggagcgtctgctagggctgcagctctgcgcgtccatctctgcgctctgcgccagccttccccaccgggcccagcgagtttccacctgcagggccggtgctctcagcttttgttttctctggacaccttcttctctacccctgctgtgctggcgcacacatgctgtccttgctccggctctccctgcacctacagctgtgggagctcccggcagcctggtactgtggggtcgctgcacggagccaccatggcctctgacgtggagagctgtgacctgccgaggctttgatgttgctgcccagggctggccaggacactggggccgcaggagaggggactcaccgtggttcccagtgacctgacagcagaggagcgtcaagaactggagaacatccgacggagaaaacaggagctgctggctgacattcagaggctgaaggatgagatagcagaagtagctaatgaaattgaaaacctgggatccacagaggaaaggaaaaacatgcagaggaacaaacaggtagccatgggcaggaaaaaatttaatatggaccctaaaaaggggatccagttcttaatagagaacgacctcctgaagaacacttgtgaagacattgcccagttcttatataaaggcgaagggctcaacaagacagccatcggcgactacctaggggagagagatgagtttaatatccaggttcttcatgcatttgtggagctgcatgagttcactgatcttaatctcgtccaggcactacggcagttcctgtggagcttccggctacccggagaggcccagaagatcgaccggatgatggaggcgtttgcccagcgatattgtcagtgcaataatggcgtgttccagtccacggatacttgttacgtcctctcctttgccatcatcatgttgaacaccagtctgcacaaccccaatgtcaaagataagcccactgtggagaggttcattgccatgaaccgaggcatcaatgatgggggagacctgccggaggagctcctccggaatctctatgagagcataaaaaatgaaccctttaaaatcccagaagacgacgggaatgacctcactcacactttcttcaatccagaccgagaaggctggctattgaaactcggaggtggcagggtaaagacttggaagagacgctggttcattctgactgacaactgcctttactactttgagtataccacggataaggagccccgtggaatcatccctttagagaatctgagtatccgggaagtggaggactccaaaaaaccaaactgctttgagctttatatccccgacaataaagaccaagttatcaaggcctgcaagaccgaggctgacgggcgggtggtggaggggaaccacactgtttaccggatctcagctccgacgcccgaggagaaggaggagtggattaagtgcattaaagcagccatcagcagggaccctttctacgaaatgctcgcagcacggaaaaagaaggtctcctccacgaagcgacactgagcgtgcagccaagggcgttggtctgcgggggccttggagctcctgctcttctcccgcacctccatggatgcactgctgccgagcagagcgtcctctgccaggccccgccctggattcctagagactagcttcagcttttgctattttttttaagtgggagaagggtgggcagttatcactggggaagagaggaccggccacctgtccagcatgggctccagagccttcctctctcacagggcagagctcttgtcggcagggcagcctcctggccagtttctctgctcagtgttctggtagcagagctcagagccaactgtttacctcttggttgtccccgtgaagaagccttcaaaccctgcaccataaatacatgtgtccatatattattatatgttaagagaaaaaggtggaaaggaagagaagccacatactataaagatctatttttttttttttaagagagaacgtagggctgttcaggtgcattctgccctggctgcgctggggagcttctccctggagaagagcacctggggctgcggccaaggggcatcagcctgggcccgcggcagggcctggcctgcctctcctgtgctgtgggagctcgctgcctggtgcttgtctgggcgagatggacaggtgaggtcgaggacgcagagggcagaggcccagtggagcctcagacggcacagtcagagtcgggggcctgccctggccggggtcgcagtcggcagcagcgtgcagtccggcatctcccgcggatgcttttccatcccaagtgcctgcggagcgccgaggagaggagagagctgactggacgcttacgttattttcctccttcagaatccaagttcttgttgggctttaaagtagaaagtcagcattttccttgagctaaatacctaataaccaaaactgtgaggaaggttatcgggacagaggttccggataacctgtttcattttgggttttcttcctcttccccagactccagtcctcgttctagaggaaggagtaggacttccccgatccccgtagggcttcagctttttctgcctcaaaaccagccctaactggactactctggatgcattttgtggtgggccccctagaggggaagatgggcctttatctgctccgtggggtgcactggagtgaggggggtggccgggctgcctctcgcatctctgtcttcccctgcaggcgctgtgtgagctggccctgcccctcctcattacagtatgaagggagccgtgacacgcagcattttcctgccgttctctcagggactctcagggcagctcctgccactccgccagggccagcatgccagtccaggcagagcaggtggctggctgtctggccgtctcgccccgcccctccacaggaccctggaccagggcggtgcagggcgcagccctgaggaggcaggtggaggagctgcgggttttcacagggccgcgtcgccacggctcctctgatcctttagggttggcgagcatctctggaaatagcttttgcagaggagtggtgggaggaatagagggggacagtctgtcacctccctccccgccactttgtgtagatcctacctggagggaatggctttaggcacttttgtgccagagcttgtgagggtgacagaagagggtccaggctggaaacctgaactttctgggtgggagaaccaggtggtgcctgccgaggtctgggcgtgtttgggccggtgctggagcctgtccagctggcccgggccctggcctggttctcaagtgtttcctagacagagaggcacctgggtcagtattagtctatttatcagaggtgtaaataatctatgtatagtttttctccttttagattattttgtatttgtttaaaagaagttttgtcaaaatacaaaaatataaagaaatgactgaaagttgttgacagggtttttaagaaataattattctaattgtttttgtttgtttgtttttgccttgtaaactagcgccaaggaactgcagcaaataaactccaactctgcccaagcca

SEQ ID NO: 124600 - DNA, 568 bp, Homo sapiens
  Payload ID: 4474
  Gene Symbol: CYTH1
  Gene Name: cytohesin 1
  ENST ID: ENST00000590300
  CDS Start-End: 310-568
ttggtggctgcgagtgtactgagtaggaggcgagtccttcttggtgaaaaggctggagtgtccctcgtggaagtggagggcatgggatccctggaggaagggagcaaaggatactcctcctgaagcccctccaggacggtgttggagcagtctgttcccagtgacctgacagcagaggagcgtcaagaactggagaacatccgacggagaaaacaggagctgctggctgacattcagaggctgaaggatgagatagcagaagtagctaatgaaattgaaaacctgggatccacagaggaaaggaaaaacatgcagaggaacaaacaggtagccatgggcaggaaaaaatttaatatggaccctaaaaaggggatccagttcttaatagagaacgacctcctgaagaacacttgtgaagacattgcccagttcttatataaaggcgaagggctcaacaagacagccatcggcgactacctaggggagagagatgagtttaatatccaggttcttcatgcatttgtggagctgcatgagttcactgatcttaatctcgtccaggcactac

SEQ ID NO: 124601 - DNA, 988 bp, Homo sapiens
  Payload ID: 4474
  Gene Symbol: CYTH1
  Gene Name: cytohesin 1
  ENST ID: ENST00000589768
  CDS Start-End: 172-988
attgcctgtctgttcaggaagcagctctgagctgccctagtggctggacagcttcacaggtatccccggcccctcccagtcagaccccacaggaaaacttggctcccagtaagttaccgctctcctggaagcacagaacggacttttcgtgtcccgctgtaaggaaacaagatggtccttaaaaccgaagaggaggacgttcccagtgacctgacagcagaggagcgtcaagaactggagaacatccgacggagaaaacaggagctgctggctgacattcagaggctgaaggatgagatagcagaagtagctaatgaaattgaaaacctgggatccacagaggaaaggaaaaacatgcagaggaacaaacaggtagccatgggcaggaaaaaatttaatatggaccctaaaaaggggatccagttcttaatagagaacgacctcctgaagaacacttgtgaagacattgcccagttcttatataaaggcgaagggctcaacaagacagccatcggcgactacctaggggagagagatgagtttaatatccaggttcttcatgcatttgtggagctgcatgagttcactgatcttaatctcgtccaggcactacggcagttcctgtggagcttccggctacccggagaggcccagaagatcgaccggatgatggaggcgtttgcccagcgatattgtcagtgcaataatggcgtgttccagtccacggatacttgttacgtcctctcctttgccatcatcatgttgaacaccagtctgcacaaccccaatgtcaaagataagcccactgtggagaggttcattgccatgaaccgaggcatcaatgatgggggagacctgccggaggagctcctccggaatctctatgagagcataaaaaatgaaccctttaaaatcccagaagacgacgggaatgacctcactcacactttcttcaatccagaccgagaaggctggctattgaaactcg

SEQ ID NO: 124602 - DNA, 836 bp, Homo sapiens
  Payload ID: 4474
  Gene Symbol: CYTH1
  Gene Name: cytohesin 1
  ENST ID: ENST00000586043
  CDS Start-End: 254-836
agcacctcttcagctagttctggagtgggtgtgctgccctggatctcaaaggtgcagagcttggcctgccttctgctcctcctcactgctctccttggctgcccctgccataggtctcgtctttcttcctcctacagttctgccccctgcatgggcaggagataggggacggtccaagagcagcctcatgagagcagccaagacagagaagaagaagcctgccctcctaacacactgagttggcaccagaaggatgcactcgccaggaggcttgggtcggccgtgcctgctccagccttgccctgctgttcccagtgacctgacagcagaggagcgtcaagaactggagaacatccgacggagaaaacaggagctgctggctgacattcagaggctgaaggatgagatagcagaagtagctaatgaaattgaaaacctgggatccacagaggaaaggaaaaacatgcagaggaacaaacaggtagccatgggcaggaaaaaatttaatatggaccctaaaaaggggatccagttcttaatagagaacgacctcctgaagaacacttgtgaagacattgcccagttcttatataaaggcgaagggctcaacaagacagccatcggcgactacctaggggagagagatgagtttaatatccaggttcttcatgcatttgtggagctgcatgagttcactgatcttaatctcgtccaggcactacggcagttcctgtggagcttccggctacccggagaggcccagaagatcgaccggatgatggaggcgtttgcccagcgatattgtcagtgcaataatggcgtgttccagtccacgg

SEQ ID NO: 124603 - DNA, 2260 bp, Homo sapiens
  Payload ID: 4475
  Gene Symbol: CYTIP
  Gene Name: cytohesin 1 interacting protein
  Uniprot ID: O60759
  ENST ID: ENST00000264192
  CDS Start-End: 123-1202
agaggtcacatgggctctttctgctttgctacttttgattacttgtcacagttgtacttttagcttcccccatcctgcaaggccactcaaccatgtgctagctggagtgatctttattcacaatgtctttacaaaggctcctgcaacacagcagcaatggcaatttggcggacttctgcgctgggccagcgtatagctcttactccacactcaccggcagccttacgatggacgataatagaaggattcaaatgctagcagacacggtggctactctgcctcggggacgaaagcagcttgctttgaccagatcaagttctttaagtgacttttcctggtctcaaagaaagcttgttactgtggagaagcaggataatgaaacatttggatttgaaattcagtcttacaggccccagaatcagaatgcctgctcctcggaaatgttcactttgatatgcaaaatacaggaggacagcccagctcactgtgctggcctgcaagctggtgatgtccttgcaaatatcaatggtgtgagcacagaaggttttacctacaaacaagtcgttgacctgatcagatcgtccggaaacctgctaacgatagagactcttaatggaacaatgattctgaaaagaacggagcttgaagcaaagctgcaggttttaaagcaaactttgaaacaaaaatgggtggagtacagatctctgcagttacaggaacatcgtctgcttcatggtgatgcagctaattgccccagtttggaaaacatggacttggatgaattgtctttgtttggacccctgcctgggccaggcccagcccttgtggaccggaatcgattatccagtgagagcagctgtaagagctggctgagctccatgacgatggacagtgaagatggctaccagacgtgtgtgtctgaggactccagcaggggtgccttcagtcggcagacgagtacagatgatgagtgctttatccccaaggagggggatgattttctgaggaggtcatcttcaaggaggaaccggagcatcagtaacaccagcagcggatccatgtctcccttgtgggagggcaacttatcaagcatgtttgggaccctgccccggaagagcagaaagggaagtgtccgaaagcaactcttgaaatttatccctggccttcatcgtgctgtggaagaggaagaaagtcgcttttgacggattgtggtgtcctttcaaattagcttatttcacaaatatctctagactcacccagatcccagcttggtgggaaagtgcagaagaattgcaaaactgacatcccatttcacagcaatagtgacctttatttaaattgttgtgttatagtttatgcttcttaaatcatttttcaacctaaacagccaatttctaagcagacaggaaaactaaataataagttaattaatataacaaagatgcaggttcctgctcattccagtaatgtctttgaaagcaaaactaatatttattttctagattatccctgtgaataattgagaactttttggagtcaagtatgaataaaggtgtggcagaatataataatctggactattttctataggataattgctgggttataaaatcttaggtttgcttatgcccagtagctcctgcggaggcttaataataggcaattttgaatttgttcaaacctgtaatggcttgtaaacaaagatgaccatcagctgtttctcacatctatagtgacaataaagcgggaagtataagatttaataggaggggttaaggttcatgagaaccatggaaagatgtggtctgagatgggtgctgcaaagatcataataaagtcatttttatagacagtctaaacaaaatgggtggggatgtcgtgttttttgcccaattcagcttttgttctgcctgaacattaatggcaagtctagaactctccgaatcctacagctttgtaattttttttctacaaatgtctaacatccaaaactgagggttgggaaaaggacttccctcctgtagtttttttcatattacttctcactttatatcttatattctaaatagctatcacctcagcagtcttttgcctattggttatgttagtatcacattacttctagcctttcaattactccatgttttatttaatatccattgaagtctatgaattctctgttctggtggcacagctattcataacctatattctagagtagacaatctggactatgtaataaatagtctgctgattttaa

SEQ ID NO: 124604 - DNA, 757 bp, Homo sapiens
  Payload ID: 4475
  Gene Symbol: CYTIP
  Gene Name: cytohesin 1 interacting protein
  ENST ID: ENST00000418920
  CDS Start-End: 365-757
actttaggcaggtagtttggtgtgtgagctagtttcgaaccctgggaacattcctttccacatcgcctgagtctgacagcccggatcaaaaacaagcaggctttgtgtcaagacgtggcacgtgtcagagaatttgacgaatgacttttgattcaaaagaccgattggatgaaatcttgaagttcctaatagatgcactgatttccggcatactaaaaggcttgctttgaccagatcaagttctttaagtgacttttcctggtctcaaagaaagcttgttactgtggagaagcaggataatgaaacatttggatttgaaattcagtcttacaggccccagaatcagaatgcctgctcctcggaaatgttcactttgatatgcaaaatacaggaggacagcccagctcactgtgctggcctgcaagctggtgatgtccttgcaaatatcaatggtgtgagcacagaaggttttacctacaaacaagtcgttgacctgatcagatcgtccggaaacctgctaacgatagagactcttaatggaacaatgattctgaaaagaacggagcttgaagcaaagctgcaggttttaaagcaaactttgaaacaaaaatgggtggagtacagatctctgcagttacaggaacatcgtctgcttcatggtgatgcagctaattgccccagtttggaaaacatggacttggatgaattgtctttgtttggacccctgcctgggccaggcccagcccttgtggaccgg

SEQ ID NO: 124605 - DNA, 623 bp, Homo sapiens
  Payload ID: 4475
  Gene Symbol: CYTIP
  Gene Name: cytohesin 1 interacting protein
  ENST ID: ENST00000435117
  CDS Start-End: 516-623
ggtgtttagagggatgcagatgcttggccacccgtggaagtagctattggacagacacactcatccgtgaggacacatcaagctagatcctgaaggggagatagaagtgtcatataggcaaacggggagattggaattaaatgtcacgtggaaaaaagccaacatggcattctgttaagaagatagacaacctaagtgacgtctatcctgcttcaaagacaaaactcaggaggctgtacattcatttagagcagagtagacgaaacctcctattctctggcttgggaaccaggaggaatcactgactgagatttgccaaccagacctctatgaagtgagctctatcacatggtacgtttatgagaagaggaaccagcaatgtttccttccatcttcaactatactaacaagatccatctgatgtgctcctgcaacacagcagcaatggcaatttggcggacttctgcgctgggccagcgtatagctcttactccacactcaccggcagccttacgatggacgataatagaaggattcaaatgctagcagacacggtggctactctgcctcggggacgaaagcagcttgctttgaccagatcaagttctttaagtgacttttcc

SEQ ID NO: 124606 - DNA, 561 bp, Homo sapiens
  Payload ID: 4475
  Gene Symbol: CYTIP
  Gene Name: cytohesin 1 interacting protein
  ENST ID: ENST00000439355
  CDS Start-End: 338-561
tttactgcctctctccagccagctccagcactacaggacagagattggaattaaatgtcacgtggaaaaaagccaacatggcattctgttaagaagatagacaacctaagtgacgtctatcctgcttcaaagacaaaactcaggaggctgtacattcatttagagcagagtagacgaaacctcctattctctggcttgggaaccaggaggaatcactgactgagatttgccaaccagacctctatggctcctgcaacacagcagcaatggcaatttggcggacttctgcgctgggccagcgtatagctcttactccacactcaccggcagccttacgatggacgataatagaaggattcaaatgctagcagacacggtggctactctgcctcggggacgaaagcagcttgctttgaccagatcaagttctttaagtgacttttcctggtctcaaagaaagcttgttactgtggagaagcaggataatgaaacatttggatttgaaattcagtcttacaggccccagaatcagaatgcctgctcctcggaaatgttcacttt

SEQ ID NO: 124607 - DNA, 845 bp, Homo sapiens
  Payload ID: 4475
  Gene Symbol: CYTIP
  Gene Name: cytohesin 1 interacting protein
  ENST ID: ENST00000457793
  CDS Start-End: 79-264
gtcacagttgtacttttagcttcccccatcctgcaaggccactcaaccatgtgctagctggagtgatctttattcacaatgtctttacaaaggctcctgcaacacagcagcaatggcaatttggcggacttctgcgctgggccagcgtatagctcttactccacactcaccggcagccttacgatggacgataatagaaggattcaaatgctagcagacacggtggctactctgcctcggggacgaaagcagaatgacttttgattcaaaagaccgattggatgaaatcttgaagttcctaatagatgcactgatttccggcatactaaaaggcttgctttgaccagatcaagttctttaagtgacttttcctggtctcaaagaaagcttgttactgtggagaagcaggataatgaaacatttggatttgaaattcagtcttacaggccccagaatcagaatgcctgctcctcggaaatgttcactttgatatgcaaaatacaggaggacagcccagctcactgtgctggcctgcaagctggtgatgtccttgcaaatatcaatggtgtgagcacagaaggttttacctacaaacaagtcgttgacctgatcagatcgtccggaaacctgctaacgatagagactcttaatggaacaatgattctgaaaagaacggagcttgaagcaaagctgcaggttttaaagcaaactttgaaacaaaaatgggtggagtacagatctctgcagttacaggaacatcgtctgcttcatggtgatgcagctaattgccccagtttggaaaacatggacttggatgaattgtctttgtttggacccctgcctgg

SEQ ID NO: 124608 - DNA, 1087 bp, Homo sapiens
  Payload ID: 4476
  Gene Symbol: CYTH2
  Gene Name: cytohesin 2
  ENST ID: ENST00000325139
  CDS Start-End: 326-1087
tcagtcgtagacttgtcgcgccgcttttgttgggcgctggacgggcttccggcggggcccgaaagccgggcgttccaggccattgtttgggctgagcctgtttccggtggcggcgggaggggcgggatggagtggtggaggcgaggccggggcggaaccattcccgctggaggggcgggcgagcccagcgcctgccggggccggggaggggcgcttgggttgcggggaggggagaaatcttggggggcgggggccttcgatgtcccgccccaccttcccaactctcctgagctgtcatcagttcccccggctgtagtgacttttcatggacccagtagtccggataaccaggtccccagctacctcgccagtaatggagtcagaaaaccaaggcctcagtccccttccaaaacccccagacctgactccggaggagcggatggagctggagaacatccggcggcggaagcaggagctgctggtggagattcagcgcctgcgggaggagctcagtgaagccatgagcgaggtggaggggctggaggccaatgagggcagtaagaccttgcaacggaaccggaagatggcaatgggcaggaagaagttcaacatggaccccaagaaggggatccagttcttggtggagaatgaactgctgcagaacacacccgaggagatcgcccgcttcctgtacaagggcgaggggctgaacaagacagccatcggggactacctgggggagagggaagaactgaacctggcagtgctccatgcttttgtggatctgcatgagttcaccgacctcaatctggtgcaggccctcaggcagtttctatggagctttcgcctacccggagaggcccagaaaattgaccggatgatggaggccttcgcccagcgatactgcctgtgcaaccctggggttttccagtccacagacacgtgctatgtgctgtccttcgccgtcatcatgctcaacaccagtctccacaatcccaatgtccgggacaagccgggcctggagcgctttgtggccatgaaccggggcatcaacgagggcggggacctgcctgaggagctgctcagg

SEQ ID NO: 124609 - DNA, 1546 bp, Homo sapiens
  Payload ID: 4476
  Gene Symbol: CYTH2
  Gene Name: cytohesin 2
  ENST ID: ENST00000391881
  CDS Start-End: 188-1066
cggtccctactgaaggggcggttgggcgacgaagggaagagtcttttcagcgctgaggactggcgctgaggaggcggcggtggctcccggggcgtttgagcgggctcacccgagcccgcgggccaacgcggatccaggcccgactggcgggaccgccccggattccccgcgggccttcctagccgccatggaggacggcgtctatgaacccccagacctgactccggaggagcggatggagctggagaacatccggcggcggaagcaggagctgctggtggagattcagcgcctgcgggaggagctcagtgaagccatgagcgaggtggaggggctggaggccaatgagggcagtaagaccttgcaacggaaccggaagatggcaatgggcaggaagaagttcaacatggaccccaagaaggggatccagttcttggtggagaatgaactgctgcagaacacacccgaggagatcgcccgcttcctgtacaagggcgaggggctgaacaagacagccatcggggactacctgggggagagggaagaactgaacctggcagtgctccatgcttttgtggatctgcatgagttcaccgacctcaatctggtgcaggccctcaggcagtttctatggagctttcgcctacccggagaggcccagaaaattgaccggatgatggaggccttcgcccagcgatactgcctgtgcaaccctggggttttccagtccacagacacgtgctatgtgctgtccttcgccgtcatcatgctcaacaccagtctccacaatcccaatgtccgggacaagccgggcctggagcgctttgtggccatgaaccggggcatcaacgagggcggggacctgcctgaggagctgctcaggaacctgtacgacagcatccgaaatgagcccttcaagattcctgaggatgacgggaatgacctgacccacaccttcttcaacccggaccgggagggctggctcctgaagctgggtacggggccgggtgaagacgtggaagcggcgctggtttatcctcacagacaactgcctctactactttgagtacaccacggacaaggagccccgaggaatcatccccctggagaatctgagcatccgagaggtggacgacccccggaaaccgaactgctttgaactttacatccccaacaacaaggggcagctcatcaaagcctgcaaaactgaggcggacggccgagtggtggagggaaaccacatggtgtaccggatctcggcccccacgcaggaggagaaggacgagtggatcaagtccatccaggcggctgtgagtgtggaccccttctatgagatgctggcagcgagaaagaagcggatttcagtcaagaagaagcaggagcagccctgaccccctgcccccaactccattatttattacggagctgccccgcctgggtggccggacccctgggccttggggctgtggatcctggttccctgtttggaaaattcaccacctctagctcctcactgttctttgtaattaacacgctgttggtaatc

SEQ ID NO: 124610 - DNA, 4780 bp, Homo sapiens
  Payload ID: 4476
  Gene Symbol: CYTH2
  Gene Name: cytohesin 2
  Uniprot ID: Q99418
  ENST ID: ENST00000452733
  CDS Start-End: 477-1676
cctttgagcaggcgcagaggtggctgtaccgcgtggctccgcctccgcgcgacacttttccggggcttctcattggagagcaagcctgtcaagtgctttctgttgtttcggaggcggggcctgctgccctgcctgcactccgattggccccgcgggccgtctacctctggccggacatacctacaccggctttttgtacgactgttggccctggagaacgatcctttggtggcgagggcggggaggacgaaagcgcccactgtggattggacagtgtcaaaaagaggggcggtccctactgaaggggcggttgggcgacgaagggaagagtcttttcagcgctgaggactggcgctgaggaggcggcggtggctcccggggcgtttgagcgggctcacccgagcccgcgggccaacgcggatccaggcccgactggcgggaccgccccggattccccgcgggccttcctagccgccatggaggacggcgtctatgaacccccagacctgactccggaggagcggatggagctggagaacatccggcggcggaagcaggagctgctggtggagattcagcgcctgcgggaggagctcagtgaagccatgagcgaggtggaggggctggaggccaatgagggcagtaagaccttgcaacggaaccggaagatggcaatgggcaggaagaagttcaacatggaccccaagaaggggatccagttcttggtggagaatgaactgctgcagaacacacccgaggagatcgcccgcttcctgtacaagggcgaggggctgaacaagacagccatcggggactacctgggggagagggaagaactgaacctggcagtgctccatgcttttgtggatctgcatgagttcaccgacctcaatctggtgcaggccctcaggcagtttctatggagctttcgcctacccggagaggcccagaaaattgaccggatgatggaggccttcgcccagcgatactgcctgtgcaaccctggggttttccagtccacagacacgtgctatgtgctgtccttcgccgtcatcatgctcaacaccagtctccacaatcccaatgtccgggacaagccgggcctggagcgctttgtggccatgaaccggggcatcaacgagggcggggacctgcctgaggagctgctcaggaacctgtacgacagcatccgaaatgagcccttcaagattcctgaggatgacgggaatgacctgacccacaccttcttcaacccggaccgggagggctggctcctgaagctggggggccgggtgaagacgtggaagcggcgctggtttatcctcacagacaactgcctctactactttgagtacaccacggacaaggagccccgaggaatcatccccctggagaatctgagcatccgagaggtggacgacccccggaaaccgaactgctttgaactttacatccccaacaacaaggggcagctcatcaaagcctgcaaaactgaggcggacggccgagtggtggagggaaaccacatggtgtaccggatctcggcccccacgcaggaggagaaggacgagtggatcaagtccatccaggcggctgtgagtgtggaccccttctatgagatgctggcagcgagaaagaagcggatttcagtcaagaagaagcaggagcagccctgaccccctgcccccaactccattatttattacggagctgccccgcctgggtggccggacccctgggccttggggctgtggatcctggttccctgtttggaaaattcaccacctctagctcctcactgttctttgtaattaacacgctgttggtaatcttattaattatttaaccacttggcctgctgaccccctcatttcttggggttgacagagtcgaggtgctccgtggagccagcctgtttccctggacaggggcctggacccgcctgtctctgggtgctgcctgggctgtcccggtgggtctgttctggtttcaccccgagcccagcaggagtggagtaaagggagaaggttaatatggtgggagtctggagttggaattggccggggacagagtttagaatgcagggattcagggtcaaggtctagcattcattctagaagttacttgacagccatcagccagttacgctacagccatcagctagttcccatcgttgctttcatggggcttgaggtctttgaggggcaggagatgaagctggtgaggttgtgagctgggccagggctttgaggacaacctggagctggaagaacatgcgaccacctcagggagggtcagggaaggatgagtggggaggtggcccatgtcctgcaagggccttgctgatgggatgtcctgaagggctgggcagccttagatcgggctaagagggcaggactgtgggccagtgccagagccaggcttgtctgttctcaaaggatcagcctcctttggaggacattttgtgtcaaggatagggctgaggacctgcgttctgaacgtctttcctgggattcttgacagccaaagaaattcgaggatcgcctctatgaaggtgaagtcttggcatgtggggtacccctgaatcctgggctaaggtctgtgaccttttgccctccagttggggtatgtgtggtgtccccaaagaacaagggctcgtggatcccgagcagggtgcgatggcggattgggaggtcccatgtcactctcccatgcccgcctttgaagctgaggcgctctttagttaacaaactacaagtcccagcagggaccgggacgcgggtgggagaggcgcctgtggccccgaggcgtgccgcgagttgtagtccctcctgcccgctgtgttcgcttttgagctctccgatgggatgcggcgcttcggaatttcgggctttgatccctgtcccgcccttggccacaggcacctgccggcctgaaggcccccgcggtgggggtaccctgcgcccctccgcgggaaggtggactacagttatcggcaggctgtgcggcgccaaagccacggtgacccagacccgaggtttttccgggcgtcgcagtttcccgagactccgtggcggcgtttgtcttctttttcttagtcagatcccgtacttttgtggagggtagaggaggctttgaccgccgcggccccgggggctggtgggaaatggagttccaaatgagaaaatagaattccccacttctctttcccacaggtgccagggaaacggagtcatcgacccaagaaggtcgtgggagatgaggtcccagggtaaacagcgggtcccgccactatgtcaccctttcctgccgcctccccggatgaactgcatgcagggcggccggctccgtggcaggcagaggcaggaagaggcgcggagcccgctggtggcgaagaggggagtgcggcgggaggggagggcagaggcaggcggccggtcgcgtggggcctgggccgccccaggagggcctctggctggattcttagcagatggaagccgtgcaagggcaggaggcaggggcctgacgtgtttggattgaggttgcaggaggggcccctggctgcttcagggagaataatttggaggcgagcggggaggtgagaggaagctgtgcggtgcaggatggcgtggctgtggaggtggagaacgttgggccacgctaggagtcttgaaagaggagccaaaaggacttgctgagagccgccgcagctggtgaatgacggtgccatgactgaggtggtcgaaagggagtatttaaggggaaatcaggcattccgttttgaccaaattaagctggagatgcctgtggaacattccagccaggctgcatcacgtcacactgaccttcagcattgcccacagtccatcttcccccaggacctgaggattttgcgtccggctccctcctcgcccaggacccccaagctcccagcacgcttctgattttttttgtaggtttttttttttgttttttgttttgttttgttttgtttttgagagggagtctcactttgtgccctagactggagtgcaatggcgccatctcggcttactgcaacctccacctcccaggtgcaagcgattcccctgcctcagcttcccgagtagctgggattacagatgtgagccaccgtacccagctaatttttgtatttttagtagagacggggtttcaccatattggccaagctggtctcgaactcctgacctcaggcgatccatctgtctcagcctcccaaagtgctgggattacaggtgtgagccaccgcgccaggcctcagcccacttcttttgggtggcaatggtttggatatcgtttgtcctcactaaaattcatgttgagattcgagccccagtgtggcaggtgttgggatgtggggcctcataaggagctgtgtggtcttggaggtggagtcctcatggatagattaatgcctgccttaaggggtgagtgagtgctcacccttgggaatttgggaatttggttttctctcccttgcttccttcagcaccatgtgatctctgtgcacacagctgcatccttctgccctcccccagaagcagcagcagcctcagggatgagggaggtcctcagtgagtgcacctgcccagtcttgaaccttccagccatcagaatctgagccaaatcaacctcttcctttataaagacccagcctcaggtcttctgtcagagcaacacaaaatggactcagcacggatcaaattgtgtctcccccacccccacaaaaaactttatattaaaatcctaacccccagca

SEQ ID NO: 124611 - DNA, 746 bp, Homo sapiens
  Payload ID: 4476
  Gene Symbol: CYTH2
  Gene Name: cytohesin 2
  ENST ID: ENST00000595765
  CDS Start-End: 1-645
ctgctgcagaacacacccgaggagatcgcccgcttcctgtacaagggcgaggggctgaacaagacagccatcggggactacctgggggagagggaagaactgaacctggcagtgctccatgcttttgtggatctgcatgagttcaccgacctcaatctggtgcaggccctcaggcagtttctatggagctttcgcctacccggagaggcccagaaaattgaccggatgatggaggccttcgcccagcgatactgcctgtgcaaccctggggttttccagtccacagacacgtgctatgtgctgtccttcgccgtcatcatgctcaacaccagtctccacaatcccaatgtccgggacaagccgggcctggagcgctttgtggccatgaaccggggcatcaacgagggcggggacctgcctgaggagctgctcaggaacctgtacgacagcatccgaaatgagcccttcaagattcctgaggatgacgggaatgacctgacccacaccttcttcaacccggaccgggagggctggctcctgaagctgggtacgtgccctcccgaccccgctggtccctccgcaggaggacatttgtgggcctgggccctggactcagcttccgcacacacctgctgcctgaactgaggcaaatgattcgacctctctgaacctcagttttccacacccaaaaaatggggctgaaaataaaatcaggcctgtgtgctgggcctggcctgtagtaagta

SEQ ID NO: 124612 - DNA, 2020 bp, Homo sapiens
  Payload ID: 4476
  Gene Symbol: CYTH2
  Gene Name: cytohesin 2
  ENST ID: ENST00000620214
  CDS Start-End: 1255-1674
gctgaaaataaaatcaggcctgtgtgctgggcctggcctgtagtaagtacttcccaaccccttctcttgacccacaaatgttgatggagcccttctgtgccaggccctgagctgggctgaggaggcagtgagaggcagctgacattgtcctttcgtgggagaagagttcactcaggcttctttccactgcgttaacccagcccgagggagccaaacccctggaatctattccccttggcaagaactcccagggttccaggcaggactgaccccgcactccgaggcatcaggcccagagcacttggctgatccaggtgccatccttcccgaaacaccacccacaggcagaaaagagccaaacaggccaggaaacctgtcccagattctggcttccagctgtggagggaatagccagggctggtgcagatgagtcgggaaacccagcagagatggaggggggagtcttcgtcataacacgtggcactggcacattcaaggtcggttagcatggatcagacaggatcgtagcatgatgaggggttagcacaaggactagagtggttctcagccctggctgtacatgagatttgcctgggcaactcgaaaactccggtggctgggccatagactcctgaagtcaggctctcaggagcagaagggccatcagtcatcgtttaagctcctcgggtgctcccaatgcatagtcaaggttgagagctactggcctggagccgtgcctggtaacagtaggtgccacctgcgtgttagatgtggtttataatggagacacggtgcacagctgctccagagagacacatctgggcagttacagtccagcacagcagtggaggcttcccgcggcagcaggagagcccacaggaagctttcagctcagtgaagggagtcaaggtcaggcttcttggaaggaggttggacagggcagctttggcctctgagtcttgggggcctccccatgtggaactgtgctcttaaaccagggcatcaccacctcaacagatgccagggtttcctggtaaatgtaaaatacacaagtcaggcagggcacaggggcccacccctgtaatttcagcactttgggaggacaaggcaggaggattgttagaggtcaggagtttgagaccaacctgggcaatataatgataccccccatctctacaaaaaataaaaaaattagccaggcatggtgatgtgggaggattgtttgagctcaagtggtcgaggcttcagtgagtcatggttgcgccactgcagtccagcctgggcaacagagcgagaccccgtctctataaaataaaacatgcaaatcactgtccagccaacaccccagtccagatccctgcattcgatccaagggaggcagactgctgggggaaattgagagtcctcgaggtgcccctggcagtgagcggccagaaagagaagcaggaaggcgccagcatcacgaggaactgcttccctcaaagtgctgggattacaggtgtgagccaccgcgccaggcctcagcccacttcttttgggtggcaatggtttggatatcgtttgtcctcactaaaattcatgttgagattcgagccccagtgtggcaggtgttgggatgtggggcctcataggagctgtgtggtcttggaggtggagtcctcatggatagattaatgcctgccttaaggggtgagtgagtgctcacccttgggaatttgggaatttggttttctctcccttgcttccttcagcaccatgtgatctctgtgcacacagctgcatccttctgccctcccccagaagcagcagcagcctcagggatgagggaggtcctcagtgagtgcacctgcccagtcttgaaccttccagccatcagaatctgagccaaatcaacctcttcctttataaagacccagcctcaggtcttctgtcagagcaacacaaaatggactcagcacggatcaaattgtgtctcccccacccccacaaaaaactttatattaaaatcctaacccccagc

SEQ ID NO: 124613 - DNA, 4606 bp, Homo sapiens
  Payload ID: 4476
  Gene Symbol: CYTH2
  Gene Name: cytohesin 2
  ENST ID: ENST00000427476
  CDS Start-End: 301-1503
atacctacaccggctttttgtacgactgttggccctggagaacgatcctttggtggcgagggcggggaggacgaaagcgcccactgtggattggacagtgtcaaaaagaggggcggtccctactgaaggggcggttgggcgacgaagggaagagtcttttcagcgctgaggactggcgctgaggaggcggcggtggctcccggggcgtttgagcgggctcacccgagcccgcgggccaacgcggatccaggcccgactggcgggaccgccccggattccccgcgggccttcctagccgccatggaggacggcgtctatgaacccccagacctgactccggaggagcggatggagctggagaacatccggcggcggaagcaggagctgctggtggagattcagcgcctgcgggaggagctcagtgaagccatgagcgaggtggaggggctggaggccaatgagggcagtaagaccttgcaacggaaccggaagatggcaatgggcaggaagaagttcaacatggaccccaagaaggggatccagttcttggtggagaatgaactgctgcagaacacacccgaggagatcgcccgcttcctgtacaagggcgaggggctgaacaagacagccatcggggactacctgggggagagggaagaactgaacctggcagtgctccatgcttttgtggatctgcatgagttcaccgacctcaatctggtgcaggccctcaggcagtttctatggagctttcgcctacccggagaggcccagaaaattgaccggatgatggaggccttcgcccagcgatactgcctgtgcaaccctggggttttccagtccacagacacgtgctatgtgctgtccttcgccgtcatcatgctcaacaccagtctccacaatcccaatgtccgggacaagccgggcctggagcgctttgtggccatgaaccggggcatcaacgagggcggggacctgcctgaggagctgctcaggaacctgtacgacagcatccgaaatgagcccttcaagattcctgaggatgacgggaatgacctgacccacaccttcttcaacccggaccgggagggctggctcctgaagctggcagggggccgggtgaagacgtggaagcggcgctggtttatcctcacagacaactgcctctactactttgagtacaccacggacaaggagccccgaggaatcatccccctggagaatctgagcatccgagaggtggacgacccccggaaaccgaactgctttgaactttacatccccaacaacaaggggcagctcatcaaagcctgcaaaactgaggcggacggccgagtggtggagggaaaccacatggtgtaccggatctcggcccccacgcaggaggagaaggacgagtggatcaagtccatccaggcggctgtgagtgtggaccccttctatgagatgctggcagcgagaaagaagcggatttcagtcaagaagaagcaggagcagccctgaccccctgcccccaactccattatttattacggagctgccccgcctgggtggccggacccctgggccttggggctgtggatcctggttccctgtttggaaaattcaccacctctagctcctcactgttctttgtaattaacacgctgttggtaatcttattaattatttaaccacttggcctgctgaccccctcatttcttggggttgacagagtcgaggtgctccgtggagccagcctgtttccctggacaggggcctggacccgcctgtctctgggtgctgcctgggctgtcccggtgggtctgttctggtttcaccccgagcccagcaggagtggagtaaagggagaaggttaatatggtgggagtctggagttggaattggccggggacagagtttagaatgcagggattcagggtcaaggtctagcattcattctagaagttacttgacagccatcagccagttacgctacagccatcagctagttcccatcgttgctttcatggggcttgaggtctttgaggggcaggagatgaagctggtgaggttgtgagctgggccagggctttgaggacaacctggagctggaagaacatgcgaccacctcagggagggtcagggaaggatgagtggggaggtggcccatgtcctgcaagggccttgctgatgggatgtcctgaagggctgggcagccttagatcgggctaagagggcaggactgtgggccagtgccagagccaggcttgtctgttctcaaaggatcagcctcctttggaggacattttgtgtcaaggatagggctgaggacctgcgttctgaacgtctttcctgggattcttgacagccaaagaaattcgaggatcgcctctatgaaggtgaagtcttggcatgtggggtacccctgaatcctgggctaaggtctgtgaccttttgccctccagttggggtatgtgtggtgtccccaaagaacaagggctcgtggatcccgagcagggtgcgatggcggattgggaggtcccatgtcactctcccatgcccgcctttgaagctgaggcgctctttagttaacaaactacaagtcccagcagggaccgggacgcgggtgggagaggcgcctgtggccccgaggcgtgccgcgagttgtagtccctcctgcccgctgtgttcgcttttgagctctccgatgggatgcggcgcttcggaatttcgggctttgatccctgtcccgcccttggccacaggcacctgccggcctgaaggcccccgcggtgggggtaccctgcgcccctccgcgggaaggtggactacagttatcggcaggctgtgcggcgccaaagccacggtgacccagacccgaggtttttccgggcgtcgcagtttcccgagactccgtggcggcgtttgtcttctttttcttagtcagatcccgtacttttgtggagggtagaggaggctttgaccgccgcggccccgggggctggtgggaaatggagttccaaatgagaaaatagaattccccacttctctttcccacaggtgccagggaaacggagtcatcgacccaagaaggtcgtgggagatgaggtcccagggtaaacagcgggtcccgccactatgtcaccctttcctgccgcctccccggatgaactgcatgcagggcggccggctccgtggcaggcagaggcaggaagaggcgcggagcccgctggtggcgaagaggggagtgcggcgggaggggagggcagaggcaggcggccggtcgcgtggggcctgggccgccccaggagggcctctggctggattcttagcagatggaagccgtgcaagggcaggaggcaggggcctgacgtgtttggattgaggttgcaggaggggcccctggctgcttcagggagaataatttggaggcgagcggggaggtgagaggaagctgtgcggtgcaggatggcgtggctgtggaggtggagaacgttgggccacgctaggagtcttgaaagaggagccaaaaggacttgctgagagccgccgcagctggtgaatgacggtgccatgactgaggtggtcgaaagggagtatttaaggggaaatcaggcattccgttttgaccaaattaagctggagatgcctgtggaacattccagccaggctgcatcacgtcacactgaccttcagcattgcccacagtccatcttcccccaggacctgaggattttgcgtccggctccctcctcgcccaggacccccaagctcccagcacgcttctgattttttttgtaggtttttttttttgttttttgttttgttttgttttgtttttgagagggagtctcactttgtgccctagactggagtgcaatggcgccatctcggcttactgcaacctccacctcccaggtgcaagcgattcccctgcctcagcttcccgagtagctgggattacagatgtgagccaccgtacccagctaatttttgtatttttagtagagacggggtttcaccatattggccaagctggtctcgaactcctgacctcaggcgatccatctgtctcagcctcccaaagtgctgggattacaggtgtgagccaccgcgccaggcctcagcccacttcttttgggtggcaatggtttggatatcgtttgtcctcactaaaattcatgttgagattcgagccccagtgtggcaggtgttgggatgtggggcctcataaggagctgtgtggtcttggaggtggagtcctcatggatagattaatgcctgccttaaggggtgagtgagtgctcacccttgggaatttgggaatttggttttctctcccttgcttccttcagcaccatgtgatctctgtgcacacagctgcatccttctgccctcccccagaagcagcagcagcctcagggatgagggaggtcctcagtgagtgcacctgcccagtcttgaaccttccagccatcagaatctgagccaaatcaacctcttcctttataaagacccagcctcaggtcttctgtcagagcaacacaaaatggactcagcacggatcaaattgtgtctcccccacccccacaaaaaactttatattaaaatcctaacccccagc

SEQ ID NO: 124614 - DNA, 4505 bp, Homo sapiens
  Payload ID: 4477
  Gene Symbol: CYTH3
  Gene Name: cytohesin 3
  Uniprot ID: O43739
  ENST ID: ENST00000350796
  CDS Start-End: 138-1337
ggaggaggcccggccgcgacccgggccgcgcgctgaggagccgcccggtcgcctgcgcgctccctccggcggcgtccccagcccgcggcccctctgctgccggcccccggctcgccggctgcgggagtggcctcaagatggatgaagacggcggcggcgagggtggtggcgtgcctgaagacctctcattagaagagagagaagaacttctagacattcgtcgaagaaaaaaggaacttattgatgacattgagaggctgaaatatgaaattgcagaggtgatgacagagatcgacaatctaacttccgtagaggagagcaaaacgactcagaggaacaaacagatagccatgggaagaaagaaattcaacatggatcccaaaaagggaattcagtttctaatagaaaatgacctgctacagagttccccagaagacgtcgcccagttcctttataaaggagaaggcctaaataagaccgtcattggggactacctgggtgaaagggatgaatttaatattaaagttcttcaagcctttgttgaactccatgagtttgctgatctcaaccttgtacaagccttaaggcagttcttatggagcttcaggctgcccggggaggcgcagaagattgatcgcatgatggaggctttcgcttctcgctactgcctgtgcaaccccggggtcttccagtccacagacacgtgctacgtgctgtcattcgccatcatcatgctcaacaccagcctccacaaccacaacgtgcgtgacaagcccacggcagaacggttcatcgccatgaaccgcggcatcaacgagggcggggacctccctgaggagctgctgaggaatttgtatgagagcattaagaacgagccatttaagatcccggaggacgacgggaacgacctgacccacaccttcttcaaccccgaccgcgagggctggctcctgaagctgggagggcgtgtgaagacctggaagcgccggtggttcatcctgaccgataactgcctctattactttgaatacacaacagataaggagcccaggggaatcatcccgttggaaaacctcagcatcagggaggtggaggacccccggaaacccaactgttttgagctctacaatcccagccacaaagggcaggtcatcaaggcctgtaagactgaggccgacggccgcgtggtagaggggaaccatgtggtgtaccggatctcagccccgagcccggaggagaaggaggagtggatgaaatccatcaaagccagtatcagcagagatcccttctatgacatgttggcaacgaggaaacgaaggattgccaataaaaaatagctttcctggctaaaagacccaggtaaaagacccaaccccagcagaaagacaccgcgggcggcccctccgcggaaggcgtggcagggaggcagtcgccctgcggtgcaagctgctgctccagagcataccgtggcccaggtggtatccccaaggcctcgtgccgtggctggggtcctgggaggtggtcgccctgcagtgcaagctgctgctccagagcgtaccgtggcccagactgatcctcgaggcctcctgccgtggctggggtcatggtcggctgcgcatgtccagaagcatttccttcctgcgaccatcccggcgcccctagggggagaagccaggacagcagcttccgctgtctccacagcagacacgggacggattccacagacgggagcctcattcgtaccatgccaaacgcattcactcggggcagtattaaccgttctagaaagccactgttttatagcaaaacaggaaaggaaaagctaccagttttttattcagaatttttctcagatatataggattatagcttttatatgcctttttatattctgaaattataacaaaagatactttctaacagtagtatttttagaatggcagctataaagttaactcctggacacaagtatatactgtgcactgaaaaaatatccatctacacagcacccaaggggagggctgggggcaccggcacgggggcagcgtgcagccctgccctgtcaggctgtcagacaagccccggggggcagcaggtgggctcgggacgggctgggggagggacggccatggcacttgggggctccagggtgactcccatgaggcctcccttcaaccaggctttttggccccacaaatactttaagcaaatcattaaaattataacagttaatggtttgggggtgtttaggctgtaactgctaactcctaggaaacagccttttccctggacacagatggtccatacgctgagccacgtgaaactgctgatgttttgtttagatgcacacacatggcagcgtttcatacaggtcagcaggttagaccggcttttgaccatattcatcgctatttaaaacctgtggcaaaatgaacgcttattttacagactttctaatttgaccagatttcttaatgaatagacacagaattaactaaaaacagtctcaccccatgtagtgcgccgtgtcctgagagaggtgccctccctacgaggagggaagaacaggccctggggtgcagaggcccggcacgtagagaacccagatagacgccggtggtggaactggtcaaactccacgcccgcctgggaggttgtcaggttgctgtggatgtaaggataggaggtgcccagtgctccgctcaaggaaggctggatctgggccccacctacagagagggctcagggctggaccgggggcattgtgtgcttgggccgacccgggccggtggcagacgctgttctctgtcgggagatttgcgtccccaggaccctgttacacagtgggctgttgggttggtggctggcttttcctctatggacttcctcttcctgccccacctgcataggcacacacaccttgaatctgcaccctctggagggcatctgtactcctgtgcaaaatgcccagtccagagacaaaacctcagactttgtgcacctaggtttccttctcagcagcggagactgttctttgagttgccttgaagtggaggccgagcggctgcgggcccttcgcctccctgcggctgaccttgatgtagctttaagtcacactagactgcagaggggtccgaggccagaaacccctgtcctgcatcagactttcattcccacgttcttaggctttgttactgatacctcaaatcggaagttttagttctgagaaaggcaagtcagcgttcttgaaatgcctgactggtagatatgcaactctggcctccagtcttccatgaaaataaatgctgcctggacccccacccagaccacacactgacggccggctccggcggtgcccacccctcaggctggcccggcacccaagactggccacagccagctctgtcagcatgttgtgctcggacaagctgtttccttcttctgaccaacccaggtgtgacctggggatgcagagctttctgttttgggtgttgggagaagcagcaggaaggagtcgccagatgatcaagctccccctttgctgtcatctgtgaatgagcttcgccaggtggtgggcacctgggagccatgcagaggctgtggtgctgagttagactccaggtactttgtggtcaaaggaaatcgcctagctccaggctgtgttaggacagtattagcatgaaggctgtgcgaccatcatgcctgctgatccttgaggcaggcctggtccagaaaactctgggtcagtgactgcgcagggccagccgctaccaggacggccctgaaacaggacacatctgttttttgtccctcaccctgggcaggccgcgtcacaatcacagtcctcctcctccccaccctgacgtctgagcgcagggcttgaattgttagtcccaactctggccaaagatacttttttccagagacagaggccaggaggcagtgaggggagccccgcggggaggcggcggcgactgccacagcccttccagcctgtcttgctggccgccctggttcatatttgagtttaattgtactgaccctggacccagataagcagcaactttgtgtctttggggtcacagaacattttggggcagtttaatgtggtaccaaactgaaaataggagctatttatagatggagcagcacttagtgcttcatagaaagcaatgcctatttttaaagttacaaacgcagatatctacatagatatgctttgctgagaagttaggtctgtggtagaccagaaaccacaaattgactttttttcttagaaaatatttctatttgcggtaaatatagtaatatgtaaataatgtacatctgttgatttctggagtgtctgttattcaatgatgtatatactcccacagctcgcatgaaggaacagcctctattgatacttggttgtaaagtgaagtaagattggagggtggatggctgtcagagctcttgcagatactgtgttcactaaataaaaatcacatgtattgttaaaacaa

SEQ ID NO: 124615 - DNA, 4508 bp, Homo sapiens
  Payload ID: 4477
  Gene Symbol: CYTH3
  Gene Name: cytohesin 3
  Uniprot ID: O43739
  ENST ID: ENST00000396741
  CDS Start-End: 138-1340
ggaggaggcccggccgcgacccgggccgcgcgctgaggagccgcccggtcgcctgcgcgctccctccggcggcgtccccagcccgcggcccctctgctgccggcccccggctcgccggctgcgggagtggcctcaagatggatgaagacggcggcggcgagggtggtggcgtgcctgaagacctctcattagaagagagagaagaacttctagacattcgtcgaagaaaaaaggaacttattgatgacattgagaggctgaaatatgaaattgcagaggtgatgacagagatcgacaatctaacttccgtagaggagagcaaaacgactcagaggaacaaacagatagccatgggaagaaagaaattcaacatggatcccaaaaagggaattcagtttctaatagaaaatgacctgctacagagttccccagaagacgtcgcccagttcctttataaaggagaaggcctaaataagaccgtcattggggactacctgggtgaaagggatgaatttaatattaaagttcttcaagcctttgttgaactccatgagtttgctgatctcaaccttgtacaagccttaaggcagttcttatggagcttcaggctgcccggggaggcgcagaagattgatcgcatgatggaggctttcgcttctcgctactgcctgtgcaaccccggggtcttccagtccacagacacgtgctacgtgctgtcattcgccatcatcatgctcaacaccagcctccacaaccacaacgtgcgtgacaagcccacggcagaacggttcatcgccatgaaccgcggcatcaacgagggcggggacctccctgaggagctgctgaggaatttgtatgagagcattaagaacgagccatttaagatcccggaggacgacgggaacgacctgacccacaccttcttcaaccccgaccgcgagggctggctcctgaagctgggtggagggcgtgtgaagacctggaagcgccggtggttcatcctgaccgataactgcctctattactttgaatacacaacagataaggagcccaggggaatcatcccgttggaaaacctcagcatcagggaggtggaggacccccggaaacccaactgttttgagctctacaatcccagccacaaagggcaggtcatcaaggcctgtaagactgaggccgacggccgcgtggtagaggggaaccatgtggtgtaccggatctcagccccgagcccggaggagaaggaggagtggatgaaatccatcaaagccagtatcagcagagatcccttctatgacatgttggcaacgaggaaacgaaggattgccaataaaaaatagctttcctggctaaaagacccaggtaaaagacccaaccccagcagaaagacaccgcgggcggcccctccgcggaaggcgtggcagggaggcagtcgccctgcggtgcaagctgctgctccagagcataccgtggcccaggtggtatccccaaggcctcgtgccgtggctggggtcctgggaggtggtcgccctgcagtgcaagctgctgctccagagcgtaccgtggcccagactgatcctcgaggcctcctgccgtggctggggtcatggtcggctgcgcatgtccagaagcatttccttcctgcgaccatcccggcgcccctagggggagaagccaggacagcagcttccgctgtctccacagcagacacgggacggattccacagacgggagcctcattcgtaccatgccaaacgcattcactcggggcagtattaaccgttctagaaagccactgttttatagcaaaacaggaaaggaaaagctaccagttttttattcagaatttttctcagatatataggattatagcttttatatgcctttttatattctgaaattataacaaaagatactttctaacagtagtatttttagaatggcagctataaagttaactcctggacacaagtatatactgtgcactgaaaaaatatccatctacacagcacccaaggggagggctgggggcaccggcacgggggcagcgtgcagccctgccctgtcaggctgtcagacaagccccggggggcagcaggtgggctcgggacgggctgggggagggacggccatggcacttgggggctccagggtgactcccatgaggcctcccttcaaccaggctttttggccccacaaatactttaagcaaatcattaaaattataacagttaatggtttgggggtgtttaggctgtaactgctaactcctaggaaacagccttttccctggacacagatggtccatacgctgagccacgtgaaactgctgatgttttgtttagatgcacacacatggcagcgtttcatacaggtcagcaggttagaccggcttttgaccatattcatcgctatttaaaacctgtggcaaaatgaacgcttattttacagactttctaatttgaccagatttcttaatgaatagacacagaattaactaaaaacagtctcaccccatgtagtgcgccgtgtcctgagagaggtgccctccctacgaggagggaagaacaggccctggggtgcagaggcccggcacgtagagaacccagatagacgccggtggtggaactggtcaaactccacgcccgcctgggaggttgtcaggttgctgtggatgtaaggataggaggtgcccagtgctccgctcaaggaaggctggatctgggccccacctacagagagggctcagggctggaccgggggcattgtgtgcttgggccgacccgggccggtggcagacgctgttctctgtcgggagatttgcgtccccaggaccctgttacacagtgggctgttgggttggtggctggcttttcctctatggacttcctcttcctgccccacctgcataggcacacacaccttgaatctgcaccctctggagggcatctgtactcctgtgcaaaatgcccagtccagagacaaaacctcagactttgtgcacctaggtttccttctcagcagcggagactgttctttgagttgccttgaagtggaggccgagcggctgcgggcccttcgcctccctgcggctgaccttgatgtagctttaagtcacactagactgcagaggggtccgaggccagaaacccctgtcctgcatcagactttcattcccacgttcttaggctttgttactgatacctcaaatcggaagttttagttctgagaaaggcaagtcagcgttcttgaaatgcctgactggtagatatgcaactctggcctccagtcttccatgaaaataaatgctgcctggacccccacccagaccacacactgacggccggctccggcggtgcccacccctcaggctggcccggcacccaagactggccacagccagctctgtcagcatgttgtgctcggacaagctgtttccttcttctgaccaacccaggtgtgacctggggatgcagagctttctgttttgggtgttgggagaagcagcaggaaggagtcgccagatgatcaagctccccctttgctgtcatctgtgaatgagcttcgccaggtggtgggcacctgggagccatgcagaggctgtggtgctgagttagactccaggtactttgtggtcaaaggaaatcgcctagctccaggctgtgttaggacagtattagcatgaaggctgtgcgaccatcatgcctgctgatccttgaggcaggcctggtccagaaaactctgggtcagtgactgcgcagggccagccgctaccaggacggccctgaaacaggacacatctgttttttgtccctcaccctgggcaggccgcgtcacaatcacagtcctcctcctccccaccctgacgtctgagcgcagggcttgaattgttagtcccaactctggccaaagatacttttttccagagacagaggccaggaggcagtgaggggagccccgcggggaggcggcggcgactgccacagcccttccagcctgtcttgctggccgccctggttcatatttgagtttaattgtactgaccctggacccagataagcagcaactttgtgtctttggggtcacagaacattttggggcagtttaatgtggtaccaaactgaaaataggagctatttatagatggagcagcacttagtgcttcatagaaagcaatgcctatttttaaagttacaaacgcagatatctacatagatatgctttgctgagaagttaggtctgtggtagaccagaaaccacaaattgactttttttcttagaaaatatttctatttgcggtaaatatagtaatatgtaaataatgtacatctgttgatttctggagtgtctgttattcaatgatgtatatactcccacagctcgcatgaaggaacagcctctattgatacttggttgtaaagtgaagtaagattggagggtggatggctgtcagagctcttgcagatactgtgttcactaaataaaaatcacatgtattgttaaaacaa

SEQ ID NO: 124616 - DNA, 3206 bp, Homo sapiens
  Payload ID: 4478
  Gene Symbol: CYTH4
  Gene Name: cytohesin 4
  Uniprot ID: Q9UIA0
  ENST ID: ENST00000248901
  CDS Start-End: 188-1372
tgtcaaaagcctgcacacgagacccccgtgggccaggactgacttcctccccacacagggctgggcggggcaagcaggaaggagcctgttacagtcaaggtgacgcatccttgccgggccagcccgaacagcagctgggtcggcaagcgacaggagcacgggtcatcttttccccagaggcgtcggaatggacctgtgccacccagagcccgcggagctgagcagcggggagacggaagagttacagaggatcaagtggcaccgaaagcagctcctggaggacatccagaagctgaaggatgagattgcagatgtgtttgcccaaatcgactgcttcgagagtgcggaggagagccggatggcccagaaggagaaggagctgtgtattgggcgcaagaagttcaacatggaccccgccaagggtatccagtatttcattgagcacaagctgctgacccctgacgtccaggacattgcacggttcctgtataaaggcgagggcctcaacaagacagccattggtacctacctgggggagagggatcccatcaacctgcaggtcctccaggccttcgtggactgccacgagttcgccaacctcaacctcgtccaggccctcaggcagttcctgtggagcttccggctgccgggcgaggcccagaagatagaccggatgatggaggcctttgccactcgatactgcctctgcaacccaggcgtcttccagtccacagacacctgctacgtgttgtccttctccatcatcatgctcaacaccagcctccacaatcccaacgtccgggacaggccgccttttgagcgctttgtgtccatgaaccgcggcatcaacaatggtagcgacctgcccgaggaccagctgcggaacctcttcgacagcatcaagagtgagccattctccatccctgaggacgacggcaatgacctcactcacaccttcttcaatccagaccgggagggttggctgctcaagctagggggccgcgtgaagacgtggaaacggcgctggttcatcctgaccgacaactgcctctactacttcgagttcaccactgacaaggagccacggggaattatacctcttgagaacctctcggtgcagaaggtggatgaccccaagaagccattctgcctggagctctacaaccctagctgccgaggccagaaaatcaaggcctgcaagaccgatggcgacggcagggtggtggagggcaagcacgaatcgtaccgcatctcagccaccagtgccgaggaacgtgaccagtggatcgagtccatccgagccagcatcacccgtgtccccttctacgacctggtctctactcggaagaagaagattgccagcaagcagtgagattcctggaggtggcactgggggctggtcaccctgagagtcccatcgcctgcagcacctggagacccacctcccaccccagtgcactcttttgggccacagacatcattgctgttccccgttacctcgagctgactctagaggggaaggcagagctcaggagggtgggtgggagctgcagtgggctcagagtccagcaatgaggccccctggcctgggcacccagctgcaggcccctgccctacgtgcactacaggaaggggtgaggagagcagccagaggaaaaccagccccagaatgctgcaacttctcttctctctggacttcggtgtcctcggctctgaaggcgctctctgcacttagatgctgtcagccctcaacgtaggaggggccgtggggtccctaagtgattcttctccctggcaaggctcttccttttcagggatatctctgccaacccctcccctgtcctcgggttgggcttggccctctctgcctgagagagctcagcacacacacagctcagacccacggacaggaccccgggacagaaccccgggagcactgccctaggagcccggaccccacgagctcagtcccagctctgcctctgactcgctgtgtgccctctgccaagtcatgcccattctctagttcttgcaaaactgcagtgtttggactagaaacgtattggcccctgctagccctgtgctccagcttccagctggagatggcagccgttgtttgcggagcccaggctgactccggattcaacgttgctggggagagaaaagcagtatagactccaccttccaggatgtccatttcggggagaggagcaggtgggaccctcaagaaaatgacggagaacatcccagacagatgggactcaagcaggatgggtgctatatccaagaagccaagaagggagagtttcgtgcactgtggttaacaggagggctgcctggaggcagtggctgagccagaaagtaacacagagctcatgcttggagagagagagtcttggccatggctttcctgcaagaccactgacgagcagtcccatggtgataaagggcagcccggcgggtcccagcatctcgagaccctctgcagaagtattatcagagtagagctgacttccagtacccgggcagccagctctgtctccagggaggcctggcctggaggaggagtccactaacaggaaacacttctcaccccctcacacaggcccaggggagcccctggagggaaattccttggcaggggaacaggaaatgtggccgcctctgccccactgccagcctgagtgggcaaggaagcaggtggatcccccagaaggaaccgcagctcgcgaggcacctctcctcgtccccacccacccccacatttgcacaccttccacagggtcaggatggagtagctgccttgcgaggtggtgagactcctgtctctggaggtctgcaagcactggtagtgatattgcagcagacaaggtctgggttgggcgtctgcaggaggacaccttgtgggacatctgaggacatccgcagattcttgtcagcctgtgaactaggccctgcctctgtcacctcattggtccatgaaggagcagccaggggtggtggaaggagcactgggctaggggtcaggggtcagagattctgtcctgctcctgggatgcactggctactcccttagtctactcccttcccctctctggtcctcagcttcctccatcatggaggagatgggatcatggattttctgggcataagtggctgttctgggagtcattccaaagagagaataaaactcctgatccaactcg

SEQ ID NO: 124617 - DNA, 636 bp, Homo sapiens
  Payload ID: 4478
  Gene Symbol: CYTH4
  Gene Name: cytohesin 4
  ENST ID: ENST00000405206
  CDS Start-End: 84-557
gcatccttgccgggccagcccgaacagcagctgggtcggcaagcgacaggagcacgggtcatcttttccccagaggcgtcggaatggacctgtgccacccagagcccgcggagctgagcagcggggagacggaagagttacagaggatcaagtggcaccgaaagcagctcctggaggacatccagaagctgaaggatgagattgcagatgtgtttgcccaaatcgactgcttcgagagtgcggaggagagccggatggcccagaaggagaaggagctgtgtattgggcgcaagaagttcaacatggaccccgccaagggtatccagtatttcattgagcacaagctgctgacccctgacgtccaggacattgcacggttcctgtataaaggcgagggcctcaacaagacagccattggtacctacctgggggagagggatcccatcaacctgcaggtcctccaggccttcgtggactgccacgagttcgccaacctcaacctcgtccaggccctcagattccgagaaggagcatctgatctgggctttggagggtgagtaggagttcacaatacagagaaggaagaagccaccaccatccagtgttctctaactcccagctctttaagggagaggg

SEQ ID NO: 124618 - DNA, 633 bp, Homo sapiens
  Payload ID: 4478
  Gene Symbol: CYTH4
  Gene Name: cytohesin 4
  ENST ID: ENST00000402997
  CDS Start-End: 96-560
agtcaaggtgacgcatccttgccgggccagcccgaacagcagctgggtcggcaagcgacaggagcacgggtcatcttttccccagaggcgtcggaatggacctgtgccacccagagcccgcggagctgagcagcggggagacggaagagttacagaggatcaagtggcaccgaaagcagctcctggaggacatccagaagctgaaggatgagattgcagatgtgtttgcccaaatcgactgcttcgagagtgcggaggagagccggatggcccagaaggagaaggagctgtgtattgggcgcaagaagttcaacatggaccccgccaagggtatccagtatttcattgagcacaagctgctgacccctgacgtccaggacattgcacggttcctgtataaaggcgagggcctcaacaagacagccattggtacctacctgggggagagggatcccatcaacctgcaggtcctccaggccttcgtggactgccacgagttcgccaacctcaacctcgtccaggccctcagggttgtgaagactaaatgggaaagtgtttaaaactggtccacagtgagtgcttagtaagtcttgatgctgcttgaaaactcagattccgagaaggagcatctga

SEQ ID NO: 124619 - DNA, 652 bp, Homo sapiens
  Payload ID: 4478
  Gene Symbol: CYTH4
  Gene Name: cytohesin 4
  ENST ID: ENST00000457992
  CDS Start-End: 300-652
aagtgggagttggaagagagcttgtggggtggaacacagggggccctgctaggactgtccaagttgggcgctcctatggcatatatgtgaggaggctgccacgtgaatgcccatggtcccctggaaaatgttcgtcctcagtgaacatcgccctcggtgtctgtgcatgtggctgggcggggcaagcaggaaggagcctgttacagtcaaggtgacgcatccttgccgggccagcccgaacagcagctgggtcggcaagcgacaggagcacgggtcatcttttccccagaggcgtcggaatggacctgtgccacccagagcccgcggagctgagcagcggggagacggaagagttacagaggatcaagtggcaccgaaagcagctcctggaggacatccagaagctgaaggatgagattgcagatgtgtttgcccaaatcgactgcttcgagagtgcggaggagagccggatggcccagaaggagaaggagctgtgtattgggcgcaagaagttcaacatggaccccgccaagggtatccagtatttcattgagcacaagctgctgacccctgacgtccaggacattgcacggttcctgtataaaggcgagggcctcaacaagacagccattggtacctacctgggggagag

SEQ ID NO: 124620 - DNA, 569 bp, Homo sapiens
  Payload ID: 4478
  Gene Symbol: CYTH4
  Gene Name: cytohesin 4
  ENST ID: ENST00000446506
  CDS Start-End: 1-442
cacacacacttccggaagcctctccagcagggacagccaagccggggacagcgcctccagggcagggggccgcgtgaagacgtggaaacggcgctggttcatcctgaccgacaactgcctctactacttcgagttcaccactgacaaggagccacggggaattatacctcttgagaacctctcggtgcagaaggtggatgaccccaagaagccattctgcctggagctctacaaccctagctgccgaggccagaaaatcaaggcctgcaagaccgatggcgacggcagggtggtggagggcaagcacgaatcgtaccgcatctcagccaccagtgccgaggaacgtgaccagtggatcgagtccatccgagccagcatcacccgtgtccccttctacgacctggtctctactcggaagaagaagattgccagcaagcagtgagattcctggaggtggcactgggggctggtcaccctgagagtcccatcgcctgcagcacctggagacccacctcccaccccagtgcactcttttgggccacagacatcattgctgttccccgttacct

SEQ ID NO: 124621 - DNA, 2182 bp, Homo sapiens
  Payload ID: 4479
  Gene Symbol: CIAPIN1
  Gene Name: cytokine induced apoptosis inhibitor 1
  Uniprot ID: Q6FI81
  ENST ID: ENST00000394391
  CDS Start-End: 243-1181
ccagataccgccgccgccgccattttggaagcgggcacgtcgcccacggcgacgcgaccggtagctacgggaccacggccctaaggagggcggaagtcgtcgctccgtggagcctcctcctctcgcgagaggcgcaaggcgtggagtcgacggctggagagaagccgggagcgagcccaggcggcagtcttgattcccttttggccagcagtttttaggtctgtcagtactgcactgcaagaatggcagattttgggatctctgctggccagtttgtggcagtggtctgggataagtcatccccagtggaggctctgaaaggtctggtggataagcttcaagcgttaaccggcaatgagggccgcgtgtctgtggaaaacatcaagcagctgttgcaatctgcccacaaagaatccagctttgacattattttgtcaggtttagtcccaggaagcaccactctgcacagtgctgagattttggctgaaatcgcccggatccttcggcctggtggatgtctttttctgaaggagccagtagagacagctgtagataacaatagcaaagtgaagacagcatctaagctgtgttcagccctgactctttctggtcttgtggaagtgaaagagctgcagcgggagcccctaacccctgaggaagtacagtctgttcgagaacaccttggtcatgaaagtgacaacctgctgtttgttcagatcacaggcaaaaaaccaaactttgaagtgggttcttctaggcagcttaagctttccatcaccaagaagtcttctccttcagtgaaacctgctgtggaccctgctgctgccaagctgtggaccctctcagccaacgatatggaggacgacagcatggatctcattgactcagatgagctgctggatccagaagatttgaagaagccagatccagcttccctgcgggctgcttcttgtggggaagggaaaaagaggaaggcctgtaagaactgcacctgtggccttgccgaagaactggaaaaagagaagtcaagggaacagatgagctcccaacccaagtcagcttgtggaaactgctacctgggcgatgccttccgctgtgccagctgcccctaccttgggatgccagccttcaaacctggggaaaaggtgcttctgagtgatagcaatcttcatgatgcctaggaggttcctgacatgggacccatctgctcctccagccaactcctgtccctcacatcccaccatggtggctcctcccacctcctctggatttgttcactctgagatctgtttgcagagtgggtgcttagcagacagagtgaagctggctggggggcacagtggtgtgtagtgctgctgtgtatcaaaagaccaaggtattatgggacctggtttcagaatgggatgggtttcttcacctcatgttaagagaagggagtgtgtcctgaagaagcccttcttctgatgttaaaatgctgaccagaacgctcttgagcccaggcatcgttgagcattaacactctgtgacagagctgcagacccctgccttgagtctcatctcagcaatgctgccaccctcttgtctttcagagttgttagtttactccattctttgtgacacgagtcaagtggctcacaacctcctcagggcaccagaggactcactcactggttgctgtgatgatatccagtgtccctctgcccccttccatccccaaccacatttgactgtagcattgcatctgtgtcctgttgtcatttatgttaaccttcaggtattaaacttgctgcatatcttgacatatcttgagattctgcatgtcttgtaaagagaggggatgtgcatttgtgtgtgatgttggatagtcatccacgctcagtttggaccattggaggaacttagtgtcacgcacaaatggggctattcctacgcttagaatagggcttgtctgcccactttagaagagtccaggttggtgagcatttagagggaagcagggcagaactctgaacgacaatacgtctctctgagcagagacccctttgttcttgttatccacccatatggacttggaatcaatcttgccaaatatttggagagattgtgtggatttaagagacctggatttttatattttaccagtaaataaaagttttcattgatatctgtccttgaaacttga

SEQ ID NO: 124622 - DNA, 1137 bp, Homo sapiens
  Payload ID: 4479
  Gene Symbol: CIAPIN1
  Gene Name: cytokine induced apoptosis inhibitor 1
  ENST ID: ENST00000568940
  CDS Start-End: 83-883
gaagccgggagcgagcccaggcggcagtcttgattcccttttggccagcagtttttaggtctgtcagtactgcactgcaagaatggcagattttgggatctctgctggccagtttgtggcagtggtctgggataagtcatccccagtggaggctctgaaaggtctggtggataagcttcaagcgttaaccggcaatgagggccgcgtgtctgtggaaaacatcaagcagctgttgcaatctgcccacaaagaatccagctttgacattattttgtcaggtttagtcccaggaagcaccactctgcacagtgctgagattttggctgaaatcgcccggatccttcggcctggtggatgtctttttctgaaggagccagtagagacagctgtagataacaatagcaaagtgaagacagcatctaagctgtgttcagccctgactctttctggtcttgtggaagtgaaagagctgcagcgggagcccctaacccctgaggaagtacagtctgttcgagaacaccttggtcatgaaagtgacaacctgctgtttgttcagatcacaggcaaaaaaccaaactttgaagtgggttcttctaggcagcttaagctttccatcaccaagaagtcttctccttcagtgaaacctgctgtggaccctgctgctgccaagctgtggaccctctcagccaacgatatggaggacgacagcatgcacctgtggccttgccgaagaactggaaaaagagaagtcaagggaacagatgagctcccaacccaagtcagcttgtggaaactgctacctgggcgatgccttccgctgtgccagctgcccctaccttgggatgccagccttcaaacctggggaaaaggtgcttctgagtgatagcaatcttcatgatgcctaggaggttcctgacatgggacccatctgctcctccagccaactcctgtccctcacatcccaccatggtggctcctcccacctcctctggatttgttcactctgagatctgtttgcagagtgggtgcttagcagacagagtgaagctggctggggggcacagtggtgtgtagtgctgctgtgtatcaaaagaccaaggtattatgggacctggtttcagaatgggatgggtttct

SEQ ID NO: 124623 - DNA, 1814 bp, Homo sapiens
  Payload ID: 4479
  Gene Symbol: CIAPIN1
  Gene Name: cytokine induced apoptosis inhibitor 1
  ENST ID: ENST00000565961
  CDS Start-End: 121-840
tcgcgagaggcgcaaggcgtggagtcgacggctggagagaagccgggagcgagcccaggcggcagtcttgattcccttttggccagcagtttttaggtctgtcagtactgcactgcaagaatggcagattttgggatctctgctggccagtttgtggcagtggtctgggataagtcatccccagtggaggctctgaaaggtctggtggataagcttcaagcgttaaccggcaatgagggccgcgtgtctgtggaaaacatcaagcagctgttgcaatctgcccacaaagaatccagctttgacattattttgtcaggtttagtcccaggaagcaccactctgcacagtgctgagattttggctgaaatcgcccggatccttcggcctggtggatgtctttttctgaaggagccagtagagacagctctgcagcgggagcccctaacccctgaggaagtacagtctgttcgagaacaccttggtcatgaaagtgacaacctgctgtttgttcagatcacaggcaaaaaaccaaactttgaagtgggttcttctaggcagcttaagctttccatcaccaagaagtcttctccttcagtgaaacctgctgtggaccctgctgctgccaagctgtggaccctctcagccaacgatatggaggacgacagcatgcacctgtggccttgccgaagaactggaaaaagagaagtcaagggaacagatgagctcccaacccaagtcagcttgtggaaactgctacctgggcgatgccttccgctgtgccagctgcccctaccttgggatgccagccttcaaacctggggaaaaggtgcttctgagtgatagcaatcttcatgatgcctaggaggttcctgacatgggacccatctgctcctccagccaactcctgtccctcacatcccaccatggtggctcctcccacctcctctggatttgttcactctgagatctgtttgcagagtgggtgcttagcagacagagtgaagctggctggggggcacagtggtgtgtagtgctgctgtgtatcaaaagaccaaggtattatgggacctggtttcagaatgggatgggtttcttcacctcatgttaagagaagggagtgtgtcctgaagaagcccttcttctgatgttaaaatgctgaccagaacgctcttgagcccaggcatcgttgagcattaacactctgtgacagagctgcagacccctgccttgagtctcatctcagcaatgctgccaccctcttgtctttcagagttgttagtttactccattctttgtgacacgagtcaagtggctcacaacctcctcagggcaccagaggactcactcactggttgctgtgatgatatccagtgtccctctgcccccttccatccccaaccacatttgactgtagcattgcatctgtgtcctgttgtcatttatgttaaccttcaggtattaaacttgctgcatatcttgacatatcttgagattctgcatgtcttgtaaagagaggggatgtgcatttgtgtgtgatgttggatagtcatccacgctcagtttggaccattggaggaacttagtgtcacgcacaaatggggctattcctacgcttagaatagggcttgtctgcccactttagaagagtccaggttggtgagcatttagagggaagcagggcagaactctgaacgacaatacgtctctctgagcagagacccctttgttcttgttatccacccatatggacttggaatcaatcttgccaaatatttggagagattgtgtggatttaagagacctggatttttata

SEQ ID NO: 124624 - DNA, 505 bp, Homo sapiens
  Payload ID: 4479
  Gene Symbol: CIAPIN1
  Gene Name: cytokine induced apoptosis inhibitor 1
  ENST ID: ENST00000563341
  CDS Start-End: 119-505
ggctggagagaagccgggagcgagcccaggcggcagattaaattgcactttgtctctgcccagtcttgattcccttttggccagcagtttttaggtctgtcagtactgcactgcaagaatggcagattttgggatctctgctggccagtttgtggcagtggtctgggataagtcatccccagtggaggctctgaaaggtctggtggataagcttcaagcgttaaccggcaatgagggccgcgtgtctgtggaaaacatcaagcagctgttgcaatctgcccacaaagaatccagctttgacattattttgtcaggtttagtcccaggaagcaccactctgcacagtgctgagattttggctgaaatcgcccggatccttcggcctggtggatgtctttttctgaaggagccagtagagacagctgtagataacaatagcaaagtgaagacagcatctaagctgtgttcagccctgactctttctggtcttgtggaagtgaaagag

SEQ ID NO: 124625 - DNA, 2016 bp, Homo sapiens
  Payload ID: 4479
  Gene Symbol: CIAPIN1
  Gene Name: cytokine induced apoptosis inhibitor 1
  Uniprot ID: Q6FI81
  ENST ID: ENST00000567518
  CDS Start-End: 134-1033
gagcctcctcctctcgcgagaggcgcaaggcgtggagtcgacggctggagagaagccgggagcgagcccaggcggcagtcttgattcccttttggccagcagtttttaggtctgtcagtactgcactgcaagaatggcagattttgggatctctgctggccagtttgtggcagtggtctgggataagtcatccccagtggaggctctgaaaggtctggtggataagcttcaagcgttaaccggcaatgagggccgcgtgtctgtggaaaacatcaagcagctgttgcaatgtttagtcccaggaagcaccactctgcacagtgctgagattttggctgaaatcgcccggatccttcggcctggtggatgtctttttctgaaggagccagtagagacagctgtagataacaatagcaaagtgaagacagcatctaagctgtgttcagccctgactctttctggtcttgtggaagtgaaagagctgcagcgggagcccctaacccctgaggaagtacagtctgttcgagaacaccttggtcatgaaagtgacaacctgctgtttgttcagatcacaggcaaaaaaccaaactttgaagtgggttcttctaggcagcttaagctttccatcaccaagaagtcttctccttcagtgaaacctgctgtggaccctgctgctgccaagctgtggaccctctcagccaacgatatggaggacgacagcatggatctcattgactcagatgagctgctggatccagaagatttgaagaagccagatccagcttccctgcgggctgcttcttgtggggaagggaaaaagaggaaggcctgtaagaactgcacctgtggccttgccgaagaactggaaaaagagaagtcaagggaacagatgagctcccaacccaagtcagcttgtggaaactgctacctgggcgatgccttccgctgtgccagctgcccctaccttgggatgccagccttcaaacctggggaaaaggtgcttctgagtgatagcaatcttcatgatgcctaggaggttcctgacatgggacccatctgctcctccagccaactcctgtccctcacatcccaccatggtggctcctcccacctcctctggatttgttcactctgagatctgtttgcagagtgggtgcttagcagacagagtgaagctggctggggggcacagtggtgtgtagtgctgctgtgtatcaaaagaccaaggtattatgggacctggtttcagaatgggatgggtttcttcacctcatgttaagagaagggagtgtgtcctgaagaagcccttcttctgatgttaaaatgctgaccagaacgctcttgagcccaggcatcgttgagcattaacactctgtgacagagctgcagacccctgccttgagtctcatctcagcaatgctgccaccctcttgtctttcagagttgttagtttactccattctttgtgacacgagtcaagtggctcacaacctcctcagggcaccagaggactcactcactggttgctgtgatgatatccagtgtccctctgcccccttccatccccaaccacatttgactgtagcattgcatctgtgtcctgttgtcatttatgttaaccttcaggtattaaacttgctgcatatcttgacatatcttgagattctgcatgtcttgtaaagagaggggatgtgcatttgtgtgtgatgttggatagtcatccacgctcagtttggaccattggaggaacttagtgtcacgcacaaatggggctattcctacgcttagaatagggcttgtctgcccactttagaagagtccaggttggtgagcatttagagggaagcagggcagaactctgaacgacaatacgtctctctgagcagagacccctttgttcttgttatccacccatatggacttggaatcaatcttgccaaatatttggagagattgtgtggatttaagagacctggatttttatattttaccagtaaataaaagttttcattgata

SEQ ID NO: 124626 - DNA, 1559 bp, Homo sapiens
  Payload ID: 4479
  Gene Symbol: CIAPIN1
  Gene Name: cytokine induced apoptosis inhibitor 1
  ENST ID: ENST00000569370
  CDS Start-End: 121-921
tcgcgagaggcgcaaggcgtggagtcgacggctggagagaagccgggagcgagcccaggcggcagtcttgattcccttttggccagcagtttttaggtctgtcagtactgcactgcaagaatggcagattttgggatctctgctggccagtttgtggcagtggtctgggataagtcatccccagtggaggctctgaaaggtctggtggataagcttcaagcgttaaccggcaatgagggccgcgtgtctgtggaaaacatcaagcagctgttgcaatctgcccacaaagaatccagctttgacattattttgtcaggtttagtcccaggaagcaccactctgcacagtgctgagattttggctgaaatcgcccggatccttcggcctggtggatgtctttttctgaaggagccagtagagacagctgtagataacaatagcaaagtgaagacagcatctaagctgtgttcagccctgactctttctggtcttgtggaagtgaaagagctgcagcgggagcccctaacccctgaggaagtacagtctgttcgagaacaccttggtcatgaaagtgacaacctgctgtttgttcagatcacaggcaaaaaaccaaactttgaagtgggttcttctaggcagcttaagctttccatcaccaagaagtcttctccttcagtgaaacctgctgtggaccctgctgctgccaagctgtggaccctctcagccaacgatatggaggacgacagcatgcacctgtggccttgccgaagaactggaaaaagagaagtcaagggaacagatgagctcccaacccaagtcagcttgtggaaactgctacctgggcgatgccttccgctgtgccagctgcccctaccttgggatgccagccttcaaacctggggaaaaggtgcttctgagtgatagcaatcttcatgatgcctaggaggttcctgacatgggacccatctgctcctccagccaactcctgtccctcacatcccaccatggtggctcctcccacctcctctggatttgttcactctgagatctgtttgcagagtgggtgcttagcagacagagtgaagctggctggggggcacagtggtgtgtagtgctgctgtgtatcaaaagaccaaggtattatgggacctggtttcagaatgggatgggtttcttcacctcatgttaagagaagggagtgtgtcctgaagaagcccttcttctgatgttaaaatgctgaccagaacgctcttgagcccaggcatcgttgagcattaacactctgtgacagagctgcagacccctgccttgagtctcatctcagcaatgctgccaccctcttgtctttcagagttgttagtttactccattctttgtgacacgagtcaagtggctcacaacctcctcagggcaccagaggactcactcactggttgctgtgatgatatccagtgtccctctgcccccttccatccccaaccacatttgactgtagcattgcatctgtgtcctgttgtcatttatgttaaccttcaggtattaaacttgctgcatatctt

SEQ ID NO: 124627 - DNA, 641 bp, Homo sapiens
  Payload ID: 4479
  Gene Symbol: CIAPIN1
  Gene Name: cytokine induced apoptosis inhibitor 1
  ENST ID: ENST00000565786
  CDS Start-End: 496-641
ggagcctcctcctctcgcgagaggcgcaaggcgtggagtcgacggctggagagaagccgggagcgagcccaggcggcaggtttagtcccaggaagcaccactctgcacagtgctgagattttggctgaaatcgcccggatccttcggcctggtggatgtctttttctgaaggagccagtagagacagctgtagataacaatagcaaagtgaagacagcatctaagctgtgttcagccctgactctttctggtcttgtggaagtgaaagagctgcagcgggagcccctaacccctgaggaagtacagtctgttcgagaacaccttggtcatgaaagtgacaacctgctgtttgttcagatcacaggcaaaaaaccaaactttgaagtgggttcttctaggcagcttaagctttccatcaccaagaagtcttctccttcagtgaaacctgctgtggaccctgctgctgccaagctgtggaccctctcagccaacgatatggaggacgacagcatggatctcattgactcagatgagctgctggatccagaagatttgaagaagccagatccagcttccctgcgggctgcttcttgtggggaagggaaaaagaggaaggcctgtaagaactgcacctgtggcct

SEQ ID NO: 124628 - DNA, 328 bp, Homo sapiens
  Payload ID: 4479
  Gene Symbol: CIAPIN1
  Gene Name: cytokine induced apoptosis inhibitor 1
  ENST ID: ENST00000567751
  CDS Start-End: 113-328
agccgggagcgagcccaggcggcagtcttgattcccttttggccagcagtttttagtgaaacctgctgtggaccctgctgctgccaagctgtggaccctctcagccaacgatatggaggacgacagcatggatctcattgactcagatgagctgctggatccagaagatttgaagaagccagatccagcttccctgcgggctgcttcttgtggggaagggaaaaagaggaaggcctgtaagaactgcacctgtggccttgccgaagaactggaaaaagagaagtcaagggaacagatgagctcccaacccaagtcagcttgtggaaac

SEQ ID NO: 124629 - DNA, 994 bp, Homo sapiens
  Payload ID: 4479
  Gene Symbol: CIAPIN1
  Gene Name: cytokine induced apoptosis inhibitor 1
  ENST ID: ENST00000570000
  CDS Start-End: 59-625
cagtcttgattcccttttggccagcagtttttaggtctgtcagtactgcactgcaagaatggcagattttgggatctctgctggccagtttgtggcagtggtctgggataagtcatccccagtggaggctctgaaaggtctggtggataagcttcaagcgttaaccggcaatgagggccgcgtgtctgtggaaaacatcaagcagctgttgcaatctgcccacaaagaatccagctttgacattattttgtcaggtttagtcccaggaagcaccactctgcacagtgctgagattttggctgaaatcgcccggatccttcggcctggtggatgtctttttctgaaggagccagtagagacagctgtagataacaatagcaaagtgaagacagcatctaagctgtgttcagccctgactctttctggtcttgtggaagtgaaagagctgcagcgggagcccctaacccctgaggaagtacagtctgttcgagaacaccttggtcatgaaagtgacaacctgctgtttgttcagatcacaggcaaaaaaccaaactttgaagtgggttcttctaggcagcttaagctttccatcaccaagaagtcttctccttcaggatctcattgactcagatgagctgctggatccagaagatttgaagaagccagatccagcttccctgcgggctgcttcttgtggggaagggaaaaagaggaaggcctgtaagaactgcacctgtggccttgccgaagaactggaaaaagagaagtcaagggaacagatgagctcccaacccaagtcagcttgtggaaactgctacctgggcgatgccttccgctgtgccagctgcccctaccttgggatgccagccttcaaacctggggaaaaggtgcttctgagtgatagcaatcttcatgatgcctaggaggttcctgacatgggacccatctgctcctccagccaactcctgtccctcacatcccaccatggtggctc

SEQ ID NO: 124630 - DNA, 896 bp, Homo sapiens
  Payload ID: 4479
  Gene Symbol: CIAPIN1
  Gene Name: cytokine induced apoptosis inhibitor 1
  ENST ID: ENST00000569979
  CDS Start-End: 48-788
cccttttggccagcagtttttaggtctgtcagtactgcactgcaagaatggcagattttgggatctctgctggccagtttgtggcagtggtctgggataagtcatccccagtggaggctctgaaaggtctggtggataagcttcaagcgttaaccggcaatgagggccgcgtgtctgtggaaaacatcaagcagctgttgcaatctgcccacaaagaatccagctttgacattattttgtcaggtttagtcccaggaagcaccactctgcacagtgctgagattttggctgaaatcgcccggatccttcggcctggtggatgtctttttctgaaggagccagtagagacagctgtagataacaatagcaaagtgaagacagcatctaagctgtgttcagccctgactctttctggtcttgtggaagtgaaagagctgcagcgggagcccctaacccctgaggaagtacagtctgttcgagaacaccttggtcatgaaagtgacaacctgctgtttgttcagatcacaggcaaaaaaccaaactttgaagtgggttcttctaggcagcttaagctttccatcaccaagaagtcttctccttcagtgaaacctgctgtggaccctgctgctgccaagctgtggaccctctcagccaacgatatggaggacgacagcatgtgctacctgggcgatgccttccgctgtgccagctgcccctaccttgggatgccagccttcaaacctggggaaaaggtgcttctgagtgatagcaatcttcatgatgcctaggaggttcctgacatgggacccatctgctcctccagccaactcctgtccctcacatcccaccatggtggctcctcccacctcctctggatttgttcactctgagatctg

SEQ ID NO: 124631 - DNA, 2043 bp, Homo sapiens
  Payload ID: 4480
  Gene Symbol: CISH
  Gene Name: cytokine inducible SH2-containing protein
  Uniprot ID: Q9NSE2
  ENST ID: ENST00000348721
  CDS Start-End: 182-958
cccgctcgtctggcccgcccccctcgccctcgcaggcggtccgcgccactgcctctcagtccctgtcctgcgcccgcgcgccccgggagcctacccagcacgcgctccgcgcccactggttccctccagccgccgccgtccagccgagtccccactccggagtcgccgctgccgcggggacatggtcctctgcgttcagggacctcgtcctttgctggctgtggagcggactgggcagcggcccctgtgggccccgtccctggaactgcccaagccagtcatgcagcccttgcctgctggggccttcctcgaggaggtggcagagggtaccccagcccagacagagagtgagccaaaggtgctggacccagaggaggatctgctgtgcatagccaagaccttctcctaccttcgggaatctggctggtattggggttccattacggccagcgaggcccgacaacacctgcagaagatgccagaaggcacgttcttagtacgtgacagcacgcaccccagctacctgttcacgctgtcagtgaaaaccactcgtggccccaccaatgtacgcattgagtatgccgactccagcttccgtctggactccaactgcttgtccaggccacgcatcctggcctttccggatgtggtcagccttgtgcagcactatgtggcctcctgcactgctgatacccgaagcgacagccccgatcctgctcccaccccggccctgcctatgcctaaggaggatgcgcctagtgacccagcactgcctgctcctccaccagccactgctgtacacctaaaactggtgcagccctttgtacgcagaagcagtgcccgcagcctgcaacacctgtgccgccttgtcatcaaccgtctggtggccgacgtggactgcctgccactgccccggcgcatggccgactacctccgacagtaccccttccagctctgactgtacggggcaatctgcccaccctcacccagtcgcaccctggaggggacatcagccccagctggacttgggcccccactgtccctcctccaggcatcctggtgcctgcatacctctggcagctggcccaggaagagccagcaagagcaaggcatgggagaggggaggtgtcacacaacttggaggtaaatgcccccaggccgcatgtggcttcattatactgagccatgtgtcagaggatggggagacaggcaggaccttgtctcacctgtgggctgggcccagacctccactcgcttgcctgccctggccacctgaactgtatgggcactctcagccctggtttttcaatccccagggtcgggtaggacccctactggcagccagcctctgtttctgggaggatgacatgcagaggaactgagatcgacagtgactagtgaccccttgttgaggggtaagccaggctaggggactgcacaattatacactatttatttatttattctccttggggttggtgtcaggggcgagccaaccccacctctatgccctgagccctggtagtccagagaccccaactctgccctggcttctctggttcttccctgtggaaagcccatcctgagacatcttgctggaaccaaggcaatcctggatgtcctggtactgacccacccgtctgtgaatgtgtccactctcttctgcccccagccatatttggggaggatggacaactacaataggtaagaaaatgcagccggagcctcagtccccagcagagcctgtgtctcaccccctcacaggacagagctgtatctgcatagagctggtctcactgtggcgcaggccccggggggagtgcctgtgctgtcaggaagagggggtgctggtttgagggccgccactgcagttctgctaggtctgcttcctgcccaggaaggtgcctgcacatgagaggagagaaatacacgtctgataagacttcatgaaataataattatagcaaagaacagtttggtggtcttttctcttccactgatttttctgtaatgacattatacctttattacctctttatttta

SEQ ID NO: 124632 - DNA, 2167 bp, Homo sapiens
  Payload ID: 4480
  Gene Symbol: CISH
  Gene Name: cytokine inducible SH2-containing protein
  Uniprot ID: Q9NSE2
  ENST ID: ENST00000443053
  CDS Start-End: 229-1056
tccctgtcctgcgcccgcgcgccccgggagcctacccagcacgcgctccgcgcccactggttccctccagccgccgccgtccagccgagtccccactccggagtcgccgctgccgcggggacatggtcctctgcgttcaggggtgagcacccccttgtaagctcagggctactgttgggtgtcagggaacaaagttttagactgctgcgctccaaagcgggcacacacatgtacctagaacacaccagccactgtccccaccatgatgatgacacagccatggacacacccctgcccagacctcgtcctttgctggctgtggagcggactgggcagcggcccctgtgggccccgtccctggaactgcccaagccagtcatgcagcccttgcctgctggggccttcctcgaggaggtggcagagggtaccccagcccagacagagagtgagccaaaggtgctggacccagaggaggatctgctgtgcatagccaagaccttctcctaccttcgggaatctggctggtattggggttccattacggccagcgaggcccgacaacacctgcagaagatgccagaaggcacgttcttagtacgtgacagcacgcaccccagctacctgttcacgctgtcagtgaaaaccactcgtggccccaccaatgtacgcattgagtatgccgactccagcttccgtctggactccaactgcttgtccaggccacgcatcctggcctttccggatgtggtcagccttgtgcagcactatgtggcctcctgcactgctgatacccgaagcgacagccccgatcctgctcccaccccggccctgcctatgcctaaggaggatgcgcctagtgacccagcactgcctgctcctccaccagccactgctgtacacctaaaactggtgcagccctttgtacgcagaagcagtgcccgcagcctgcaacacctgtgccgccttgtcatcaaccgtctggtggccgacgtggactgcctgccactgccccggcgcatggccgactacctccgacagtaccccttccagctctgactgtacggggcaatctgcccaccctcacccagtcgcaccctggaggggacatcagccccagctggacttgggcccccactgtccctcctccaggcatcctggtgcctgcatacctctggcagctggcccaggaagagccagcaagagcaaggcatgggagaggggaggtgtcacacaacttggaggtaaatgcccccaggccgcatgtggcttcattatactgagccatgtgtcagaggatggggagacaggcaggaccttgtctcacctgtgggctgggcccagacctccactcgcttgcctgccctggccacctgaactgtatgggcactctcagccctggtttttcaatccccagggtcgggtaggacccctactggcagccagcctctgtttctgggaggatgacatgcagaggaactgagatcgacagtgactagtgaccccttgttgaggggtaagccaggctaggggactgcacaattatacactatttatttatttattctccttggggttggtgtcaggggcgagccaaccccacctctatgccctgagccctggtagtccagagaccccaactctgccctggcttctctggttcttccctgtggaaagcccatcctgagacatcttgctggaaccaaggcaatcctggatgtcctggtactgacccacccgtctgtgaatgtgtccactctcttctgcccccagccatatttggggaggatggacaactacaataggtaagaaaatgcagccggagcctcagtccccagcagagcctgtgtctcaccccctcacaggacagagctgtatctgcatagagctggtctcactgtggcgcaggccccggggggagtgcctgtgctgtcaggaagagggggtgctggtttgagggccgccactgcagttctgctaggtctgcttcctgcccaggaaggtgcctgcacatgagaggagagaaatacacgtctgataagacttcatgaaataataattatagcaaagaacagtttggtggtcttttctcttccactgatttttctgtaatgacattatacctttattacctctttattttattacctctataataaaatgatacctt

SEQ ID NO: 124633 - DNA, 1792 bp, Homo sapiens
  Payload ID: 4481
  Gene Symbol: CRLF1
  Gene Name: cytokine receptor-like factor 1
  Uniprot ID: O75462
  ENST ID: ENST00000392386
  CDS Start-End: 195-1463
ggggccgggcggggccagcggcgcattagcgccttgtcaattcggctgctcagacttgctccggcctccgcgtccgcgcccagcgacgtgcgggcggcctggcccgcgccctcccgcgcccggcctgcgtcccgcgccctgcgccaccgccgccgagccgcagcccgccgcgcgcccccggcagcgccggccccatgcccgccggccgccggggccccgccgcccaatccgcgcggcggccgccgccgttgctgcccctgctgctgctgctctgcgtcctcggggcgccgcgagccggatcaggagcccacacagctgtgatcagtccccaggatcccacgcttctcatcggctcctccctgctggccacctgctcagtgcacggagacccaccaggagccaccgccgagggcctctactggaccctcaacgggcgccgcctgccccctgagctctcccgtgtactcaacgcctccaccttggctctggccctggccaacctcaatgggtccaggcagcggtcgggggacaacctcgtgtgccacgcccgtgacggcagcatcctggctggctcctgcctctatgttggcctgcccccagagaaacccgtcaacatcagctgctggtccaagaacatgaaggacttgacctgccgctggacgccaggggcccacggggagaccttcctccacaccaactactccctcaagtacaagcttaggtggtatggccaggacaacacatgtgaggagtaccacacagtggggccccactcctgccacatccccaaggacctggctctctttacgccctatgagatctgggtggaggccaccaaccgcctgggctctgcccgctccgatgtactcacgctggatatcctggatgtggtgaccacggaccccccgcccgacgtgcacgtgagccgcgtcgggggcctggaggaccagctgagcgtgcgctgggtgtcgccacccgccctcaaggatttcctctttcaagccaaataccagatccgctaccgagtggaggacagtgtggactggaaggtggtggacgatgtgagcaaccagacctcctgccgcctggccggcctgaaacccggcaccgtgtacttcgtgcaagtgcgctgcaacccctttggcatctatggctccaagaaagccgggatctggagtgagtggagccaccccacagccgcctccactccccgcagtgagcgcccgggcccgggcggcggggcgtgcgaaccgcggggcggagagccgagctcggggccggtgcggcgcgagctcaagcagttcctgggctggctcaagaagcacgcgtactgctccaacctcagcttccgcctctacgaccagtggcgagcctggatgcagaagtcgcacaagacccgcaaccaggacgaggggatcctgccctcgggcagacggggcacggcgagaggtcctgccagataagctgtaggggctcaggccaccctccctgccacgtggagacgcagaggccgaacccaaactggggccacctctgtaccctcacttcagggcacctgagccaccctcagcaggagctggggtggcccctgagctccaacggccataacagctctgactcccacgtgaggccacctttgggtgcaccccagtgggtgtgtgtgtgtgtgtgagggttggttgagttgcctagaacccctgccagggctgggggtgagaaggggagtcattactccccattacctagggcccctccaaaagagtccttttaaataaatgagctatttaggtgc

SEQ ID NO: 124634 - DNA, 520 bp, Homo sapiens
  Payload ID: 4481
  Gene Symbol: CRLF1
  Gene Name: cytokine receptor-like factor 1
  ENST ID: ENST00000597131
  CDS Start-End: 1-520
gccaggacaacacatgtgaggagtaccacacagtggggccccactcctgccacatccccaaggacctggctctctttacgccctatgagatctgggtggaggccaccaaccgcctgggctctgcccgctccgatgtactcacgctggatatcctggatgtggtgaccacggaccccccgcccgacgtgcacgtgagccgcgtcgggggcctggaggaccagctgagcgtgcgctgggtgtcgccacccgccctcaaggatttcctctttcaagccaaataccagatccgctaccgagtggaggacagtgtggactggaaggtggtggacgatgtgagcaaccagacctcctgccgcctggccggcctgaaacccggcaccgtgtacttcgtgcaagtgcgctgcaacccctttggcatctatggctccaagaaagccgggatctggaagcgcccgggcccgggcggcggggcgtgcgaaccgcggggcggagagccgagctcggggccggtgcggcgcga

SEQ ID NO: 124635 - DNA, 1545 bp, Homo sapiens
  Payload ID: 4482
  Gene Symbol: CRLF2
  Gene Name: cytokine receptor-like factor 2
  Uniprot ID: Q9HC73
  ENST ID: ENST00000381566
  CDS Start-End: 4-1119
ggcatggggcggctggttctgctgtggggagctgccgtctttctgctgggaggctggatggctttggggcaaggaggagcagcagaaggagtacagattcagatcatctacttcaatttagaaaccgtgcaggtgacatggaatgccagcaaatactccaggaccaacctgactttccactacagattcaacggtgatgaggcctatgaccagtgcaccaactaccttctccaggaaggtcacacttcggggtgcctcctagacgcagagcagcgagacgacattctctatttctccatcaggaatgggacgcaccccgttttcaccgcaagtcgctggatggtttattacctgaaacccagttccccgaagcacgtgagattttcgtggcatcaggatgcagtgacggtgacgtgttctgacctgtcctacggggatctcctctatgaggttcagtaccggagccccttcgacaccgagtggcagtccaaacaggaaaatacctgcaacgtcaccatagaaggcttggatgccgagaagtgttactctttctgggtcagggtgaaggctatggaggatgtatatgggccagacacatacccaagcgactggtcagaggtgacatgctggcagagaggcgagattcgggatgcctgtgcagagacaccaacgcctcccaaaccaaagctgtccaaatttattttaatttccagcctggccatccttctgatggtgtctctcctccttctgtctttatggaaattatggagagtgaagaagtttctcattcccagcgtgccagacccgaaatccatcttccccgggctctttgagatacaccaagggaacttccaggagtggatcacagacacccagaacgtggcccacctccacaagatggcaggtgcagagcaagaaagtggccccgaggagcccctggtagtccagttggccaagactgaagccgagtctcccaggatgctggacccacagaccgaggagaaagaggcctctgggggatccctccagcttccccaccagcccctccaaggcggtgatgtggtcacaatcgggggcttcacctttgtgatgaatgaccgctcctacgtggcgttgtgatggacacaccactgtcaaagtcaacgtcaggatccacgttgacatttaaagacagaggggactgtcccggggactccacaccaccatggatgggaagtctccacgccaatgatggtaggactaggagactctgaagacccagcctcaccgcctaatgcggccactgccctgctaactttcccccacatgagtctctgtgttcaaaggcttgatggcagatgggagccaattgctccaggagatttactcccagttccttttcgtgcctgaacgttgtcacataaaccccaaggcagcacgtccaaaatgctgtaaaaccatcttcccactctgtgagtccccagttccgtccatgtaccattcccatagcattggattctcggaggattttttgtctgtttgagactccaaaccacctctacccct

SEQ ID NO: 124636 - DNA, 1013 bp, Homo sapiens
  Payload ID: 4482
  Gene Symbol: CRLF2
  Gene Name: cytokine receptor-like factor 2
  Uniprot ID: Q9HC73
  ENST ID: ENST00000381567
  CDS Start-End: 234-1013
atggggcggctggttctgctgtggggagctgccgtctttctgctgggaggctggatggctttggggcaaggaggagcagattcaacggtgatgaggcctatgaccagtgcaccaactaccttctccaggaaggtcacacttcggggtgcctcctagacgcagagcagcgagacgacattctctatttctccatcaggaatgggacgcaccccgttttcaccgcaagtcgctggatggtttattacctgaaacccagttccccgaagcacgtgagattttcgtggcatcaggatgcagtgacggtgacgtgttctgacctgtcctacggggatctcctctatgaggttcagtaccggagccccttcgacaccgagtggcagtccaaacaggaaaatacctgcaacgtcaccatagaaggcttggatgccgagaagtgttactctttctgggtcagggtgaaggctatggaggatgtatatgggccagacacatacccaagcgactggtcagaggtgacatgctggcagagaggcgagattcgggatgcctgtgcagagacaccaacgcctcccaaaccaaagctgtccaaatttattttaatttccagcctggccatccttctgatggtgtctctcctccttctgtctttatggaaattatggagagtgaagaagtttctcattcccagcgtgccagacccgaaatccatcttccccgggctctttgagatacaccaagggaacttccaggagtggatcacagacacccagaacgtggcccacctccacaagatggcaggtgcagagcaagaaagtggccccgaggagcccctggtagtccagttggccaagactgaagccgagtctcccaggatgctggacccacagaccgaggagaaagaggcctctgggggatccctccagcttccccaccagcccctccaaggcggtgatgtggtcacaatcgggggcttcacctttgtgatgaatgaccgctcctacgtggcgttgtga

SEQ ID NO: 124637 - DNA, 1639 bp, Homo sapiens
  Payload ID: 4482
  Gene Symbol: CRLF2
  Gene Name: cytokine receptor-like factor 2
  Uniprot ID: Q9HC73
  ENST ID: ENST00000400841
  CDS Start-End: 117-1232
tttccctagtttcctttctgactttttaaaatcgatggtgacctctgcttatgagtcatgagtgatctgttcgttgtaggtccctgaggacctcactctccactcctgtttcaggcatggggcggctggttctgctgtggggagctgccgtctttctgctgggaggctggatggctttggggcaaggaggagcagcagaaggagtacagattcagatcatctacttcaatttagaaaccgtgcaggtgacatggaatgccagcaaatactccaggaccaacctgactttccactacagattcaacggtgatgaggcctatgaccagtgcaccaactaccttctccaggaaggtcacacttcggggtgcctcctagacgcagagcagcgagacgacattctctatttctccatcaggaatgggacgcaccccgttttcaccgcaagtcgctggatggtttattacctgaaacccagttccccgaagcacgtgagattttcgtggcatcaggatgcagtgacggtgacgtgttctgacctgtcctacggggatctcctctatgaggttcagtaccggagccccttcgacaccgagtggcagtccaaacaggaaaatacctgcaacgtcaccatagaaggcttggatgccgagaagtgttactctttctgggtcagggtgaaggctatggaggatgtatatgggccagacacatacccaagcgactggtcagaggtgacatgctggcagagaggcgagattcgggatgcctgtgcagagacaccaacgcctcccaaaccaaagctgtccaaatttattttaatttccagcctggccatccttctgatggtgtctctcctccttctgtctttatggaaattatggagagtgaagaagtttctcattcccagcgtgccagacccgaaatccatcttccccgggctctttgagatacaccaagggaacttccaggagtggatcacagacacccagaacgtggcccacctccacaagatggcaggtgcagagcaagaaagtggccccgaggagcccctggtagtccagttggccaagactgaagccgagtctcccaggatgctggacccacagaccgaggagaaagaggcctctgggggatccctccagcttccccaccagcccctccaaggcggtgatgtggtcacaatcgggggcttcacctttgtgatgaatgaccgctcctacgtggcgttgtgatggacacaccactgtcaaagtcaacgtcaggatccacgttgacatttaaagacagaggggactgtcccggggactccacaccaccatggatgggaagtctccacgccaatgatggtaggactaggagactctgaagacccagcctcaccgcctaatgcggccactgccctgctaactttcccccacatgagtctctgtgttcaaaggcttgatggcagatgggagccaattgctccaggagatttactcccagttccttttcgtgcctgaacgttgtcacataaaccccaaggcagcacgtccaaaatgctgtaaaaccatcttcccactctgtgagtccccagttccgtccatgtaccattcccatagcattggattctcggaggattttttgtctgttttgagac

SEQ ID NO: 124638 - DNA, 1789 bp, Homo sapiens
  Payload ID: 4482
  Gene Symbol: CRLF2
  Gene Name: cytokine receptor-like factor 2
  ENST ID: ENST00000467626
  CDS Start-End: 90-788
aaaatcgatggtgacctctgcttatgagtcatgagtgatctgttcgttgtaggtccctgaggacctcactctccactcctgtttcaggcatggggcggctggttctgctgtggggagctgccgtctttctgctgggaggctggatggctttggggcaaggaggagcagaaggagtacagattcagatcatctacttcaatttagaaaccgtgcaggtgacatggaatgccagcaaatactccaggaccaacctgactttccactacagattcaacggtgatgaggcctatgaccagtgcaccaactaccttctccaggaaggtcacacttcggggtgcctcctagacgcagagcagcgagacgacattctctatttctccatcaggaatgggacgcaccccgttttcaccgcaagtcgctggatggtttattacctgaaacccagttccccgaagcacgtgagattttcgtggcatcaggatgcagtgacggtgacgtgttctgacctgtcctacggggatctcctctatgaggttcagtaccggagccccttcgacaccgagtggcagacacagtcccgctctgtcacccaggctggagtgcagtggtgcgatctctgcttgctacaaccttcgcctcccaggttcaagcgattctcctgcctcagcctcccaagtagctgggattacaggcacccgccaccacgcctggctaatttttgtattatcagtagagacggggtttctccatgttggccaggctggtctcgaacttgcgacctcaggtgatccacccgcctcagcctcccaaagcgttgggtttacaggagtgagccactgtgtccggcctcgcggctccattcttgaagtcagcgagactgtgaaccctccggaaggaaaactctggacagacagatgcctgtgcagagacaccaacgcctcccaaaccaaagctgtccaaatttattttaatttccagcctggccatccttctgatggtgtctctcctccttctgtctttatggaaattatggagagtgaagaagtttctcattcccagcgtgccagacccgaaatccatcttccccgggctctttgagatacaccaagggaacttccaggagtggatcacagacacccagaacgtggcccacctccacaagatggcaggtgcagagcaagaaagtggccccgaggagcccctggtagtccagttggccaagactgaagccgagtctcccaggatgctggacccacagaccgaggagaaagaggcctctgggggatccctccagcttccccaccagcccctccaaggcggtgatgtggtcacaatcgggggcttcacctttgtgatgaatgaccgctcctacgtggcgttgtgatggacacaccactgtcaaagtcaacgtcaggatccacgttgacatttaaagacagaggggactgtcccggggactccacaccaccatggatgggaagtctccacgccaatgatggtaggactaggagactctgaagacccagcctcaccgcctaatgcggccactgccctgctaactttcccccacatgagtctctgtgttcaaaggcttgatggcagatgggagccaattgctccaggagatttactcccagttccttttcgtgcctgaacgttgtcacataaaccccaaggcagcacgtccaaaatgctgtaaaaccatcttcccactctgtgagtccccagttccgtccatgtaccattcccatagcattggattctcggaggattttttgtctgttttgag

SEQ ID NO: 124639 - DNA, 2957 bp, Homo sapiens
  Payload ID: 4483
  Gene Symbol: CRLF3
  Gene Name: cytokine receptor-like factor 3
  Uniprot ID: Q8IUI8
  ENST ID: ENST00000324238
  CDS Start-End: 126-1454
tcgtcgtggggcatggggcggcggggctgggcggtgcttccgcctgcgcgaggccgcgccgggccgcttggaggcgcccggtgcagtcgggaacccgcgctaggtttcgccggccgcgcggccagatgaggggggcgatggagctggagcctgagctgctgttgcaggaggcccgcgagaacgtggaggcagcgcagagctaccggcgggagctgggtcaccggcttgaggggctgcgtgaggcgcggaggcagatcaaagaaagtgcatcacagacaagggatgttctcaaacagcattttaatgatttaaagggaacccttggaaagctcctggatgagcgattggtgacccttttgcaagaggtggacaccattgaacaggagaccattaaaccactagatgactgccagaagctcatagaacacggagtcaacactgcagaggacttagtccgagaaggtgaaatcgccatgcttggtggtgtgggagaagagaatgagaaactgtggagctttaccaaaaaggcctcgcacattcagttggacagcttaccagaagtacctttactggttgatgtgccttgtttatctgctcagttggatgactcaattcttaacatagtgaaagaccacatttttaagcatggaacagtagcatctcgcccaccagtacagatagaagaactaatagagaaacctggaggcatcattgtacgatggtgtaaggtggatgatgactttacagcccaagattacaggctccagtttcgtaaatgtacttcaaatcattttgaggatgtatatgtaggttctgaaactgaattcatagtattgcacatagaccccaacgttgattaccagttcagagtctgcgcccgaggagatggccgacaggagtggagtccttggagtgtcccccagataggtcattccacattggtgcctcatgagtggacagctggttttgaggggtacagtctgagcagtcgaagaaatatagcacttcggaacgattctgaatcatcgggtgttctctactccagagctccgacttatttctgtgggcagacattaacattcagagttgaaactgtgggacagccagacagaagagatagcataggagtgtgtgcagaaaaacaggatggatatgactctctgcagcgggatcaagctgtgtgcattagtacaaatggtgcagtttttgtcaatggaaaagaaatgacaaatcagttacccgcagttacttctgggtccactgtcacgtttgacattgaagccgtgactctaggaaccaccagtaataatgaaggtggacacttcaagcttcgagtaactataagttcaaataatagagaagtggtttttgactggttacttgatcagtcttgtggttctctttactttggatgctcatttttctatcctggatggaaagtgttagtgttttagatgtttgggtgcttggctttggttttcagggtctaacgtagctgtcctcagcccagcgtagttgtaattgctttaaaaaaaaagttgaattcatctctaacttaggccattggaaagtgtttactggattcattttgtaatattttagcaaaaagagacttcaatgttgtggacaaaatcatacaattcagtcaattttatttttagcatactgttaaatatcacatcacaataaaaatcaaattggcattaaaagtatagaagatataggaagttctatacccttccactgtacttctcaaagttggttattagaccaggaaaacttaatgtaatattatttttaaaatcatcttaaaggatccaagtccatgtaactctttagaacaagaggaataggtcagatagaagaagctgtgtaatgtattaatacatccgttcatgtgctgtccacatgaatgtgttgactgtgctctccatgttcaggtatttgtaagcagtgttgacttttatcccctcttcagtaatctttaagtccccaaaacattataactttttctttttttgttgagacggagtctcactcttgtcactcaggctggagtgcagtggtgtgatctcagttcactgcaacctctgcctcccacgttcaagcgatcctcctgcctcaggctcctgagtagctgggattacaggcgtcggccaccacacctggctaatttttgtatttttagtagagacagggtttcaccatgttggccaggctggtcttgaactcctgacctcaggtgttccacccacctcagccttccaaagtgctaggattacaggtgtgagccactgcagtggaccaatttttgtatttttttaaatgcttgaccaagtgtctaaaataggcaagtagtaccttttgttctttcattgcaatttgatacagtataggctacagtatttttacagggtaaaactagttatggcagtagtatgcacagcagtgttagccatttcatatgtatgtaatatgcacgtgtgtatccaatctgcctgtgacatgcattttactctttgcagagaatgagctgcagtccagtttaatgtcagtttaataagtggtctctttttagcagagcaaaaaaatatagcgtaaatacttattttttttaaaaacttacttaaatttgtgtgtaaaatatttatttgaaggactttaatatgtaaaaataattgtcttctatgccaccctacagattttattttaatgtgaattatttttttcatttcatttttaccagtatagtaaaaaagtagaaaagcaagtatgatatttttgtaagataatttatttggggattcatgttccctgttagacaatcatgaccttttctacttgtctttttatatataagtagtagatttccacttgtttagggattaagaagatgttctagaatgtagataccttgtccagccataggaatcaaaataaaaaactaaaaaagttca

SEQ ID NO: 124640 - DNA, 1392 bp, Homo sapiens
  Payload ID: 4483
  Gene Symbol: CRLF3
  Gene Name: cytokine receptor-like factor 3
  ENST ID: ENST00000578692
  CDS Start-End: 21-311
ttcgccggccgcgcggccagatgaggggggcgatggagctggagcctgagctgctgttgcaggaggcccgcgagaacgtggaggcagcgcagagctaccggcgggagctgggtcaccggcttgaggggctgcgtgaggcgcggaggcaggtgaaatcgccatgcttggtggtgtgggagaagagaatgagaaactgtggagctttaccaaaaaggcctcgcacattcagttggacagcttaccagaagtacctttactggttgatgtgccttgtttatctgctcagttggatgactcaattcttaacatagtgaaagaccacatttttaagcatggaacagtagcatctcgcccaccagtacagatagaagaactaatagagaaacctggaggcatcattgtacgatggtgtaaggtggatgatgactttacagcccaagattacaggctccagtttcgtaaatgtacttcaaatcattttgaggatgtatatgtaggttctgaaactgaattcatagtattgcacatagaccccaacgttgattaccagttcagagtctgcgcccgaggagatggccgacaggagtggagtccttggagtgtcccccagataggtcattccacattggtgcctcatgagtggacagctggttttgaggggtacagtctgagcagtcgaagaaatatagcacttcggaacgattctgaatcatcgggtgttctctactccagagctccgacttatttctgtgggcagacattaacattcagagttgaaactgtgggacagccagacagaagagatagcataggagtgtgtgcagaaaaacaggatggatatgactctctgcagcgggatcaagctgtgtgcattagtacaaatggtgcagtttttgtcaatggaaaagaaatgacaaatcagttacccgcagttacttctgggtccactgtcacgtttgacattgaagccgtgactctaggaaccaccagtaataatgaaggtggacacttcaagcttcgagtaactataagttcaaataatagagaagtggtttttgactggttacttgatcagtcttgtggttctctttactttggatgctcatttttctatcctggatggaaagtgttagtgttttagatgtttgggtgcttggctttggttttcagggtctaacgtagctgtcctcagcccagcgtagttgtaattgctttaaaaaaaaagttgaattcatctctaacttaggccattggaaagtgtttactggattcattttgtaatattttagcaaaaagagacttcaatgttgtggacaaaatcatacaattcagtcaattttatttttagcatactgttaaatatcacatcacaataaaaatcaaattggcatt

SEQ ID NO: 124641 - DNA, 378 bp, Homo sapiens
  Payload ID: 4483
  Gene Symbol: CRLF3
  Gene Name: cytokine receptor-like factor 3
  ENST ID: ENST00000583527
  CDS Start-End: 1-356
taggagtgtgtgcagaaaaacaggatggatatgactctctgcagcgggatcaagctgtgtgcattagtacaaatggtgcagtttttgtcaatggaaaagaaatgacaaatcagttacccgcagttacttctgggtccactgtcacgtttgacattgaagccgtgactctaggaaccaccagtaataatgaaggtggacacttcaagcttcgagaacgaggtcttgctatgttgtccaaactggtctcaaactcctgggctcaaagtcttcgcaccttggactcccaaagtgttagggttacagagtctcgctgtcaccaggctggactgcagtggcacgatctcaactcactgtaacctccgcctcctgggttcaagc

SEQ ID NO: 124642 - DNA, 5599 bp, Homo sapiens
  Payload ID: 4484
  Gene Symbol: CLNK
  Gene Name: cytokine-dependent hematopoietic cell linker
  Uniprot ID: Q7Z7G1
  ENST ID: ENST00000226951
  CDS Start-End: 241-1527
ggctgcatttcacaggaaaccaagtctaaaacggacctatcaggaggttttctgctgaagggcactgcttagcatcgagaagaattcaacccaccgccttactaatttccagtgccccaaggtctctgcactgccgcccctcctcacaggagacggacacctcagcctagatcccttggtgctctccacgctgttcaggctgaattgaagatccctcttacccgccaggtgccaagaactatgaacaggcagggcaatagaaagacaactaaagaaggatccaacgatttgaaattccagaacttcagtctgccaaaaaacaggtcatggcctcgcatcaatagtgccacaggccagtaccagaggatgaacaagcctcttctagactgggaaagaaactttgctgcagtcctggatggagcaaaaggccacagtgatgatgactatgatgaccctgagcttcggatggaagagacatggcagtcgattaaaattttaccagcccggcctataaaggaatctgaatatgcagatacacactatttcaaggttgcaatggacactccccttccgttagacaccaggacctctatctccattggacagccgacctggaacacacagacgaggttggaaagagtggacaaacccatttccaaggacgtcagaagccaaaacattaaaggagatgcatccgtaagaaagaacaagattcctttaccacctcctcggcctctcataacacttccgaagaagtaccaacccttgccccctgagccggagagcagcaggccacctttatctcagagacacacctttccagaagtccagagaatgcccagtcagataagcttaagggacttaagtgaggtccttgaagcagaaaaagttcctcataaccagaggaagcctgaatcaactcatctgttagaaaaccaaaatactcaagagattccacttgccattagcagttcttcattcacgacaagcaaccacagtgtgcaaaacagagatcatagaggaggcatgcagccctgttctcctcagagatgccagcctccagccagctgcagccctcacgaaaatatactgccctataaatacacaagctggagaccacctttccccaaaaggtctgatagaaaggatgtccagcacaatgaatggtacattggagaatacagccgccaggcagtggaagaggcattcatgaaggagaacaaggatggtagtttcttggtccgagattgttccacaaaatccaaggaagagccctatgttttggctgtgttttatgagaacaaagtctacaatgtaaaaatacgcttcctggagaggaatcagcagtttgccctggggacaggactcagaggagatgagaagtttgattcagtagaagacatcatcgaacactacaagaattttcccattatactaattgatgggaaagataaaactggggtccacaggaaacagtgtcacctcactcagccactccctctcaccagacacctcttgcctctgtagcctggtctttgtgttatctttggtttactggattcagcgcttccattgttttcattgatttcaaaagtttattttctgtgccttcaagggacaacttttttaactttggagaaaagaaaaacactctataacagagagtggaaaatcactcacggttttgaaagttcaaaccacagagaaaatatttataacatgcaaaaaataaaaacattctagtaactggccactggaaaataaataaaaataaaaactagggttttaaaagtatcttctaaaaaacaacaacaaaaaatactataaacatagccattatgctcatgatacaggcgagcagcaaagggcaccagaagctgttgcttaaatgtttgcagtcagtgcaagacaagtctatgggaaattcccaaatctgtgctctttacaggacactgcgctgcctttatgtcagttgttgggccttacatatatacaatgtgtggatgatttcttacactaaagatgctgggctgggtgcggtgcctcatgcctgtaatcccagcactttgggaggctgaggtggacagatcacgaggtcaggagatcaagaccatcctggctaacatggtgaaaccccatgtctactaaaaatacaaaaaatcagctgggcgtggtggtgggtgcctgtagtcccagctactcgggaggctgaggcaggagaatggtgtgaacccgggaggcggagcttgcagtgagccgaaatcgcgccactgcactccaatccagcctggggacagagagactccgtctcaaaaaaaaaaaaaggtgttgggttggtgaatattagctctcttttattgtaatcctagaaattcaagtatagggaagaaatgtggtatggaaaaccagcaattgtgaatgtcaccttgaagacagaaactgaaaatcctctgactagggtgtgaaacggtcatgggaccagcctccagcatcatctgcttcaagtagctttaagtcaaatggaattaacacattcatagtacagagctcagattatatcctacactagccttcaggcaagcatatgtctgagggaaactaaaaattgtattaacaattccaattatggacttccattcaaagacagagaaaaactgtcctcaaattagtgctaattcttgcagtaacgttgcacaggccatgatattattccctgtagaggttaagaggatttaattttattattgttttacaataaagatgaggaaacagaggctcgaagtagctattgatcttactcaatatgagaagagagcccagattgtaatctgctttgcctggctccatgcaagctcatcttcccaggtacattctctgcgctgtgacattttacaatcaagttgaaaagctaatttaaaaaaaaagagagagagagagagaaagatagaaacaatttgaaaatacagatttaccaccttaaaataaataaactcttctagtgggaataagcttttttaaaaaacatactgtctgtcgaaaataacagtatatcatgatgtcaaatgctaccaaagcttacaaaggaaattcatagagtatttatgtaattgtagcattgatgcagaaagaaaaccaaaaataattaaaaggcaatagaagcaaatgaaaacaataaaaacaatgtgcaggattatctcttttgtaagacagcagacaatgagctctctgggaaaagctcttagcatctacccactatccaaatacctgctcaggtgttctcctttcacaaggtcaatgtgaagtgatgcctataagttacatcaggagcatttaatgaagaagctatttgtaaagctggaacttttgagacccagctgagcctatcgtagagtatgcctgcagaggattacatagaaccaagagacaagagtgtttaaattggagcttggatacgaaagaactcactggtccggtcaaagctaaaagctgtatggttgctggtcattctctactggaattcaacaagccagggacagtatggaaacaaggactttacagaagagctccaggctcacattaagaaggaatctgaccctcaccctaaaaagctattgggagattactgatacctccaactcactgattcattgaggccatgccattcaatgctatgttctcaagaaatgtctatgagtcctctcaaccattgctgttgataaaataggtgaatgtcaagtgggggttagcatttgataaggtgtacgtttgaaataatattttatcgtctcttgttcacaaatacaacatataattccaagaagaaaaaagaagtagaaattcagcatccttaagatgacagcaagaatgaggggaaaaggaagaaaaaaaagaaattaaacatcttgcaataaaaagcttacaatatttttgtgtatttgaacacttctgtaaaaaatataaaatggaaaatactgacatgggctgcttctggtgattggggtttgagggattgggtgtcgggttttctagaactcagacaccaggacaaagttagaagtgcaaacactgattggaggttaatgtttgagaaagataaaagggagaagaaacagaagtatgggtatggggtgggctttcaggctcccacctgtgagagggaagaggggaggtgtggggagtgaggagaaaaagcatgagattcagacacagctctgggagagttttggccagctcatagtgaggcccaaagcaaagtttgcccagagaggagacagtgttatgctgggcagtaatgtctgggtcttagtgccccatcctgttaagtcattgtctggggctatcctgggaaaaagaaaaacaacaaaaaaaaaagacctgcaaatgctgtggccaatccagaaggcgcagctggacgctgtccactaacttgctggccagcaagttatttcaatggagactcaagagacccacctctggcctgccacagcaacatcctgaattcactgttttcagtgttgattgtagtaaggacaatcacatttacattttgcttgtaatggatgattaaataataagagtatataaattcgattgtatttgtttcttacaacacttctgtaaagaagagagggcagctatttctaatgcattttataattgaggaaattgtacctcattggccaaaatctcacagtgacatagtcgcgactggaaccaaggtctccatatgcaattatcctattcatggtctacctgctttattagatctgtaattgaatattcaatgatttggatttggcatgcccaaattccagtgttttaatcccttttcaaccattacctcacgtttagtttaaaagtatcacttgatatctgatttcaatagagtaatagaattttagctttatccaattacagcatttatgctttccagatattttttggactaaataattctcattctgtataaatgtgcatagccctcatcattagtcatatattgtgttagcacctttgtgtactgcatgtgtattcattactaagcactattgtagatgttgaaaatagagcagtgaataagagagatagatgacaaataaatatacaaacaaataagataatctaagtcagtttcccattactggattggatttctattttaacacttatttctgagtacttgtggggtgatgccaacattaaatgttttgaggaagctcctttgagatggctttgaaaagtcctaagtgagaaaatttaaaattttcccaaacttatttatgtggggtgtgcatgtgtgtgcctgtgcctgtgtgcgtgtgtgtgtgtgtgtttttaagtaaccgcatcatggctgtaatcagttaagtctcctgttctaattactacggaggaatcaaatgaaccccattgtcgaatgtagccaattatgtatgtgtgtacacaaatacaaatttttatgatagcctatattgtatattagcattatatttgtatatcttttttattctgagcaatatttgttctagctaagcacatttacattcataatttacagccttactaatgtaaataaaagtaaatatgtaattgaatgtta

SEQ ID NO: 124643 - DNA, 1539 bp, Homo sapiens
  Payload ID: 4484
  Gene Symbol: CLNK
  Gene Name: cytokine-dependent hematopoietic cell linker
  ENST ID: ENST00000442825
  CDS Start-End: 1-1287
atgaatcccaggggcaatagaaagacaactaaagaaggatccaacgatttgaaattccagaacttcagtctgccaaaaaacaggtcatggcctcgcatcaatagtgccacaggccagtaccagaggatgaacaagcctcttctagactgggaaagaaactttgctgcagtcctggatggagcaaaaggccacagtgatgatgactatgatgaccctgagcttcggatggaagagacatggcagtcgattaaaattttaccagcccggcctataaaggaatctgaatatgcagatacacactatttcaaggttgcaatggacactccccttccgttagacaccaggacctctatctccattggacagccgacctggaacacacagacgaggttggaaagagtggacaaacccatttccaaggacgtcagaagccaaaacattaaaggagatgcatccgtaagaaagaacaagattcctttaccacctcctcggcctctcataacacttccgaagaagtaccaacccttgccccctgagccggagagcagcaggccacctttatctcagagacacacctttccagaagtccagagaatgcccagtcagataagcttaagggacttaagtgaggtccttgaagcagaaaaagttcctcataaccagaggaagcctgaatcaactcatctgttagaaaaccaaaatactcaagagattccacttgccattagcagttcttcattcacgacaagcaaccacagtgtgcaaaacagagatcatagaggaggcatgcagccctgttctcctcagagatgccagcctccagccagctgcagccctcacgaaaatatactgccctataaatacacaagctggagaccacctttccccaaaaggtctgatagaaaggatgtccagcacaatgaatggtacattggagaatacagccgccaggcagtggaagaggcattcatgaaggagaacaaggatggtagtttcttggtccgagattgttccacaaaatccaaggaagagccctatgttttggctgtgttttatgagaacaaagtctacaatgtaaaaatacgcttcctggagaggaatcagcagtttgccctggggacaggactcagaggagatgagaagtttgattcagtagaagacatcatcgaacactacaagaattttcccattatactaattgatgggaaagataaaactggggtccacaggaaacagtgtcacctcactcagccactccctctcaccagacacctcttgcctctgtagcctggtctttgtgttatctttggtttactggattcagcgcttccattgttttcattgatttcaaaagtttattttctgtgccttcaagggacaacttttttaactttggagaaaagaaaaacactctataacagagagtggaaaatcactcacggttttgaaagttcaaaccacagagaaaatatttataacatgcaaaaaataaaaacattctagtaactggccactggaaaataaataaaaataaaaact

SEQ ID NO: 124644 - DNA, 1143 bp, Homo sapiens
  Payload ID: 4484
  Gene Symbol: CLNK
  Gene Name: cytokine-dependent hematopoietic cell linker
  Uniprot ID: Q7Z7G1
  ENST ID: ENST00000507719
  CDS Start-End: 294-803
gacaaagtcatgccagtccttccatactggcagttttaatttttacgaaaccacattcttcacgatgcctgatgctgtgcagaagagcgtagtctagaagaaagaacacggattttggagacaggcattcctctcaaccccaaacctgccatctcctagccatgtaactttggacaaggggcaatagaaagacaactaaagaaggatccaacgatttgaaattccagaacttcagtctgccaaaaaacaggtcatggcctcgcatcaatagtgccacaggccagtaccagaggatgaacaagcctcttctagactgggaaagaaactttgctgcagtcctggatggagcaaaaggccacagtgatgatgactatgatgaccctgagcttcggatggaagagacatggcagtcgattaaaattttaccagcccggcctataaaggaatctgaatatgcagatacacactatttcaaggttgcaatggacactccccttccgttagacaccaggacctctatctccattggacagccgacctggaacacacagacgaggttggaaagagtggacaaacccatttccaaggacgtcagaagccaaaacattaaaggagatgcatccgtaagaaagaacaagattcctttaccacctcctcggcctctcataacacttccgaagaagtaccaacccttgccccctgagccggagagcagcaggccacctttatctcagagacacacctttccagaagtccagagaatgcccagtcagataagcttaagggacttaagtgagccataaaatagggatgggggccaggtgcagtggctcacgcctgtaatcccagcactttgggaggccgaggtgggcggatcacctgaggtcaggggttcaagatcagcctgaccaacatgaagaaaccccatctctacaaaaaatacaaaattagccaggtgtggtggcgcatgcctgtaatcccagccacgctactcgggaggctgaggaaggagaatcgcttgaacccaggaggcagaggttacggtgagccaagatcatgccattgtactccagcttgggcaacaagagcgaagctccatctcaaaataaataaattaattaaataaataaaaataaaataaaa

SEQ ID NO: 124645 - DNA, 4180 bp, Homo sapiens
  Payload ID: 4484
  Gene Symbol: CLNK
  Gene Name: cytokine-dependent hematopoietic cell linker
  ENST ID: ENST00000515667
  CDS Start-End: 87-587
gtcattatatgttagaagtgcaatcagtacataactggaatttttaaatcaatctgtaactgattttaaaagatcatagaggaggcatgcagccctgttctcctcagagatgccagcctccagccagctgcagccctcacgaaaatatactgccctataaatacacaagctggagaccacctttccccaaaaggtctgatagaaaggatgtccagcacaatgaatggtacattggagaatacagccgccaggcagtggaagaggcattcatgaaggagaacaaggatggtagtttcttggtccgagattgttccacaaaatccaaggaagagccctatgttttggctgtgttttatgagaacaaagtctacaatgtaaaaatacgcttcctggagaggaatcagcagtttgccctggggacaggactcagaggagatgagaagtttgattcagtagaagacatcatcgaacactacaagaattttcccattatactaattgatgggaaagataaaactggggtccacaggaaacagtgtcacctcactcagccactccctctcaccagacacctcttgcctctgtagcctggtctttgtgttatctttggtttactggattcagcgcttccattgttttcattgatttcaaaagtttattttctgtgccttcaagggacaacttttttaactttggagaaaagaaaaacactctataacagagagtggaaaatcactcacggttttgaaagttcaaaccacagagaaaatatttataacatgcaaaaaataaaaacattctagtaactggccactggaaaataaataaaaataaaaactagggttttaaaagtatcttctaaaaaacaacaacaaaaaatactataaacatagccattatgctcatgatacaggcgagcagcaaagggcaccagaagctgttgcttaaatgtttgcagtcagtgcaagacaagtctatgggaaattcccaaatctgtgctctttacaggacactgcgctgcctttatgtcagttgttgggccttacatatatacaatgtgtggatgatttcttacactaaagatgctgggctgggtgcggtgcctcatgcctgtaatcccagcactttgggaggctgaggtggacagatcacgaggtcaggagatcaagaccatcctggctaacatggtgaaaccccatgtctactaaaaatacaaaaaatcagctgggcgtggtggtgggtgcctgtagtcccagctactcgggaggctgaggcaggagaatggtgtgaacccgggaggcggagcttgcagtgagccgaaatcgcgccactgcactccaatccagcctggggacagagagactccgtctcaaaaaaaaaaaaaggtgttgggttggtgaatattagctctcttttattgtaatcctagaaattcaagtatagggaagaaatgtggtatggaaaaccagcaattgtgaatgtcaccttgaagacagaaactgaaaatcctctgactagggtgtgaaacggtcatgggaccagcctccagcatcatctgcttcaagtagctttaagtcaaatggaattaacacattcatagtacagagctcagattatatcctacactagccttcaggcaagcatatgtctgagggaaactaaaaattgtattaacaattccaattatggacttccattcaaagacagagaaaaactgtcctcaaattagtgctaattcttgcagtaacgttgcacaggccatgatattattccctgtagaggttaagaggatttaattttattattgttttacaataaagatgaggaaacagaggctcgaagtagctattgatcttactcaatatgagaagagagcccagattgtaatctgctttgcctggctccatgcaagctcatcttcccaggtacattctctgcgctgtgacattttacaatcaagttgaaaagctaatttaaaaaaaaagagagagagagagagaaagatagaaacaatttgaaaatacagatttaccaccttaaaataaataaactcttctagtgggaataagcttttttaaaaaacatactgtctgtcgaaaataacagtatatcatgatgtcaaatgctaccaaagcttacaaaggaaattcatagagtatttatgtaattgtagcattgatgcagaaagaaaaccaaaaataattaaaaggcaatagaagcaaatgaaaacaataaaaacaatgtgcaggattatctcttttgtaagacagcagacaatgagctctctgggaaaagctcttagcatctacccactatccaaatacctgctcaggtgttctcctttcacaaggtcaatgtgaagtgatgcctataagttacatcaggagcatttaatgaagaagctatttgtaaagctggaacttttgagacccagctgagcctatcgtagagtatgcctgcagaggattacatagaaccaagagacaagagtgtttaaattggagcttggatacgaaagaactcactggtccggtcaaagctaaaagctgtatggttgctggtcattctctactggaattcaacaagccagggacagtatggaaacaaggactttacagaagagctccaggctcacattaagaaggaatctgaccctcaccctaaaaagctattgggagattactgatacctccaactcactgattcattgaggccatgccattcaatgctatgttctcaagaaatgtctatgagtcctctcaaccattgctgttgataaaataggtgaatgtcaagtgggggttagcatttgataaggtgtacgtttgaaataatattttatcgtctcttgttcacaaatacaacatataattccaagaagaaaaaagaagtagaaattcagcatccttaagatgacagcaagaatgaggggaaaaggaagaaaaaaaagaaattaaacatcttgcaataaaaagcttacaatatttttgtgtatttgaacacttctgtaaaaaatataaaatggaaaatactgacatgggctgcttctggtgattggggtttgagggattgggtgtcgggttttctagaactcagacaccaggacaaagttagaagtgcaaacactgattggaggttaatgtttgagaaagataaaagggagaagaaacagaagtatgggtatggggtgggctttcaggctcccacctgtgagagggaagaggggaggtgtggggagtgaggagaaaaagcatgagattcagacacagctctgggagagttttggccagctcatagtgaggcccaaagcaaagtttgcccagagaggagacagtgttatgctgggcagtaatgtctgggtcttagtgccccatcctgttaagtcattgtctggggctatcctgggaaaaagaaaaacaacaaaaaaaaaagacctgcaaatgctgtggccaatccagaaggcgcagctggacgctgtccactaacttgctggccagcaagttatttcaatggagactcaagagacccacctctggcctgccacagcaacatcctgaattcactgttttcagtgttgattgtagtaaggacaatcacatttacattttgcttgtaatggatgattaaataataagagtatataaattcgattgtatttgtttcttacaacacttctgtaaagaagagagggcagctatttctaatgcattttataattgaggaaattgtacctcattggccaaaatctcacagtgacatagtcgcgactggaaccaaggtctccatatgcaattatcctattcatggtctacctgctttattagatctgtaattgaatattcaatgatttggatttggcatgcccaaattccagtgttttaatcccttttcaaccattacctcacgtttagtttaaaagtatcacttgatatctgatttcaatagagtaatagaattttagctttatccaattacagcatttatgctttccagatattttttggactaaataattctcattctgtataaatgtgcatagccctcatcattagtcatatattgtgttagcacctttgtgtactgcatgtgtattcattactaagcactattgtagatgttgaaaatagagcagtgaataagagagatagatgacaaataaatatacaaacaaataagataa

SEQ ID NO: 124646 - DNA, 1003 bp, Homo sapiens
  Payload ID: 4485
  Gene Symbol: CYTL1
  Gene Name: cytokine-like 1
  Uniprot ID: Q9NRR1
  ENST ID: ENST00000307746
  CDS Start-End: 28-438
ggcgaggctgcaccagcgcctggcaccatgaggacgcctgggcctctgcccgtgctgctgctgctcctggcgggagcccccgccgcgcggcccactcccccgacctgctactcccgcatgcgggccctgagccaggagatcacccgcgacttcaacctcctgcaggtctcggagccctcggagccatgtgtgagatacctgcccaggctgtacctggacatacacaattactgtgtgctggacaagctgcgggactttgtggcctcgcccccgtgttggaaagtggcccaggtagattccttgaaggacaaagcacggaagctgtacaccatcatgaactcgttctgcaggagagatttggtattcctgttggatgactgcaatgccttggaatacccaatcccagtgactacggtcctgccagatcgtcagcgctaagggaactgagaccagagaaagaacccaagagaactacagttatgtcagctacccagacttaatgggccagagccatgaccctcacaggtcttgtgttagttgtatctgaaactgttatgtatctctctaccttctggaaaacagggctggtattcctacccaggaacctcctttgagcatagagttagcaaccatgcttctcattcccttgactcatgtcttgccaggatggttagatacacagcatgttgatttggtcactaaaaagaagaaaaggactaacaagcttcacttttatgaacaactattttgagaacttgcacaatagtatgtttttattactggtttaatggagtaatggtacttttattctttcttgatagaaacctgcttacatttaaccaagcttctattatgcctttttctaacacagactttcttcactgtctttcatttaaaaagaaattaatgctcttaagatatatattttacgtagtgctgacaggacccactctttcattgaaaggtgatgaaaatcaaataaagaatctcttcacatgagaaa

SEQ ID NO: 124647 - DNA, 285 bp, Homo sapiens
  Payload ID: 4485
  Gene Symbol: CYTL1
  Gene Name: cytokine-like 1
  ENST ID: ENST00000509419
  CDS Start-End: 1-278
ggacgcctgggcctctgcccgtgctgctgctgctcctggcgggagcccccgccgcgcggcccactcccccgacctgctactcccgcatgcgggccctgagccaggagatcacccgcgacttcaacctcctgcaggtctcggagccctcggagccatgtgtgagatacctgcccaggctgtacctggacatacacgatttggtattcctgttggatgactgcaatgccttggaatacccaatcccagtgactacggtcctgccagatcgtcagcgctaagggaact

SEQ ID NO: 124648 - DNA, 553 bp, Homo sapiens
  Payload ID: 4485
  Gene Symbol: CYTL1
  Gene Name: cytokine-like 1
  ENST ID: ENST00000506508
  CDS Start-End: 1-229
gcctgggcctctgcccgtgctgctgctgctcctggcgggagcccccgccgcgcggcccactcccccgacctgctactcccgcatgcgggccctgagccaggagatcacccgcgacttcaacctcctgcaggtctcggagccctcggatttggtattcctgttggatgactgcaatgccttggaatacccaatcccagtgactacggtcctgccagatcgtcagcgctaagggaactgagaccagagaaagaacccaagagaactacagttatgtcagctacccagacttaatgggccagagccatgaccctcacaggtcttgtgttagttgtatctgaaactgttatgtatctctctaccttctggaaaacagggctggtattcctacccaggaacctcctttgagcatagagttagcaaccatgcttctcattcccttgactcatgtcttgccaggatggttagatacacagcatgttgatttggtcactaaaaagaagaaaaggactaacaagcttcacttttatgaacaactattttgagaacttgcaca

SEQ ID NO: 124649 - DNA, 707 bp, Homo sapiens
  Payload ID: 4486
  Gene Symbol: CYFIP1
  Gene Name: cytoplasmic FMR1 interacting protein 1
  ENST ID: ENST00000561263
  CDS Start-End: 1-531
cctttccagaacatcttgccgcgagtccatgtgaaagagggggagagacttgatgccaaaatgaaaagactagaatcaaagtacgccccgctgcatcttgtcccactgattgaaagactggggacccctcagcaaattgccatcgcaagagagggggacctgctgacaaaggagcgcctctgctgcggcctgtccatgtttgaggtcatcctgacacggatccggagctttctggatgaccccatctggcgcgggcctctgcccagcaatggggtcatgcatgtggacgagtgtgtggagtttcacagactgtggagtgccatgcagtttgtctactgcattcccgtggggacacacgagttcacagtcgagcagtgctttggtgatgggctacactgggctggctgtatgatcatcgtacttcttgggcagcagcggcgttttgctgtgctggatttctgctaccatctacttaaagtccagaaacatgatggcaaagatgagattattaaaaatgtggtatgtggatgaaaatctcgcaccatctatggaccttttgcaaaagcatactttctttgtgttataagttcttgtttctggcaatgtttttcatcctagtacgtaaggtgccaccaacagaaactttcttttcgttcccaaaatgaatctaaatataattggccagtaaagcagtctggcagagaaaa

SEQ ID NO: 124650 - DNA, 582 bp, Homo sapiens
  Payload ID: 4486
  Gene Symbol: CYFIP1
  Gene Name: cytoplasmic FMR1 interacting protein 1
  ENST ID: ENST00000611832
  CDS Start-End: 130-582
gtgtttcctggcgcattcccggccagcccgagtgactcactcggccaaggaaactcccagggcccgcccaggacccccaagccgccgcggacgcagaacaggggtccttatgtgttgttccagcccaggatggcggcccaggtgactctggaggacgcgctgtccaacgtggacctcctggaggagctgcccctgcccgaccagcagccctgcatcgagcccccgccatcctcgctgctctaccagccaaatttcaacactaactttgaagacagaaatgcatttgttactggcatcgcaagatacattgaacaagccaccgtccactctagcatgaacgagatgctggaggagggccaagaatatgctgtcatgctgtacacctggaggagctgctcccgggccatcccacaggtgaaatgtaacgagcagcctaacagagtggaaatctacgagaaaaccgtggaggttctggagcctgaggtcacaaaactgatgaatttcatgtacttccagagaaatgccattgagcgtttctgcggggaagtgaggcgcctgtgccatgccgagaggaggaaggac

SEQ ID NO: 124651 - DNA, 4515 bp, Homo sapiens
  Payload ID: 4486
  Gene Symbol: CYFIP1
  Gene Name: cytoplasmic FMR1 interacting protein 1
  Uniprot ID: Q7L576
  ENST ID: ENST00000610365
  CDS Start-End: 192-3953
agtgactcactcggccaaggaaactcccagggcccgcccaggacccccaagccgccgcggacgcagaatgtggctcagctgcccctggtcccatcccagggcagagctcctcctgagtacccttgagactggagcagattcagcagaaggcagattgccccctctccctggagctggctctgaagcccaggatggcggcccaggtgactctggaggacgcgctgtccaacgtggacctcctggaggagctgcccctgcccgaccagcagccctgcatcgagcccccgccatcctcgctgctctaccagccaaatttcaacactaactttgaagacagaaatgcatttgttactggcatcgcaagatacattgaacaagccaccgtccactctagcatgaacgagatgctggaggagggccaagaatatgctgtcatgctgtacacctggaggagctgctcccgggccatcccacaggtgaaatgtaacgagcagcctaacagagtggaaatctacgagaaaaccgtggaggttctggagcctgaggtcacaaaactgatgaatttcatgtacttccagagaaatgccattgagcgtttctgcggggaagtgaggcgcctgtgccatgccgagaggaggaaggacttcgtgtcagaagcctacctgatcacactgggcaaattcatcaacatgttcgctgtgctggacgagctgaagaacatgaagtgcagtgtgaagaacgaccactcagcgtacaagagggccgctcagtttttacgtaaaatggcagatccacagtccatccaggaatcgcagaatctgtccatgttcctggccaatcataacaagatcacacagtctctgcagcagcagctcgaagtgatttctggctacgaagagctcctggcagatattgtgaatctgtgtgtggattactacgagaacaggatgtatttgacgcccagtgagaaacacatgcttctcaaagtcatgggatttggtctgtacctgatggatgggagtgtcagtaacatctataagttggatgccaagaaaagaataaacttatccaaaatcgacaagtacttcaagcaactccaggtggttccgctatttggggacatgcaaatagaactggcaagatatatcaagaccagcgcccactacgaggaaaataaatctcgatggacgtgcacatcctccggcagcagccctcagtacaacatctgcgagcagatgatccagatccgcgaggaccacatgcgcttcatttcggagctggcgcgctacagcaacagcgaggtggtcacgggctcgggccgccaggaggcccagaagacggacgcggagtaccgcaagctcttcgacctggcgctgcagggcctgcagctgttgtcgcagtggagcgcgcacgtgatggaagtgtattcctggaagcttgtgcaccccaccgacaagtactccaacaaggactgccccgacagcgctgaagagtacgagcgtgccacgcgctacaactacaccagcgaggagaagtttgccctagtggaggtgatcgccatgatcaaaggcctgcaggtgctgatgggcaggatggagagcgtgttcaaccacgccatccggcacaccgtctatgccgcactgcaggacttctcccaggtgacccttagggagccgctgcggcaggccatcaagaagaagaagaacgtcatccagagtgtcctgcaggccatcaggaagaccgtgtgtgactgggagacggggcatgagcccttcaatgacccagccttgcggggcgagaaggaccccaagagcggcttcgacataaaagtaccacgccgcgccgtgggaccctccagcactcagctttacatggtgagaaccatgctagagtccctcattgcagacaaaagtggttccaagaaaaccttgagaagtagccttgaggggcccaccatattggacatagaaaaatttcatcgagagtcattcttctacactcacttgataaatttcagtgaaacgctgcagcagtgctgtgacctttcgcagctgtggttccgagagttcttcctggagctgaccatgggcaggaggatccagttccccattgagatgtcgatgccctggatcctgacggaccacatcctggagaccaaggaggcatcgatgatggagtacgtgctctactccctggacctgtacaatgacagcgcccactacgcgctcaccaggttcaacaagcagttcctgtacgacgaaattgaggccgaggtgaatctatgttttgaccaatttgtttacaagctagcagaccagatatttgcctattataaggttatggcaggaagtttgcttcttgataaacggttacgatcagaatgcaagaatcagggagccacgatccacctcccgccgtctaaccgctacgagacgctgctgaagcagaggcatgtgcagctcctcggcagatcaatagacctcaatcgtctgatcacccagcgcgtctcagcagccatgtataagtccctagaactggcgattggacgatttgaaagtgaagatttgacctccatagttgagctggatggcctgttggaaatcaaccgcatgacccacaagctgctgagccggtacctgacgctggacggcttcgacgccatgttccgggaggccaaccacaacgtgtcagcgccctacgggaggatcaccctgcacgtcttctgggagctcaactatgacttcctgcccaactactgctacaacggctctaccaaccggtttgttcggacagtgttaccattttctcaggaatttcaaagagataagcagcctaatgcacagcctcagtatctgcatggatccaaggctttgaacttggcctactccagcatttacggcagctaccggaacttcgtgggacctccacactttcaagtcatctgccggcttctcggctaccagggtatcgccgtggtcatggaggagctgctgaaggtcgtcaagagcctgctgcaaggcacaatcctgcagtacgtgaagacgctgatggaggtgatgcccaagatctgccgcctgccccggcacgagtacggctctcctggtatcctggagttcttccaccaccagctgaaggacatcgtggagtacgcagagctgaagacggtgtgcttccagaacctgcgggaggtggggaacgccatcctcttctgcctgctcatcgagcagagcctgtctttagaagaagtgtgtgacctgctgcacgcggctcctttccagaacatcttgccgcgagtccatgtgaaagagggggagagacttgatgccaaaatgaaaagactagaatcaaagtacgccccgctgcatcttgtcccactgattgaaagactggggacccctcagcaaattgccatcgcaagagagggggacctgctgacaaaggagcgcctctgctgcggcctgtccatgtttgaggtcatcctgacacggatccggagctttctggatgaccccatctggcgcgggcctctgcccagcaatggggtcatgcatgtggacgagtgtgtggagtttcacagactgtggagtgccatgcagtttgtctactgcattcccgtggggacacacgagttcacagtcgagcagtgctttggtgatgggctacactgggctggctgtatgatcatcgtacttcttgggcagcagcggcgttttgctgtgctggatttctgctaccatctacttaaagtccagaaacatgatggcaaagatgagattattaaaaatgtgcctttgaagaagatggtggagagaattcgcaagttccagattctcaatgatgagatcatcaccatcctggataagtacctgaagtcaggcgacggggagggcacgccagtggagcatgtgcgctgcttccagccgcccatccaccagtccctcgccagcagctgagggcacgcgctgcactccgtaactcaacatggcatgcctttctctccgtaaactatttagtgagatttttagggactatttttcagtatctctgtacctgttaaagggggtgcttttcgatctaaaaacttaattttataaaattgacttatttttctagactaaaattgtatatgcttttggtaattaggaactcttgagaatattggctgctgattgttgccatcacgttcctacaaaattgtttttctatgggatgttctggcagctgtgtcataaaatgctgctgggttcattcattcattccataagaaacttaataccagcaaatgcattaaatcccttgccagttaccattaactgtaactatttagcttttgtttagggatctttctgatggtcttttatgagcaatcttagttctaagtcattgttcccatcccttttttgtgtgtttcagaaaatagtgaacttgattcccctgcttccactaaatccagttgtgacaaaatctaacgtgacatcagatcgaaaggttatagaaataaaactaatgagatct

SEQ ID NO: 124652 - DNA, 553 bp, Homo sapiens
  Payload ID: 4486
  Gene Symbol: CYFIP1
  Gene Name: cytoplasmic FMR1 interacting protein 1
  ENST ID: ENST00000612288
  CDS Start-End: 1-553
ctacaccagcgaggagaagtttgccctagtggaggtgatcgccatgatcaaaggcctgcaggtgctgatgggcaggatggagagcgtgttcaaccacgccatccggcacaccgtctatgccgcactgcaggacttctcccaggtgacccttagggagccgctgcggcaggccatcaagaagaagaagaacgtcatccagagtgtcctgcaggccatcaggaagaccgtgtgtgactgggagacggggcatgagcccttcaatgacccagccttgcggggcgagaaggaccccaagagcggcttcgacataaaagtaccacgccgcgccgtgggaccctccagcactcagctctacctggtgcgcaccatggccgagtccttgggctctgccgagctgctcaggcagctcaagtctctgggcatggagaggctcttgcatgcggttaacacgtttctgaggcagtcgtgcacctacctaccccttttaacctttggtgaaacgctgcagcagtgctgtgacctttcgcagctgtggttccgagagttcttcctg

SEQ ID NO: 124653 - DNA, 544 bp, Homo sapiens
  Payload ID: 4486
  Gene Symbol: CYFIP1
  Gene Name: cytoplasmic FMR1 interacting protein 1
  ENST ID: ENST00000613006
  CDS Start-End: 62-544
agttttcctaaacacgcctgtgaccagctgactccactcagcgtttccgtgtgagcccaggatggcggcccaggtgactctggaggacgcgctgtccaacgtggacctcctggaggagctgcccctgcccgaccagcagccctgcatcgagcccccgccatcctcgctgctctaccagccaaatttcaacactaactttgaagacagaaatgcatttgttactggcatcgcaagatacattgaacaagccaccgtccactctagcatgaacgagatgctggaggagggccaagaatatgctgtcatgctgtacacctggaggagctgctcccgggccatcccacaggtgaaatgtaacgagcagcctaacagagtggaaatctacgagaaaaccgtggaggttctggagcctgaggtcacaaaactgatgaatttcatgtacttccagagaaatgccattgagcgtttctgcggggaagtgaggcgcctgtgccatgccgagaggaggaaggacttcgtgtcagaagcctacctgatcacactg

SEQ ID NO: 124654 - DNA, 5674 bp, Homo sapiens
  Payload ID: 4486
  Gene Symbol: CYFIP1
  Gene Name: cytoplasmic FMR1 interacting protein 1
  Uniprot ID: Q7L576
  ENST ID: ENST00000617556
  CDS Start-End: 303-2771
ccggtttaatccacaccgctgcgtctgtcctccgtcctggggctggtcttctccctcatctctgccggaggcttttaatctcttctgccactcttctggaaagtcaccagcaatgcacgctgctggctctgcaggagggtcagggggacggccctcggcctgtgcgtggtgccagccaccctccctgcctccctctgcgtgcgtcccgtgtccctgcctggggtgtgtgtgtcgagtgactaacgtctctctcctgcctctccctcctgtctgtccgtgtctagctctacctggtgcgcaccatggccgagtccttgggctctgccgagctgctcaggcagctcaagtctctgggcatggagaggctcttgcatgcggttaacacgtttctgaggcagtcgtgcacctacctaccccttttaacctttggtggtaagacatcatttgtttctcttgacgtttatggcacggaggcgaactgctccgctacaagttgttctttccccaaagcagcagcaacgtggccgcgtagacaggcacccggacccctcggggagctggtgcggggccctcccgaccagggcgtagcggagcagtccttctctcatgggctttttgagtttggcataactaatgtaccatgtatattttctcccccacaaatgtttccttggataatccagctttacatggtgagaaccatgctagagtccctcattgcagacaaaagtggttccaagaaaaccttgagaagtagccttgaggggcccaccatattggacatagaaaaatttcatcgagagtcattcttctacactcacttgataaatttcagtgaaacgctgcagcagtgctgtgacctttcgcagctgtggttccgagagttcttcctggagctgaccatgggcaggaggatccagttccccattgagatgtcgatgccctggatcctgacggaccacatcctggagaccaaggaggcatcgatgatggagtacgtgctctactccctggacctgtacaatgacagcgcccactacgcgctcaccaggttcaacaagcagttcctgtacgacgaaattgaggccgaggtgaatctatgttttgaccaatttgtttacaagctagcagaccagatatttgcctattataaggttatggcaggaagtttgcttcttgataaacggttacgatcagaatgcaagaatcagggagccacgatccacctcccgccgtctaaccgctacgagacgctgctgaagcagaggcatgtgcagctcctcggcagatcaatagacctcaatcgtctgatcacccagcgcgtctcagcagccatgtataagtccctagaactggcgattggacgatttgaaagtgaagatttgacctccatagttgagctggatggcctgttggaaatcaaccgcatgacccacaagctgctgagccggtacctgacgctggacggcttcgacgccatgttccgggaggccaaccacaacgtgtcagcgccctacgggaggatcaccctgcacgtcttctgggagctcaactatgacttcctgcccaactactgctacaacggctctaccaaccggtttgttcggacagtgttaccattttctcaggaatttcaaagagataagcagcctaatgcacagcctcagtatctgcatggatccaaggctttgaacttggcctactccagcatttacggcagctaccggaacttcgtgggacctccacactttcaagtcatctgccggcttctcggctaccagggtatcgccgtggtcatggaggagctgctgaaggtcgtcaagagcctgctgcaaggcacaatcctgcagtacgtgaagacgctgatggaggtgatgcccaagatctgccgcctgccccggcacgagtacggctctcctggtatcctggagttcttccaccaccagctgaaggacatcgtggagtacgcagagctgaagacggtgtgcttccagaacctgcgggaggtggggaacgccatcctcttctgcctgctcatcgagcagagcctgtctttagaagaagtgtgtgacctgctgcacgcggctcctttccagaacatcttgccgcgagtccatgtgaaagagggggagagacttgatgccaaaatgaaaagactagaatcaaagtacgccccgctgcatcttgtcccactgattgaaagactggggacccctcagcaaattgccatcgcaagagagggggacctgctgacaaaggagcgcctctgctgcggcctgtccatgtttgaggtcatcctgacacggatccggagctttctggatgaccccatctggcgcgggcctctgcccagcaatggggtcatgcatgtggacgagtgtgtggagtttcacagactgtggagtgccatgcagtttgtctactgcattcccgtggggacacacgagttcacagtcgagcagtgctttggtgatgggctacactgggctggctgtatgatcatcgtacttcttgggcagcagcggcgttttgctgtgctggatttctgctaccatctacttaaagtccagaaacatgatggcaaagatgagattattaaaaatgtgcctttgaagaagatggtggagagaattcgcaagttccagattctcaatgatgagatcatcaccatcctggataagtacctgaagtcaggcgacggggagggcacgccagtggagcatgtgcgctgcttccagccgcccatccaccagtccctcgccagcagctgagggcacgcgctgcactccgtaactcaacatggcatgcctttctctccgtaaactatttagtgagatttttagggactatttttcagtatctctgtacctgttaaagggggtgcttttcgatctaaaaacttaattttataaaattgacttatttttctagactaaaattgtatatgcttttggtaattaggaactcttgagaatattggctgctgattgttgccatcacgttcctacaaaattgtttttctatgggatgttctggcagctgtgtcataaaatgctgctgggttcattcattcattccataagaaacttaataccagcaaatgcattaaatcccttgccagttaccattaactgtaactatttagcttttgtttagggatctttctgatggtcttttatgagcaatcttagttctaagtcattgttcccatcccttttttgtgtgtttcagaaaatagtgaacttgattcccctgcttccactaaatccagttgtgacaaaatctaacgtgacatcagatcgaaaggttatagaaataaaactaatgagatctatttgtgttcatttatttactctaaccctgtgctgcctggcttggcaaggaactctaacctgaactcacataccaggccagctgggatggaggtcacctctaaggctgaggtgggatgggaccgtgacaccatcccatataccgctcacctcagcacaggtttagctttatatttagggttccgcaggcaaatgaggtgtaaaacggccgtgttggctgctccaatctggatatgaagaggctactcagtgcctctctgttacctgtgcccatgacctggaggaagccagcaatgtgggaggagatcagtcaggcccagtgggtgctgcacaaagggaccgggagcaccgagtccagccttcagctgtccccgatccacagggctcacatggctggagctggttcacatgatctgtcagaatgaaaaacaatcggtctagactaccagtagagtcacgaacatgtttgagaaactaaagccatattttaaaaagtactaaggcaatgaggttctgaaaatcctaactaactgaatggaaaaagatgctatgcctgtttattgtagatgaatactacagataaacacaagtccagcatgattaactgaactcactttatattgtagcctggcagtcattttacattatttggagtattgcaaccttcaccaattttaaaattttctatggatgccaagttgccataaaaagcaggcctcgcctacttttccggaggcctttggaaactgtccagaagcatatgatgcacggcacagaaaagtagtaagtgtacgaaccatcctgttacactgccaaactcactcaagtgacatgaagcctaacaaacaattattctttctttataaaaagttccctaaaaatgcttttggtaatgtgaattaataaccctggggccagcattctgctgcagatttagaggtggtagctgtgcttatcttagaaactacagaataggatgaaaaattatggtaaaacttaatcaattaccaagttttataaggcttaattatataccaaatatgtaataccttaggtataagacaatctcaagtgctacaaaatgttaaataagaatttattatttattaacctatgcatgttcaaatgagtctctgtcctcaagggggagaaaactggttcttttatgtacaaagcacagatgtaggtacagtatataaacagatacgtagtacatctgtagtattaaaatggcatgggaggaggcagttagaaaaaacatctaaaacagctccttagaaggccaataataaagttggaaaaaagggagtttccacgcagccagtggtgagctgcatgggataccagcaccattggcaggggaggccctcggggagtgatggcttggcgctggcgcaccactgggtaacctccaggcaggagccacaggctggaacaggcgaacactttcttcccatcacctaggtggaaattaattctgccaatacttttttttaaaggccagtcaatggttatgagtggataggttcaaagctgaatggagttcattagaccttttttattattctaccttttctgcatatgtttgcagttttccatcgacttcttcataaacaaacattttctagaaaccaaaatatgtagtggcccaaaggagctcttaagcaaagtacttggtacaaagagaccatattctataaacatgttaagtttgttctaagcattcagacttttagaataagaacttcatttcaactttttattataacatgagctaaatttaagaaacaaccctagtcttctatttcccagagctgttcaaagtctaaatgacaatataactcattatgaaaatatactgaaaagtacaagagctgatgtaaaacggtaatcaaggttccaggcatcatgggattagggtaactgaagaataaacccagccaggctgcaacagcaggcaggatgtgctggcttgatgaggtgctaaggccatcgaatgctcagaggaagccggattcacggtgatcatctcaacctgagaaatcgttccttggggtgatttctgcccttttttttgttttgtaagaaagaggttccttcattcagtaacttagttttcccttaataaatatttcaaaaataaaaccaatcatcatcaaacaaacaggagccacttttgtaggtaaggtaaatcacaggataatgtattgggataactctgtttttttaaaataaaaaagccttacatggtcagggattgatggagtggggatgacaaatgcacatttcagactttcatcaccaatgaaaaaataaagcattttcatagacttaaaactgtc

SEQ ID NO: 124655 - DNA, 575 bp, Homo sapiens
  Payload ID: 4486
  Gene Symbol: CYFIP1
  Gene Name: cytoplasmic FMR1 interacting protein 1
  ENST ID: ENST00000619037
  CDS Start-End: 96-329
actcactcggccaaggaaactcccagggcccgcccaggacccccaagccgccgcggacgcagaacaggggtccttatgtgttgttccagcccaggatggcggcccaggtgactctggaggacgcgctgtccaacgtggacctcctggaggagctgcccctgcccgaccagcagccctgcatcgagcccccgccatcctcgctgctctaccagccaaatttcaacactaactttgaagacagaaatgcatttgttactggcatcgcaagatacattgaacaagccaccgtccactctagcatgtgtaaaaacaatacatgctggttctgaaaattcaatgtctctggcccagagaaaacctttgtcagcgtttcaagggtgcacctgccctgttaatgctcattccctctccagatctgcacccacacacaccagaacgagatgctggaggagggccaagaatatgctgtcatgctgtacacctggaggagctgctcccgggccatcccacaggtgaaatgtaacgagcagcctaacagagtggaaatctacgagaaaaccgtggaggttctggag

SEQ ID NO: 124656 - DNA, 6793 bp, Homo sapiens
  Payload ID: 4486
  Gene Symbol: CYFIP1
  Gene Name: cytoplasmic FMR1 interacting protein 1
  Uniprot ID: Q7L576
  ENST ID: ENST00000617928
  CDS Start-End: 56-3817
aggaaactcccagggcccgcccaggacccccaagccgccgcggacgcagcccaggatggcggcccaggtgactctggaggacgcgctgtccaacgtggacctcctggaggagctgcccctgcccgaccagcagccctgcatcgagcccccgccatcctcgctgctctaccagccaaatttcaacactaactttgaagacagaaatgcatttgttactggcatcgcaagatacattgaacaagccaccgtccactctagcatgaacgagatgctggaggagggccaagaatatgctgtcatgctgtacacctggaggagctgctcccgggccatcccacaggtgaaatgtaacgagcagcctaacagagtggaaatctacgagaaaaccgtggaggttctggagcctgaggtcacaaaactgatgaatttcatgtacttccagagaaatgccattgagcgtttctgcggggaagtgaggcgcctgtgccatgccgagaggaggaaggacttcgtgtcagaagcctacctgatcacactgggcaaattcatcaacatgttcgctgtgctggacgagctgaagaacatgaagtgcagtgtgaagaacgaccactcagcgtacaagagggccgctcagtttttacgtaaaatggcagatccacagtccatccaggaatcgcagaatctgtccatgttcctggccaatcataacaagatcacacagtctctgcagcagcagctcgaagtgatttctggctacgaagagctcctggcagatattgtgaatctgtgtgtggattactacgagaacaggatgtatttgacgcccagtgagaaacacatgcttctcaaagtcatgggatttggtctgtacctgatggatgggagtgtcagtaacatctataagttggatgccaagaaaagaataaacttatccaaaatcgacaagtacttcaagcaactccaggtggttccgctatttggggacatgcaaatagaactggcaagatatatcaagaccagcgcccactacgaggaaaataaatctcgatggacgtgcacatcctccggcagcagccctcagtacaacatctgcgagcagatgatccagatccgcgaggaccacatgcgcttcatttcggagctggcgcgctacagcaacagcgaggtggtcacgggctcgggccgccaggaggcccagaagacggacgcggagtaccgcaagctcttcgacctggcgctgcagggcctgcagctgttgtcgcagtggagcgcgcacgtgatggaagtgtattcctggaagcttgtgcaccccaccgacaagtactccaacaaggactgccccgacagcgctgaagagtacgagcgtgccacgcgctacaactacaccagcgaggagaagtttgccctagtggaggtgatcgccatgatcaaaggcctgcaggtgctgatgggcaggatggagagcgtgttcaaccacgccatccggcacaccgtctatgccgcactgcaggacttctcccaggtgacccttagggagccgctgcggcaggccatcaagaagaagaagaacgtcatccagagtgtcctgcaggccatcaggaagaccgtgtgtgactgggagacggggcatgagcccttcaatgacccagccttgcggggcgagaaggaccccaagagcggcttcgacataaaagtaccacgccgcgccgtgggaccctccagcactcagctttacatggtgagaaccatgctagagtccctcattgcagacaaaagtggttccaagaaaaccttgagaagtagccttgaggggcccaccatattggacatagaaaaatttcatcgagagtcattcttctacactcacttgataaatttcagtgaaacgctgcagcagtgctgtgacctttcgcagctgtggttccgagagttcttcctggagctgaccatgggcaggaggatccagttccccattgagatgtcgatgccctggatcctgacggaccacatcctggagaccaaggaggcatcgatgatggagtacgtgctctactccctggacctgtacaatgacagcgcccactacgcgctcaccaggttcaacaagcagttcctgtacgacgaaattgaggccgaggtgaatctatgttttgaccaatttgtttacaagctagcagaccagatatttgcctattataaggttatggcaggaagtttgcttcttgataaacggttacgatcagaatgcaagaatcagggagccacgatccacctcccgccgtctaaccgctacgagacgctgctgaagcagaggcatgtgcagctcctcggcagatcaatagacctcaatcgtctgatcacccagcgcgtctcagcagccatgtataagtccctagaactggcgattggacgatttgaaagtgaagatttgacctccatagttgagctggatggcctgttggaaatcaaccgcatgacccacaagctgctgagccggtacctgacgctggacggcttcgacgccatgttccgggaggccaaccacaacgtgtcagcgccctacgggaggatcaccctgcacgtcttctgggagctcaactatgacttcctgcccaactactgctacaacggctctaccaaccggtttgttcggacagtgttaccattttctcaggaatttcaaagagataagcagcctaatgcacagcctcagtatctgcatggatccaaggctttgaacttggcctactccagcatttacggcagctaccggaacttcgtgggacctccacactttcaagtcatctgccggcttctcggctaccagggtatcgccgtggtcatggaggagctgctgaaggtcgtcaagagcctgctgcaaggcacaatcctgcagtacgtgaagacgctgatggaggtgatgcccaagatctgccgcctgccccggcacgagtacggctctcctggtatcctggagttcttccaccaccagctgaaggacatcgtggagtacgcagagctgaagacggtgtgcttccagaacctgcgggaggtggggaacgccatcctcttctgcctgctcatcgagcagagcctgtctttagaagaagtgtgtgacctgctgcacgcggctcctttccagaacatcttgccgcgagtccatgtgaaagagggggagagacttgatgccaaaatgaaaagactagaatcaaagtacgccccgctgcatcttgtcccactgattgaaagactggggacccctcagcaaattgccatcgcaagagagggggacctgctgacaaaggagcgcctctgctgcggcctgtccatgtttgaggtcatcctgacacggatccggagctttctggatgaccccatctggcgcgggcctctgcccagcaatggggtcatgcatgtggacgagtgtgtggagtttcacagactgtggagtgccatgcagtttgtctactgcattcccgtggggacacacgagttcacagtcgagcagtgctttggtgatgggctacactgggctggctgtatgatcatcgtacttcttgggcagcagcggcgttttgctgtgctggatttctgctaccatctacttaaagtccagaaacatgatggcaaagatgagattattaaaaatgtgcctttgaagaagatggtggagagaattcgcaagttccagattctcaatgatgagatcatcaccatcctggataagtacctgaagtcaggcgacggggagggcacgccagtggagcatgtgcgctgcttccagccgcccatccaccagtccctcgccagcagctgagggcacgcgctgcactccgtaactcaacatggcatgcctttctctccgtaaactatttagtgagatttttagggactatttttcagtatctctgtacctgttaaagggggtgcttttcgatctaaaaacttaattttataaaattgacttatttttctagactaaaattgtatatgcttttggtaattaggaactcttgagaatattggctgctgattgttgccatcacgttcctacaaaattgtttttctatgggatgttctggcagctgtgtcataaaatgctgctgggttcattcattcattccataagaaacttaataccagcaaatgcattaaatcccttgccagttaccattaactgtaactatttagcttttgtttagggatctttctgatggtcttttatgagcaatcttagttctaagtcattgttcccatcccttttttgtgtgtttcagaaaatagtgaacttgattcccctgcttccactaaatccagttgtgacaaaatctaacgtgacatcagatcgaaaggttatagaaataaaactaatgagatctatttgtgttcatttatttactctaaccctgtgctgcctggcttggcaaggaactctaacctgaactcacataccaggccagctgggatggaggtcacctctaaggctgaggtgggatgggaccgtgacaccatcccatataccgctcacctcagcacaggtttagctttatatttagggttccgcaggcaaatgaggtgtaaaacggccgtgttggctgctccaatctggatatgaagaggctactcagtgcctctctgttacctgtgcccatgacctggaggaagccagcaatgtgggaggagatcagtcaggcccagtgggtgctgcacaaagggaccgggagcaccgagtccagccttcagctgtccccgatccacagggctcacatggctggagctggttcacatgatctgtcagaatgaaaaacaatcggtctagactaccagtagagtcacgaacatgtttgagaaactaaagccatattttaaaaagtactaaggcaatgaggttctgaaaatcctaactaactgaatggaaaaagatgctatgcctgtttattgtagatgaatactacagataaacacaagtccagcatgattaactgaactcactttatattgtagcctggcagtcattttacattatttggagtattgcaaccttcaccaattttaaaattttctatggatgccaagttgccataaaaagcaggcctcgcctacttttccggaggcctttggaaactgtccagaagcatatgatgcacggcacagaaaagtagtaagtgtacgaaccatcctgttacactgccaaactcactcaagtgacatgaagcctaacaaacaattattctttctttataaaaagttccctaaaaatgcttttggtaatgtgaattaataaccctggggccagcattctgctgcagatttagaggtggtagctgtgcttatcttagaaactacagaataggatgaaaaattatggtaaaacttaatcaattaccaagttttataaggcttaattatataccaaatatgtaataccttaggtataagacaatctcaagtgctacaaaatgttaaataagaatttattatttattaacctatgcatgttcaaatgagtctctgtcctcaagggggagaaaactggttcttttatgtacaaagcacagatgtaggtacagtatataaacagatacgtagtacatctgtagtattaaaatggcatgggaggaggcagttagaaaaaacatctaaaacagctccttagaaggccaataataaagttggaaaaaagggagtttccacgcagccagtggtgagctgcatgggataccagcaccattggcaggggaggccctcggggagtgatggcttggcgctggcgcaccactgggtaacctccaggcaggagccacaggctggaacaggcgaacactttcttcccatcacctaggtggaaattaattctgccaatacttttttttaaaggccagtcaatggttatgagtggataggttcaaagctgaatggagttcattagaccttttttattattctaccttttctgcatatgtttgcagttttccatcgacttcttcataaacaaacattttctagaaaccaaaatatgtagtggcccaaaggagctcttaagcaaagtacttggtacaaagagaccatattctataaacatgttaagtttgttctaagcattcagacttttagaataagaacttcatttcaactttttattataacatgagctaaatttaagaaacaaccctagtcttctatttcccagagctgttcaaagtctaaatgacaatataactcattatgaaaatatactgaaaagtacaagagctgatgtaaaacggtaatcaaggttccaggcatcatgggattagggtaactgaagaataaacccagccaggctgcaacagcaggcaggatgtgctggcttgatgaggtgctaaggccatcgaatgctcagaggaagccggattcacggtgatcatctcaacctgagaaatcgttccttggggtgatttctgcccttttttttgttttgtaagaaagaggttccttcattcagtaacttagttttcccttaataaatatttcaaaaataaaaccaatcatcatcaaacaaacaggagccacttttgtaggtaaggtaaatcacaggataatgtattgggataactctgtttttttaaaataaaaaagccttacatggtcagggattgatggagtggggatgacaaatgcacatttcagactttcatcaccaatgaaaaaataaagcattttcatagacttaaaactgtcattagtgcattcggcttttggagaagggatgaaaatgtaaaatacttctacaacaataaaatgttaatagaaa

SEQ ID NO: 124657 - DNA, 583 bp, Homo sapiens
  Payload ID: 4486
  Gene Symbol: CYFIP1
  Gene Name: cytoplasmic FMR1 interacting protein 1
  ENST ID: ENST00000622576
  CDS Start-End: 1-137
tgtgtgactgggagacggggcatgagcccttcaatgacccagccttgcggggcgagaaggaccccaagagcggcttcgacataaaagtaccacgccgcgccgtgggaccctccagcactcaggttctcgtcccttgagccccgcctgcaccctctccctggggggacccaccctgagctgtgagcgggtggggctggtgaggcccgggttaaatgaggtcctcgctgcctgctcaggcagagaaagtggcgcctgtggtttctgctgctcctctgtttcccacccaactctacctggtgcgcaccatggccgagtccttgggctctgccgagctgctcaggcagctcaagtctctgggcatggagaggctcttgcatgcggttaacacgtttctgaggcagtcgtgcacctacctaccccttttaacctttggtgctttacatggtgagaaccatgctagagtccctcattgcagacaaaagtggttccaagaaaaccttgagaagtagccttgaggggcccaccatattggacatagaaaaatttcatcgagagtcattcttctacactcacttgataaatt

SEQ ID NO: 124658 - DNA, 553 bp, Homo sapiens; identical to SEQ ID NO: 124652
  Payload ID: 4486
  Gene Symbol: CYFIP1
  Gene Name: cytoplasmic FMR1 interacting protein 1
  ENST ID: ENST00000626546
  CDS Start-End: 1-553

SEQ ID NO: 124659 - DNA, 2779 bp, Homo sapiens
  Payload ID: 4486
  Gene Symbol: CYFIP1
  Gene Name: cytoplasmic FMR1 interacting protein 1
  ENST ID: ENST00000628954
  CDS Start-End: 192-2779
agtgactcactcggccaaggaaactcccagggcccgcccaggacccccaagccgccgcggacgcagaatgtggctcagctgcccctggtcccatcccagggcagagctcctcctgagtacccttgagactggagcagattcagcagaaggcagattgccccctctccctggagctggctctgaagcccaggatggcggcccaggtgactctggaggacgcgctgtccaacgtggacctcctggaggagctgcccctgcctgaccagcagccctgcatcgagcccccgccatcctcgctgctctaccagccaaatttcaacactaactttgaagacagaaatgcatttgttactggcatcgcaagatacattgaacaagccaccgtccactctagcatgaacgagatgctggaggagggccaagaatatgctgtcatgctgtacacctggaggagctgctcccgggccatcccacaggtgaaatgtaacgagcagcctaacagagtggaaatctacgagaaaaccgtggaggttctggagcctgaggtcacaaaactgatgaatttcatgtacttccagagaaatgccattgagcgtttctgcggggaagtgaggcgcctgtgccatgccgagaggaggaaggacttcgtgtcagaagcctacctgatcacactgggcaaattcatcaacatgttcgctgtgctggacgagctgaagaacatgaagtgcagtgtgaagaacgaccactcagcgtacaagagggccgctcagtttttacgtaaaatggcagatccacagtccatccaggaatcgcagaatctgtccatgttcctggccaatcataacaagatcacacagtctctgcagcagcagctcgaagtgatttctggctacgaagagctcctggcagatattgtgaatctgtgtgtggattactacgagaacaggatgtatttgacgcccagtgagaaacacatgcttctcaaagtcatgggatttggtctgtacctgatggatgggagtgtcagtaacatctataagttggatgccaagaaaagaataaacttatccaaaatcgacaagtacttcaagcaactccaggtggttccgctatttggggacatgcaaatagaactggcaagatatatcaagaccagcgcccactacgaggaaaataaatctcgatggacgtgcacatcctccggcagcagccctcagtacaacatctgcgagcagatgatccagatccgcgaggaccacatgcgcttcatttcggagctggcgcgctacagcaacagcgaggtggtcacgggctcgggccgccaggaggcccagaagacggacgcggagtaccgcaagctcttcgacctggcgctgcagggcctgcagctgttgtcgcagtggagcgcgcacgtgatggaagtgtattcctggaagcttgtgcaccccaccgacaagtactccaacaaggactgccccgacagcgctgaagagtacgagcgtgccacgcgctacaactacaccagcgaggagaagtttgccctagtggaggtgatcgccatgatcaaaggcctgcaggtgctgatgggcaggatggagagcgtgttcaaccacgccatccggcacaccgtctatgccgcactgcaggacttctcccaggtgacccttagggagccgctgcggcaggccatcaagaagaagaagaacgtcatccagagtgtcctgcaggccatcaggaagaccgtgtgtgactgggagacggggcatgagcccttcaatgacccagccttgcggggcgagaaggaccccaagagcggcttcgacataaaagtaccacgccgcgccgtgggaccctccagcactcagctttacatggtgagaaccatgctagagtccctcattgcagacaaaagtggttccaagaaaaccttgagaagtagccttgaggggcccaccatattggacatagaaaaatttcatcgagagtcattcttctacactcacttgataaatttcagtgaaacgctgcagcagtgctgtgacctttcgcagctgtggttccgagagttcttcctggagctgaccatgggcaggaggatccagttccccattgagatgtcgatgccctggatcctgacggaccacatcctggagaccaaggaggcatcgatgatggagtacgtgctctactccctggacctgtacaatgacagcgcccactacgcgctcaccaggttcaacaagcagttcctgtacgacgaaattgaggccgaggtgaatctatgttttgaccaatttgtttacaagctagcagaccagatatttgcctattataaggttatggcaggaagtttgcttcttgataaacggttacgatcagaatgcaagaatcagggagccacgatccacctcccgccgtctaaccgctacgagacgctgctgaagcagaggcatgtgcagctcctcggcagatcaatagacctcaatcgtctgatcacccagcgcgtctcagcagccatgtataagtccctagaactggcgattggacgatttgaaagtgaagatttgacctccatagttgagctggatggcctgttggaaatcaaccgcatgacccacaagctgctgagccggtacctgacgctggacagcttcgacgccatgttccgggaggccaaccacaacgtgtcagcgccctacgggaggatcaccctgcacgtcttctgggagctcaactatgacttcctgcccaactactgctacaacggctctaccaaccg

SEQ ID NO: 124660 - DNA, 2643 bp, Homo sapiens
  Payload ID: 4486
  Gene Symbol: CYFIP1
  Gene Name: cytoplasmic FMR1 interacting protein 1
  ENST ID: ENST00000625276
  CDS Start-End: 56-2643
aggaaactcccagggcccgcccaggacccccaagccgccgcggacgcagcccaggatggcggcccaggtgactctggaggacgcgctgtccaacgtggacctcctggaggagctgcccctgcctgaccagcagccctgcatcgagcccccgccatcctcgctgctctaccagccaaatttcaacactaactttgaagacagaaatgcatttgttactggcatcgcaagatacattgaacaagccaccgtccactctagcatgaacgagatgctggaggagggccaagaatatgctgtcatgctgtacacctggaggagctgctcccgggccatcccacaggtgaaatgtaacgagcagcctaacagagtggaaatctacgagaaaaccgtggaggttctggagcctgaggtcacaaaactgatgaatttcatgtacttccagagaaatgccattgagcgtttctgcggggaagtgaggcgcctgtgccatgccgagaggaggaaggacttcgtgtcagaagcctacctgatcacactgggcaaattcatcaacatgttcgctgtgctggacgagctgaagaacatgaagtgcagtgtgaagaacgaccactcagcgtacaagagggccgctcagtttttacgtaaaatggcagatccacagtccatccaggaatcgcagaatctgtccatgttcctggccaatcataacaagatcacacagtctctgcagcagcagctcgaagtgatttctggctacgaagagctcctggcagatattgtgaatctgtgtgtggattactacgagaacaggatgtatttgacgcccagtgagaaacacatgcttctcaaagtcatgggatttggtctgtacctgatggatgggagtgtcagtaacatctataagttggatgccaagaaaagaataaacttatccaaaatcgacaagtacttcaagcaactccaggtggttccgctatttggggacatgcaaatagaactggcaagatatatcaagaccagcgcccactacgaggaaaataaatctcgatggacgtgcacatcctccggcagcagccctcagtacaacatctgcgagcagatgatccagatccgcgaggaccacatgcgcttcatttcggagctggcgcgctacagcaacagcgaggtggtcacgggctcgggccgccaggaggcccagaagacggacgcggagtaccgcaagctcttcgacctggcgctgcagggcctgcagctgttgtcgcagtggagcgcgcacgtgatggaagtgtattcctggaagcttgtgcaccccaccgacaagtactccaacaaggactgccccgacagcgctgaagagtacgagcgtgccacgcgctacaactacaccagcgaggagaagtttgccctagtggaggtgatcgccatgatcaaaggcctgcaggtgctgatgggcaggatggagagcgtgttcaaccacgccatccggcacaccgtctatgccgcactgcaggacttctcccaggtgacccttagggagccgctgcggcaggccatcaagaagaagaagaacgtcatccagagtgtcctgcaggccatcaggaagaccgtgtgtgactgggagacggggcatgagcccttcaatgacccagccttgcggggcgagaaggaccccaagagcggcttcgacataaaagtaccacgccgcgccgtgggaccctccagcactcagctttacatggtgagaaccatgctagagtccctcattgcagacaaaagtggttccaagaaaaccttgagaagtagccttgaggggcccaccatattggacatagaaaaatttcatcgagagtcattcttctacactcacttgataaatttcagtgaaacgctgcagcagtgctgtgacctttcgcagctgtggttccgagagttcttcctggagctgaccatgggcaggaggatccagttccccattgagatgtcgatgccctggatcctgacggaccacatcctggagaccaaggaggcatcgatgatggagtacgtgctctactccctggacctgtacaatgacagcgcccactacgcgctcaccaggttcaacaagcagttcctgtacgacgaaattgaggccgaggtgaatctatgttttgaccaatttgtttacaagctagcagaccagatatttgcctattataaggttatggcaggaagtttgcttcttgataaacggttacgatcagaatgcaagaatcagggagccacgatccacctcccgccgtctaaccgctacgagacgctgctgaagcagaggcatgtgcagctcctcggcagatcaatagacctcaatcgtctgatcacccagcgcgtctcagcagccatgtataagtccctagaactggcgattggacgatttgaaagtgaagatttgacctccatagttgagctggatggcctgttggaaatcaaccgcatgacccacaagctgctgagccggtacctgacgctggacagcttcgacgccatgttccgggaggccaaccacaacgtgtcagcgccctacgggaggatcaccctgcacgtcttctgggagctcaactatgacttcctgcccaactactgctacaacggctctaccaaccg

SEQ ID NO: 124661 - DNA, 575 bp, Homo sapiens
  Payload ID: 4486
  Gene Symbol: CYFIP1
  Gene Name: cytoplasmic FMR1 interacting protein 1
  ENST ID: ENST00000627816
  CDS Start-End: 96-329
actcactcggccaaggaaactcccagggcccgcccaggacccccaagccgccgcggacgcagaacaggggtccttatgtgttgttccagcccaggatggcggcccaggtgactctggaggacgcgctgtccaacgtggacctcctggaggagctgcccctgcctgaccagcagccctgcatcgagcccccgccatcctcgctgctctaccagccaaatttcaacactaactttgaagacagaaatgcatttgttactggcatcgcaagatacattgaacaagccaccgtccactctagcatgtataaaaacaatacatgctggttctgaaaattcaatgtctctggcccagagaaaacctttgtcagcgtttcaagggtgcgcctgccctgttaatgctcattccctctccagatctgcacccacacacaccagaacgagatgctggaggagggccaagaatatgctgtcatgctgtacacctggaggagctgctcccgggccatcccacaggtgaaatgtaacgagcagcctaacagagtggaaatctacgagaaaaccgtggaggttctggag

SEQ ID NO: 124662 - DNA, 582 bp, Homo sapiens
  Payload ID: 4486
  Gene Symbol: CYFIP1
  Gene Name: cytoplasmic FMR1 interacting protein 1
  ENST ID: ENST00000627204
  CDS Start-End: 1-137
tgtgtgactgggagacggggcatgagcccttcaatgacccagccttgcggggcgagaaggaccccaagagcggcttcgacataaaagtaccacgccgcgccgtgggaccctccagcactcaggttctcgtcccttgagccccgcctgcacctctccctggggggacccaccctgagctgtgagcgggtggggctggtgaggcccgggttaaatgaggtcctcgctgcctgctcaggcagagaaagtggcgcctgtggtttctgctgctcctctgtttcccacccaactctacctggtgcgcaccatggccgagtccttgggctctgccgagctgctcaggcagctcaagtctctgggcatggagaggctcttgcatgcggttaacacgtttctgaggcagtcgtgcacctacctaccccttttaacctttggtgctttacatggtgagaaccatgctagagtccctcattgcagacaaaagtggttccaagaaaaccttgagaagtagccttgaggggcccaccatattggacatagaaaaatttcatcgagagtcattcttctacactcacttgataaatt

SEQ ID NO: 124663 - DNA, 544 bp, Homo sapiens
  Payload ID: 4486
  Gene Symbol: CYFIP1
  Gene Name: cytoplasmic FMR1 interacting protein 1
  ENST ID: ENST00000628747
  CDS Start-End: 62-544
agttttcctaaacacgcctgtgaccagctgactccactcagcgtttccgtgtgagcccaggatggcggcccaggtgactctggaggacgcgctgtccaacgtggacctcctggaggagctgcccctgcctgaccagcagccctgcatcgagcccccgccatcctcgctgctctaccagccaaatttcaacactaactttgaagacagaaatgcatttgttactggcatcgcaagatacattgaacaagccaccgtccactctagcatgaacgagatgctggaggagggccaagaatatgctgtcatgctgtacacctggaggagctgctcccgggccatcccacaggtgaaatgtaacgagcagcctaacagagtggaaatctacgagaaaaccgtggaggttctggagcctgaggtcacaaaactgatgaatttcatgtacttccagagaaatgccattgagcgtttctgcggggaagtgaggcgcctgtgccatgccgagaggaggaaggacttcgtgtcagaagcctacctgatcacactg

SEQ ID NO: 124664 - DNA, 582 bp, Homo sapiens
  Payload ID: 4486
  Gene Symbol: CYFIP1
  Gene Name: cytoplasmic FMR1 interacting protein 1
  ENST ID: ENST00000630158
  CDS Start-End: 130-582
gtgtttcctggcgcattcccggccagcccgagtgactcactcggccaaggaaactcccagggcccgcccaggacccccaagccgccgcggacgcagaacaggggtccttatgtgttgttccagcccaggatggcggcccaggtgactctggaggacgcgctgtccaacgtggacctcctggaggagctgcccctgcctgaccagcagccctgcatcgagcccccgccatcctcgctgctctaccagccaaatttcaacactaactttgaagacagaaatgcatttgttactggcatcgcaagatacattgaacaagccaccgtccactctagcatgaacgagatgctggaggagggccaagaatatgctgtcatgctgtacacctggaggagctgctcccgggccatcccacaggtgaaatgtaacgagcagcctaacagagtggaaatctacgagaaaaccgtggaggttctggagcctgaggtcacaaaactgatgaatttcatgtacttccagagaaatgccattgagcgtttctgcggggaagtgaggcgcctgtgccatgccgagaggaggaaggac

SEQ ID NO: 124665 - DNA, 3673 bp, Homo sapiens
  Payload ID: 4487
  Gene Symbol: CYFIP2
  Gene Name: cytoplasmic FMR1 interacting protein 2
  ENST ID: ENST00000435847
  CDS Start-End: 97-3450
agagcatcctgcgccccggcgcggggccctgcggtagcctcaggcccctcccctggacccgccgcagagccagtgcagaatacagaaactgcagccatgaccacgcacgtcaccctggaagatgccctgtccaacgtggacctgcttgaagagcttcccctccccgaccagcagccatgcatcgagcctccaccttcctccatcatgtaccaggctaactttgacacaaactttgaggacaggaatgcatttgtcacgggcattgcaaggtacattgagcaggctacagtccactccagcatgaatgagatgctggaggaaggacatgagtatgcggtcatgctgtacacctggcgcagctgttcccgggccattccccaggtgaaatgcaacgagcagcccaaccgagtagagatctatgagaagacagtagaggtgctggagccggaggtcaccaagctcatgaagttcatgtattttcaggtgatgggctttggcctctacctaatggatggaaatgtcagtaacatttacaaactggatgccaagaagagaattaatcttagcaaaattgataaattctttaagcagctgcaggtggtgccccttttcggcgacatgcagatagagctggccagatacattaagaccagtgctcactatgaagagaacaagtccaagtggacgtgcacccagagcagcatcagcccccagtacaatatctgcgagcagatggttcagatccgggatgaccacatccgcttcatctccgagctcgctcgctacagcaacagtgaggtggtgacgggctcagggctggacagccagaagtcagacgaggagtatcgcgagctcttcgacctagccctgcggggtctgcagcttctatccaagtggagcgcccacgtcatggaggtgtactcttggaagctggttcatcccacagacaagttctgcaacaaggactgtcctggcaccgcggaggaatatgagagagccacacgctacaattacaccagtgaggaaaaatttgccttcgttgaggtgatcgccatgatcaaaggcctgcaggtgctcatgggcaggatggagagcgtcttcaaccaggccatcaggaacaccatctacgcggcattgcaggacttcgcccaggtgacgctgcgtgagcccctgcggcaggcggtacggaagaagaagaatgtcctcatcagcgtcctacaggcaattcgaaagaccatctgtgactgggagggagggcgagagccccctaatgacccatgcttgagaggggagaaggaccccaaaggtggatttgatatcaaggtgccccggcgtgctgtggggccatccagcacacagctgtacatggtgcggaccatgcttgaatcactcattgcagacaaaagcggctccaagaagaccctgaggagcagcctggatggacccattgtcctcgccatagaggactttcacaaacagtccttcttcttcacacatctgctcaacatcagtgaagccctgcagcagtgttgtgacctctcccagctctggttccgagaattcttcctggagttaaccatgggccgacgaatccagttccccatcgagatgtccatgccctggattctaacggaccatatcctggaaaccaaagaaccttccatgatggagtatgtcctctaccctctggatctgtacaacgacagcgcctactatgctctgaccaagtttaaaaagcagttcctgtacgatgagatagaagctgaggtgaacctgtgttttgatcagtttgtctacaagctggcagaccagatctttgcttactacaaagccatggctggcagtgtcctgttggataaacgttttcgagctgagtgtaagaattatggcgtcatcattccgtatccaccgtccaatcgctatgaaacactgctgaagcagagacacgtccagctgttgggtagatcaattgacttgaacagactcattacccagcgcatctctgccgccatgtataaatccttggaccaagctatcagccgctttgagagtgaggacctgacctccattgtggagctggagtggctgctggagattaaccggctcacgcatcggctgctctgtaagcatatgacgctggacagcttcgatgccatgttccgagaggccaatcacaatgtgtccgccccctatggccgtatcaccctgcatgtcttctgggaactgaactttgactttctccccaactactgctacaatgggtccactaaccgttttgtgcggactgccattcctttcacccaagaaccacaacgagacaaacctgccaacgtccagccttattacctctatggatccaagcctctcaacattgcctacagccacatctacagctcctacaggaatttcgtggggccacctcatttcaagactatctgcagactcctgggttatcagggcatcgctgtggtcatggaggaactgctaaagattgtgaagagcttgctccaaggaaccattctccagtatgtgaaaacactgatagaggtgatgcccaagatatgccgcttgccccgacatgagtatggctccccagggatcctggagttcttccaccaccagctgaaggacatcattgagtacgcagagctcaaaacagacgtgttccagagcctgagggaagtgggcaatgccatcctcttctgcctcctcatagagcaagctctgtctcaggaggaggtctgcgatttgctccatgccgcacccttccaaaacatcttgcctagagtctacatcaaagagggggagcgcctggaggtccggatgaaacgtctggaagccaagtatgccccgctccacctggtccctctgatcgagcggctggggacccctcagcaaatcgccattgctcgcgagggtgacctcctgaccaaggagcggctgtgctgtggcctgtccatgttcgaggtcatcctgacccgcattcggagctacctgcaggaccccatctggcggggcccaccgcccaccaatggcgtcatgcacgtcgatgagtgtgtggagttccaccggctgtggagcgccatgcagttcgtgtactgcatccctgtgggaaccaacgagttcacagctgagcagtgtttcggcgatggcttgaactgggctggttgctccatcattgtcctgctgggccagcagcgtcgctttgacctgttcgacttctgttaccacctgctaaaagtgcagaggcaggacgggaaggatgaaatcattaagaatgtgcccctgaagaagatggccgaccggatcaggaagtatcagatcttgaacaatgaggtttttgccatcctgaacaaatacatgaagtccgtggagacagacagttccactgtggagcatgtgcgctgcttccagccacccatccaccagtccttggccaccacttgctaagcagaagatcctgcagacccttatctggaggaggaagagaagcaggagagagaaagccacagccagcctgccataggatccaactggacaacgtgtgggatggacctggaaacaagcacctccccaaacacatcaccactccctagggcggggcctgtgcatgctctcccatgacatctccatgctggtttctccatagcataaatgaaaaaaaaaaaaaaaa

SEQ ID NO: 124666 - DNA, 3477 bp, Homo sapiens
  Payload ID: 4487
  Gene Symbol: CYFIP2
  Gene Name: cytoplasmic FMR1 interacting protein 2
  ENST ID: ENST00000522463
  CDS Start-End: 97-3270
agagcatcctgcgccccggcgcggggccctgcggtagcctcaggcccctcccctggacccgccgcagagccagtgcagaatacagaaactgcagccatgaccacgcacgtcaccctggaagatgccctgtccaacgtggacctgcttgaagagcttcccctccccgaccagcagccatgcatcgagcctccaccttcctccatcatgtaccaggctaactttgacacaaactttgaggacaggaatgcatttgtcacgggcattgcaaggtacattgagcaggctacagtccactccagcatggtgatgggctttggcctctacctaatggatggaaatgtcagtaacatttacaaactggatgccaagaagagaattaatcttagcaaaattgataaattctttaagcagctgcaggtggtgccccttttcggcgacatgcagatagagctggccagatacattaagaccagtgctcactatgaagagaacaagtccaagtggacgtgcacccagagcagcatcagcccccagtacaatatctgcgagcagatggttcagatccgggatgaccacatccgcttcatctccgagctcgctcgctacagcaacagtgaggtggtgacgggctcagggctggacagccagaagtcagacgaggagtatcgcgagctcttcgacctagccctgcggggtctgcagcttctatccaagtggagcgcccacgtcatggaggtgtactcttggaagctggttcatcccacagacaagttctgcaacaaggactgtcctggcaccgcggaggaatatgagagagccacacgctacaattacaccagtgaggaaaaatttgccttcgttgaggtgatcgccatgatcaaaggcctgcaggtgctcatgggcaggatggagagcgtcttcaaccaggccatcaggaacaccatctacgcggcattgcaggacttcgcccaggtgacgctgcgtgagcccctgcggcaggcggtacggaagaagaagaatgtcctcatcagcgtcctacaggcaattcgaaagaccatctgtgactgggagggagggcgagagccccctaatgacccatgcttgagaggggagaaggaccccaaaggtggatttgatatcaaggtgccccggcgtgctgtggggccatccagcacacagctgtacatggtgcggaccatgcttgaatcactcattgcagacaaaagcggctccaagaagaccctgaggagcagcctggatggacccattgtcctcgccatagaggactttcacaaacagtccttcttcttcacacatctgctcaacatcagtgaagccctgcagcagtgttgtgacctctcccagctctggttccgagaattcttcctggagttaaccatgggccgacgaatccagttccccatcgagatgtccatgccctggattctaacggaccatatcctggaaaccaaagaaccttccatgatggagtatgtcctctaccctctggatctgtacaacgacagcgcctactatgctctgaccaagtttaaaaagcagttcctgtacgatgagatagaagctgaggtgaacctgtgttttgatcagtttgtctacaagctggcagaccagatctttgcttactacaaagccatggctggcagtgtcctgttggataaacgttttcgagctgagtgtaagaattatggcgtcatcattccgtatccaccgtccaatcgctatgaaacactgctgaagcagagacacgtccagctgttgggtagatcaattgacttgaacagactcattacccagcgcatctctgccgccatgtataaatccttggaccaagctatcagccgctttgagagtgaggacctgacctccattgtggagctggagtggctgctggagattaaccggctcacgcatcggctgctctgtaagcatatgacgctggacagcttcgatgccatgttccgagaggccaatcacaatgtgtccgccccctatggccgtatcaccctgcatgtcttctgggaactgaactttgactttctccccaactactgctacaatgggtccactaaccgttttgtgcggactgccattcctttcacccaagaaccacaacgagacaaacctgccaacgtccagccttattacctctatggatccaagcctctcaacattgcctacagccacatctacagctcctacaggaatttcgtggggccacctcatttcaagactatctgcagactcctgggttatcagggcatcgctgtggtcatggaggaactgctaaagattgtgaagagcttgctccaaggaaccattctccagtatgtgaaaacactgatagaggtgatgcccaagatatgccgcttgccccgacatgagtatggctccccagggatcctggagttcttccaccaccagctgaaggacatcattgagtacgcagagctcaaaacagacgtgttccagagcctgagggaagtgggcaatgccatcctcttctgcctcctcatagagcaagctctgtctcaggaggaggtctgcgatttgctccatgccgcacccttccaaaacatcttgcctagagtctacatcaaagagggggagcgcctggaggtccggatgaaacgtctggaagccaagtatgccccgctccacctggtccctctgatcgagcggctggggacccctcagcaaatcgccattgctcgcgagggtgacctcctgaccaaggagcggctgtgctgtggcctgtccatgttcgaggtcatcctgacccgcattcggagctacctgcaggaccccatctggcggggcccaccgcccaccaatggcgtcatgcacgtcgatgagtgtgtggagttccaccggctgtggagcgccatgcagttcgtgtactgcatccctgtgggaaccaacgagttcacagctgagcagtgtttcggcgatggcttgaactgggctggttgctccatcattgtcctgctgggccagcagcgtcgctttgacctgttcgacttctgttaccacctgctaaaagtgcagaggcaggacgggaaggatgaaatcattaagaatgtgcccctgaagaagatggccgaccggatcaggaagtatcagatcttgaacaatgaggtttttgccatcctgaacaaatacatgaagtccgtggagacagacagttccactgtggagcatgtgcgctgcttccagccacccatccaccagtccttggccaccacttgctaagcagaagatcctgcagacccttatctggaggaggaagagaagcaggagagagaaagccacagccagcctgccataggatccaactggacaacgtgtgggatggacctggaaacaagcacctccccaaacacatcaccactccctagggcggggcctgtgcatgctctcccatgacatctccatgctggtttctccatagcataaatg

SEQ ID NO: 124667 - DNA, 580 bp, Homo sapiens
  Payload ID: 4487
  Gene Symbol: CYFIP2
  Gene Name: cytoplasmic FMR1 interacting protein 2
  ENST ID: ENST00000522637
  CDS Start-End: 92-298
atcctgcgccccggcgcggggccctgcggtagcctcaggcccctcccctggacccgccgcagagccagtgcagaatacagaaactgcagccatgaccacgcacgtcaccctggaagatgccctgtccaacgtggacctgcttgaagagcttcccctccccgaccagcagccatgcatcgagcctccaccttcctccatcatgtaccaggctaactttgacacaaactttgaggacaggaatgcatttgtcacgggcattgcaagcgcaaggccatcgagcggttctgcagcgaggtgaagcggctgtgccatgccgagcgcaggaaggactttgtctctgaggcctacctcctgacccttggcaagttcatcaacatgtttgctgtcctggatgagctaaagaacatgaagtgcagcgtcaagaatgaccactctgcctacaagagggcagcacagttcctgcggaagatggcagatccccagtctatccaggagtcgcagaacctttccatgttcctggccaaccacaacaggatcacccagtgtctccaccagcaacttgaagtgatcccaggctatg

SEQ ID NO: 124668 - DNA, 6370 bp, Homo sapiens
  Payload ID: 4487
  Gene Symbol: CYFIP2
  Gene Name: cytoplasmic FMR1 interacting protein 2
  ENST ID: ENST00000521420
  CDS Start-End: 92-3775
atcctgcgccccggcgcggggccctgcggtagcctcaggcccctcccctggacccgccgcagagccagtgcagaatacagaaactgcagccatgaccacgcacgtcaccctggaagatgccctgtccaacgtggacctgcttgaagagcttcccctccccgaccagcagccatgcatcgagcctccaccttcctccatcatgtaccaggctaactttgacacaaactttgaggacaggaatgcatttgtcacgggcattgcaaggtacattgagcaggctacagtccactccagcatggtgaaatgcaacgagcagcccaaccgagtagagatctatgagaagacagtagaggtgctggagccggaggtcaccaagctcatgaagttcatgtattttcagcgcaaggccatcgagcggttctgcagcgaggtgaagcggctgtgccatgccgagcgcaggaaggactttgtctctgaggcctacctcctgacccttggcaagttcatcaacatgtttgctgtcctggatgagctaaagaacatgaagtgcagcgtcaagaatgaccactctgcctacaagagggcagcacagttcctgcggaagatggcagatccccagtctatccaggagtcgcagaacctttccatgttcctggccaaccacaacaggatcacccagtgtctccaccagcaacttgaagtgatcccaggctatgaggagctgctggctgacattgtcaacatctgtgtggattactacgagaacaagatgtacctgactcccagtgagaaacatatgctcctcaaggtgatgggctttggcctctacctaatggatggaaatgtcagtaacatttacaaactggatgccaagaagagaattaatcttagcaaaattgataaattctttaagcagctgcaggtggtgccccttttcggcgacatgcagatagagctggccagatacattaagaccagtgctcactatgaagagaacaagtccaagtggacgtgcacccagagcagcatcagcccccagtacaatatctgcgagcagatggttcagatccgggatgaccacatccgcttcatctccgagctcgctcgctacagcaacagtgaggtggtgacgggctcagggctggacagccagaagtcagacgaggagtatcgcgagctcttcgacctagccctgcggggtctgcagcttctatccaagtggagcgcccacgtcatggaggtgtactcttggaagctggttcatcccacagacaagttctgcaacaaggactgtcctggcaccgcggaggaatatgagagagccacacgctacaattacaccagtgaggaaaaatttgccttcgttgaggtgatcgccatgatcaaaggcctgcaggtgctcatgggcaggatggagagcgtcttcaaccaggccatcaggaacaccatctacgcggcattgcaggacttcgcccaggtgacgctgcgtgagcccctgcggcaggcggtacggaagaagaagaatgtcctcatcagcgtcctacaggcaattcgaaagaccatctgtgactgggagggagggcgagagccccctaatgacccatgcttgagaggggagaaggaccccaaaggtggatttgatatcaaggtgccccggcgtgctgtggggccatccagcacacagctgtacatggtgcggaccatgcttgaatcactcattgcagacaaaagcggctccaagaagaccctgaggagcagcctggatggacccattgtcctcgccatagaggactttcacaaacagtccttcttcttcacacatctgctcaacatcagtgaagccctgcagcagtgttgtgacctctcccagctctggttccgagaattcttcctggagttaaccatgggccgacgaatccagttccccatcgagatgtccatgccctggattctaacggaccatatcctggaaaccaaagaaccttccatgatggagtatgtcctctaccctctggatctgtacaacgacagcgcctactatgctctgaccaagtttaaaaagcagttcctgtacgatgagatagaagctgaggtgaacctgtgttttgatcagtttgtctacaagctggcagaccagatctttgcttactacaaagccatggctggcagtgtcctgttggataaacgttttcgagctgagtgtaagaattatggcgtcatcattccgtatccaccgtccaatcgctatgaaacactgctgaagcagagacacgtccagctgttgggtagatcaattgacttgaacagactcattacccagcgcatctctgccgccatgtataaatccttggaccaagctatcagccgctttgagagtgaggacctgacctccattgtggagctggagtggctgctggagattaaccggctcacgcatcggctgctctgtaagcatatgacgctggacagcttcgatgccatgttccgagaggccaatcacaatgtgtccgccccctatggccgtatcaccctgcatgtcttctgggaactgaactttgactttctccccaactactgctacaatgggtccactaaccgttttgtgcggactgccattcctttcacccaagaaccacaacgagacaaacctgccaacgtccagccttattacctctatggatccaagcctctcaacattgcctacagccacatctacagctcctacaggaatttcgtggggccacctcatttcaagactatctgcagactcctgggttatcagggcatcgctgtggtcatggaggaactgctaaagattgtgaagagcttgctccaaggaaccattctccagtatgtgaaaacactgatagaggtgatgcccaagatatgccgcttgccccgacatgagtatggctccccagggatcctggagttcttccaccaccagctgaaggacatcattgagtacgcagagctcaaaacagacgtgttccagagcctgagggaagtgggcaatgccatcctcttctgcctcctcatagagcaagctctgtctcaggaggaggtctgcgatttgctccatgccgcacccttccaaaacatcttgcctagagtctacatcaaagagggggagcgcctggaggtccggatgaaacgtctggaagccaagtatgccccgctccacctggtccctctgatcgagcggctggggacccctcagcaaatcgccattgctcgcgagggtgacctcctgaccaaggagcggctgtgctgtggcctgtccatgttcgaggtcatcctgacccgcattcggagctacctgcaggaccccatctggcggggcccaccgcccaccaatggcgtcatgcacgtcgatgagtgtgtggagttccaccggctgtggagcgccatgcagttcgtgtactgcatccctgtgggaaccaacgagttcacagctgagcagtgtttcggcgatggcttgaactgggctggttgctccatcattgtcctgctgggccagcagcgtcgctttgacctgttcgacttctgttaccacctgctaaaagtgcagaggcaggacgggaaggatgaaatcattaagaatgtgcccctgaagaagatggccgaccggatcaggaagtatcagatcttgaacaatgaggtttttgccatcctgaacaaatacatgaagtccgtggagacagacagttccactgtggagcatgtgcgctgcttccagccacccatccaccagtccttggccaccacttgctaagcagaagatcctgcagacccttatctggaggaggaagagaagcaggagagagaaagccacagccagcctgccataggatccaactggacaacgtgtgggatggacctggaaacaagcacctccccaaacacatcaccactccctagggcggggcctgtgcatgctctcccatgacatctccatgctggtttctccatagcataaatgaaaaaaaaaaaaaaaaagtaaacagggcagtgtgtgctttttcttttctcccccctcaactatattaagaactcctagtttcaccctttctccatcccatcatcccacctatctgtggttgcttcccaagacctcctcccaagatagacatctcctacccagtgcccttgtgtgaccccaggactcaagtctcagactgtgaacagatgtggccatgcccagagacgccagcctggccagaagggcatgcctcagcttactacttcatctctcctggttccctccctgcagtgccccgggtgtcatcttctcccactctgggtaccagggattctaccacataggcttcccaaagccccattctaactcccctctctcagggaagccctagagagaggtccaaaaagcattcacagctgtatcacactctatgcaggtggggtaggagactgatcaggcctgctgtggggaagcagtatgtatgaacacagccagaaatgtcatagtccaaacaggatgctttcaggccatctcagctgcttgatggtgagatggttcccttattccttcaggaaaggcttagcattgggccacataggggaagcagctttgaacaaatcagtcatagcactgcctatagcattagccagtgaccaaattagggacaacgtcttggcacagaattgcttatcaaggaacatttccacaagaaagaaaatattaaggggttatttccacagaagcccaaaacgtcttggaaacacagaggtgaggaggaggaatagtaattgtcaatgagcttttaataccaagatacaccccctgcccccaaagaagagtcctcttttagggaatcagaaccttcattgtcctagaagctgaaagattcttggaacattttagcttttactctcaacttgctgttctctttacattccttaagttagactttcgggtgtggcttctctcccaggggtaacatttacttccattttctagactgaaccaaaagtcttctgcagaatctcccaccgagtgtggtaagaaggaaggacaaaaggctttaggatataaatttcatgttacagagcatgtcattgtcaaaggaaatctgtggccctgagattttaagaacataaaatgtgacatttgatatttctccagcccagggaagtaagatggttagcaatggttgccttaatcaaatggtcccatttttaaccccaaaggaagtgcccacagcaagaggtttgtgtgatgcacttatgtcctccggtgaggaaagggggccacatatgaaaggccccttaggtcagatcctgagagtagcacatttgagtgcagattcctgggccccacctcaaacctactaattctgaatctctgggaatagggccaggaaatctgccctttctacaaactacccaagttgttctgttgcacatcaatgtttgggaaccactgctgtaagggaatcattctggtcaccttgagctttgagctaccactaagccatgaaagaaaatacatcatacagggaagagagaagggaggaggttccaagtagtaactggcagatcctcctgtctggaggtaccaccttctattctggtttctgacttttccttcttgatgaccatagatgtgttccagaggcaaaagagacacattatcccagatggcagaacatgctttcaaaacatataaaatgtcaaagttccagatccttctacatctttagtcctgtctgaggatggtagctggctctctgtagctgatagatggctagagttccatccaaatccttgaccacgacttcatggagatttgaataatctatttgatgagatttctatttcaataacccacctctctcaccccacattcatatccctaaatttgaccctctgggccgagtcacattaccttcaggagacttgatcccagtagactgaggtcttccctttcagcagaaagatttcatttccctggcttgccagtggcactgatttccgaacacccaatgagtttaatattctttcctccttggcattactgccccagcctctttttattttttttgtgtgtgtctaataaccaggaaaaaaataaagcttaggttttaaaaagttttaaaaataatctgtttcagaaactgtcaaatgtaccatatttgtattaagagttgttgggaatttttgtacaatgaatttacatttatttatggtgacatatttacgcttgtgatcaaataatgatgttaaattcttaaatcatatttgctatgcagctgaagatgatattttgatttgtattttgggggtacctgtgttgagttgataaacatttccatcttcattaaaactgcttccaaactagtaaaaccag

SEQ ID NO: 124669 - DNA, 925 bp, Homo sapiens
  Payload ID: 4487
  Gene Symbol: CYFIP2
  Gene Name: cytoplasmic FMR1 interacting protein 2
  ENST ID: ENST00000611925
  CDS Start-End: 260-925
gaggggcgcagcgtcgatgtttgggggcggagggctttgatgagagaggagcaggtctgacccgcttggaagctttctggcctacactagcatcgctcaccaagctggctgcgggcacggtggaagtgggggaaggggatgagtgggctgactcctgggggaaaaggtggtttttttcttgagctctgaagaaccaggaagatgcttgcctgtctgttgtggcgtctacttttcagtgcagaatacagaaactgcagccatgaccacgcacgtcaccctggaagatgccctgtccaacgtggacctgcttgaagagcttcccctccccgaccagcagccatgcatcgagcctccaccttcctccatcatgtaccaggctaactttgacacaaactttgaggacaggaatgcatttgtcacgggcattgcaaggtacattgagcaggctacagtccactccagcatgaatgagatgctggaggaaggacatgagtatgcggtcatgctgtacacctggcgcagctgttcccgggccattccccaggtgaaatgcaacgagcagcccaaccgagtagagatctatgagaagacagtagaggtgctggagccggaggtcaccaagctcatgaagttcatgtattttcagcgcaaggccatcgagcggttctgcagcgaggtgaagcggctgtgccatgccgagcgcaggaaggactttgtctctgaggcctacctcctgacccttggcaagttcatcaacatgtttgctgtcctggatgagctaaagaacatgaagtgcagcgtcaagaatgaccactctgcctacaagagggcagcacagttcctgcggaagatggcagatccccagtctatccaggagtcgcagaacctttccatgttcctggccaaccacaacaggatcacccag

SEQ ID NO: 124670 - DNA, 915 bp, Homo sapiens
  Payload ID: 4487
  Gene Symbol: CYFIP2
  Gene Name: cytoplasmic FMR1 interacting protein 2
  ENST ID: ENST00000621516
  CDS Start-End: 139-354
agtctcgcttcgtcacccaggctggagtacagtggctcaatctcagctcactgcaacctccacctcccaggttcaagcaattctgcctcaccctcccgagtagctgggactacagtgcagaatacagaaactgcagccatgaccacgcacgtcaccctggaagatgccctgtccaacgtggacctgcttgaagagcttcccctccccgaccagcagccatgcatcgagcctccaccttcctccatcatgtaccaggctaactttgacacaaactttgaggacaggaatgcatttgtcacgggcattgcaaggtacattgagcaggctacagtccactccagcatgatattttagatgcattgtctcatttgctcctgacatcaaccctgtgagaatgagatgctggaggaaggacatgagtatgcggtcatgctgtacacctggcgcagctgttcccgggccattccccaggtgaaatgcaacgagcagcccaaccgagtagagatctatgagaagacagtagaggtgctggagccggaggtcaccaagctcatgaagttcatgtattttcagcgcaaggccatcgagcggttctgcagcgaggtgaagcggctgtgccatgccgagcgcaggaaggactttgtctctgaggcctacctcctgacccttggcaagttcatcaacatgtttgctgtcctggatgagctaaagaacatgaagtgcagcgtcaagaatgaccactctgcctacaagagggcagcacagttcctgcggaagatggcagatccccagtctatccaggagtcgcagaacctttccatgttcctggccaaccacaacaggatcacccagtgtctccaccagcaacttgaagtgatcccaggctatgaggagctgctggctgacattgtcaac

SEQ ID NO: 124671 - DNA, 1000 bp, Homo sapiens
  Payload ID: 4487
  Gene Symbol: CYFIP2
  Gene Name: cytoplasmic FMR1 interacting protein 2
  ENST ID: ENST00000611075
  CDS Start-End: 435-1000
cctggacccgccgcagagccaggtaagcggccctcgcaggcctcgggccgggcacggggactaggatgccgccggggacggggatgaggccgtgaggatgcgcgaagggccgccccctctcccggcccgcggggggcgctcggcgctgtgcccgggctagcccgaggcccggcctcaggccccacgcggcccctttccccctcggacccaccgtgcgtcccgcggcacggaccctctgcccgggaggcgcgggcacatcgcggagctccggcgcggcggcgggggagccgcagcagcaggtgcgcggcctgggccggagccgccagcccgggaggaggcggtgctaatctcagggaccggagacacctgcagcggccgcgagcccggcagcggcgacatcctcgagtccagtgcagaatacagaaactgcagccatgaccacgcacgtcaccctggaagatgccctgtccaacgtggacctgcttgaagagcttcccctccccgaccagcagccatgcatcgagcctccaccttcctccatcatgtaccaggctaactttgacacaaactttgaggacaggaatgcatttgtcacgggcattgcaaggtacattgagcaggctacagtccactccagcatgaatgagatgctggaggaaggacatgagtatgcggtcatgctgtacacctggcgcagctgttcccgggccattccccaggtgaaatgcaacgagcagcccaaccgagtagagatctatgagaagacagtagaggtgctggagccggaggtcaccaagctcatgaagttcatgtattttcagcgcaaggccatcgagcggttctgcagcgaggtgaagcggctgtgccatgccgagcgcaggaaggactttgtctctgaggcctacctcctgacccttggcaagttcatcaacatgtttgctgtcctggatgagctaaagaacatgaagtgcagcgtcaagaatgaccactctgcctacaa

SEQ ID NO: 124672 - DNA, 4210 bp, Homo sapiens
  Payload ID: 4487
  Gene Symbol: CYFIP2
  Gene Name: cytoplasmic FMR1 interacting protein 2
  Uniprot ID: Q96F07
  ENST ID: ENST00000616178
  CDS Start-End: 141-3977
agcggggccggggcggggccgagcgcggcgcagcggagcggggcagagcatcctgcgccccggcgcggggccctgcggtagcctcaggcccctcccctggacccgccgcagagccagtgcagaatacagaaactgcagccatgaccacgcacgtcaccctggaagatgccctgtccaacgtggacctgcttgaagagcttcccctccccgaccagcagccatgcatcgagcctccaccttcctccatcatgtaccaggctaactttgacacaaactttgaggacaggaatgcatttgtcacgggcattgcaaggtacattgagcaggctacagtccactccagcatgaatgagatgctggaggaaggacatgagtatgcggtcatgctgtacacctggcgcagctgttcccgggccattccccaggtgaaatgcaacgagcagcccaaccgagtagagatctatgagaagacagtagaggtgctggagccggaggtcaccaagctcatgaagttcatgtattttcagcgcaaggccatcgagcggttctgcagcgaggtgaagcggctgtgccatgccgagcgcaggaaggactttgtctctgaggcctacctcctgacccttggcaagttcatcaacatgtttgctgtcctggatgagctaaagaacatgaagtgcagcgtcaagaatgaccactctgcctacaagagggcagcacagttcctgcggaagatggcagatccccagtctatccaggagtcgcagaacctttccatgttcctggccaaccacaacaggatcacccagtgtctccaccagcaacttgaagtgatcccaggctatgaggagctgctggctgacattgtcaacatctgtgtggattactacgagaacaagatgtacctgactcccagtgagaaacatatgctcctcaaggtgatgggctttggcctctacctaatggatggaaatgtcagtaacatttacaaactggatgccaagaagagaattaatcttagcaaaattgataaattctttaagcagctgcaggtggtgccccttttcggcgacatgcagatagagctggccagatacattaagaccagtgctcactatgaagagaacaagtccaagtggacgtgcacccagagcagcatcagcccccagtacaatatctgcgagcagatggttcagatccgggatgaccacatccgcttcatctccgagctcgctcgctacagcaacagtgaggtggtgacgggctcagggctggacagccagaagtcagacgaggagtatcgcgagctcttcgacctagccctgcggggtctgcagcttctatccaagtggagcgcccacgtcatggaggtgtactcttggaagctggttcatcccacagacaagttctgcaacaaggactgtcctggcaccgcggaggaatatgagagagccacacgctacaattacaccagtgaggaaaaatttgccttcgttgaggtgatcgccatgatcaaaggcctgcaggtgctcatgggcaggatggagagcgtcttcaaccaggccatcaggaacaccatctacgcggcattgcaggacttcgcccaggtgacgctgcgtgagcccctgcggcaggcggtacggaagaagaagaatgtcctcatcagcgtcctacaggcaattcgaaagaccatctgtgactgggagggagggcgagagccccctaatgacccatgcttgagaggggagaaggaccccaaaggtggatttgatatcaaggtgccccggcgtgctgtggggccatccagcacacaggcctgccagtggtccccgagggctttgtttcaccccactggtggcacacagggccgaagaggctgccgatccctgctgtacatggtgcggaccatgcttgaatcactcattgcagacaaaagcggctccaagaagaccctgaggagcagcctggatggacccattgtcctcgccatagaggactttcacaaacagtccttcttcttcacacatctgctcaacatcagtgaagccctgcagcagtgttgtgacctctcccagctctggttccgagaattcttcctggagttaaccatgggccgacgaatccagttccccatcgagatgtccatgccctggattctaacggaccatatcctggaaaccaaagaaccttccatgatggagtatgtcctctaccctctggatctgtacaacgacagcgcctactatgctctgaccaagtttaaaaagcagttcctgtacgatgagatagaagctgaggtgaacctgtgttttgatcagtttgtctacaagctggcagaccagatctttgcttactacaaagccatggctggcagtgtcctgttggataaacgttttcgagctgagtgtaagaattatggcgtcatcattccgtatccaccgtccaatcgctatgaaacactgctgaagcagagacacgtccagctgttgggtagatcaattgacttgaacagactcattacccagcgcatctctgccgccatgtataaatccttggaccaagctatcagccgctttgagagtgaggacctgacctccattgtggagctggagtggctgctggagattaaccggctcacgcatcggctgctctgtaagcatatgacgctggacagcttcgatgccatgttccgagaggccaatcacaatgtgtccgccccctatggccgtatcaccctgcatgtcttctgggaactgaactttgactttctccccaactactgctacaatgggtccactaaccgttttgtgcggactgccattcctttcacccaagaaccacaacgagacaaacctgccaacgtccagccttattacctctatggatccaagcctctcaacattgcctacagccacatctacagctcctacaggaatttcgtggggccacctcatttcaagactatctgcagactcctgggttatcagggcatcgctgtggtcatggaggaactgctaaagattgtgaagagcttgctccaaggaaccattctccagtatgtgaaaacactgatagaggtgatgcccaagatatgccgcttgccccgacatgagtatggctccccagggatcctggagttcttccaccaccagctgaaggacatcattgagtacgcagagctcaaaacagacgtgttccagagcctgagggaagtgggcaatgccatcctcttctgcctcctcatagagcaagctctgtctcaggaggaggtctgcgatttgctccatgccgcacccttccaaaacatcttgcctagagtctacatcaaagagggggagcgcctggaggtccggatgaaacgtctggaagccaagtatgccccgctccacctggtccctctgatcgagcggctggggacccctcagcaaatcgccattgctcgcgagggtgacctcctgaccaaggagcggctgtgctgtggcctgtccatgttcgaggtcatcctgacccgcattcggagctacctgcaggaccccatctggcggggcccaccgcccaccaatggcgtcatgcacgtcgatgagtgtgtggagttccaccggctgtggagcgccatgcagttcgtgtactgcatccctgtgggaaccaacgagttcacagctgagcagtgtttcggcgatggcttgaactgggctggttgctccatcattgtcctgctgggccagcagcgtcgctttgacctgttcgacttctgttaccacctgctaaaagtgcagaggcaggacgggaaggatgaaatcattaagaatgtgcccctgaagaagatggccgaccggatcaggaagtatcagatcttgaacaatgaggtttttgccatcctgaacaaatacatgaagtccgtggagacagacagttccactgtggagcatgtgcgctgcttccagccacccatccaccagtccttggccaccacttgctaagcagaagatcctgcagacccttatctggaggaggaagagaagcaggagagagaaagccacagccagcctgccataggatccaactggacaacgtgtgggatggacctggaaacaagcacctccccaaacacatcaccactccctagggcggggcctgtgcatgctctcccatgacatctccatgctggtttctccatagcataaatgaaaaaaaaaaaaaaaaagtaaacagg

SEQ ID NO: 124673 - DNA, 4124 bp, Homo sapiens
  Payload ID: 4487
  Gene Symbol: CYFIP2
  Gene Name: cytoplasmic FMR1 interacting protein 2
  Uniprot ID: Q96F07
  ENST ID: ENST00000620254
  CDS Start-End: 139-3900
cggggccggggcggggccgagcgcggcgcagcggagcggggcagagcatcctgcgccccggcgcggggccctgcggtagcctcaggcccctcccctggacccgccgcagagccagtgcagaatacagaaactgcagccatgaccacgcacgtcaccctggaagatgccctgtccaacgtggacctgcttgaagagcttcccctccccgaccagcagccatgcatcgagcctccaccttcctccatcatgtaccaggctaactttgacacaaactttgaggacaggaatgcatttgtcacgggcattgcaaggtacattgagcaggctacagtccactccagcatgaatgagatgctggaggaaggacatgagtatgcggtcatgctgtacacctggcgcagctgttcccgggccattccccaggtgaaatgcaacgagcagcccaaccgagtagagatctatgagaagacagtagaggtgctggagccggaggtcaccaagctcatgaagttcatgtattttcagcgcaaggccatcgagcggttctgcagcgaggtgaagcggctgtgccatgccgagcgcaggaaggactttgtctctgaggcctacctcctgacccttggcaagttcatcaacatgtttgctgtcctggatgagctaaagaacatgaagtgcagcgtcaagaatgaccactctgcctacaagagggcagcacagttcctgcggaagatggcagatccccagtctatccaggagtcgcagaacctttccatgttcctggccaaccacaacaggatcacccagtgtctccaccagcaacttgaagtgatcccaggctatgaggagctgctggctgacattgtcaacatctgtgtggattactacgagaacaagatgtacctgactcccagtgagaaacatatgctcctcaaggtgatgggctttggcctctacctaatggatggaaatgtcagtaacatttacaaactggatgccaagaagagaattaatcttagcaaaattgataaattctttaagcagctgcaggtggtgccccttttcggcgacatgcagatagagctggccagatacattaagaccagtgctcactatgaagagaacaagtccaagtggacgtgcacccagagcagcatcagcccccagtacaatatctgcgagcagatggttcagatccgggatgaccacatccgcttcatctccgagctcgctcgctacagcaacagtgaggtggtgacgggctcagggctggacagccagaagtcagacgaggagtatcgcgagctcttcgacctagccctgcggggtctgcagcttctatccaagtggagcgcccacgtcatggaggtgtactcttggaagctggttcatcccacagacaagttctgcaacaaggactgtcctggcaccgcggaggaatatgagagagccacacgctacaattacaccagtgaggaaaaatttgccttcgttgaggtgatcgccatgatcaaaggcctgcaggtgctcatgggcaggatggagagcgtcttcaaccaggccatcaggaacaccatctacgcggcattgcaggacttcgcccaggtgacgctgcgtgagcccctgcggcaggcggtacggaagaagaagaatgtcctcatcagcgtcctacaggcaattcgaaagaccatctgtgactgggagggagggcgagagccccctaatgacccatgcttgagaggggagaaggaccccaaaggtggatttgatatcaaggtgccccggcgtgctgtggggccatccagcacacagctgtacatggtgcggaccatgcttgaatcactcattgcagacaaaagcggctccaagaagaccctgaggagcagcctggatggacccattgtcctcgccatagaggactttcacaaacagtccttcttcttcacacatctgctcaacatcagtgaagccctgcagcagtgttgtgacctctcccagctctggttccgagaattcttcctggagttaaccatgggccgacgaatccagttccccatcgagatgtccatgccctggattctaacggaccatatcctggaaaccaaagaaccttccatgatggagtatgtcctctaccctctggatctgtacaacgacagcgcctactatgctctgaccaagtttaaaaagcagttcctgtacgatgagatagaagctgaggtgaacctgtgttttgatcagtttgtctacaagctggcagaccagatctttgcttactacaaagccatggctggcagtgtcctgttggataaacgttttcgagctgagtgtaagaattatggcgtcatcattccgtatccaccgtccaatcgctatgaaacactgctgaagcagagacacgtccagctgttgggtagatcaattgacttgaacagactcattacccagcgcatctctgccgccatgtataaatccttggaccaagctatcagccgctttgagagtgaggacctgacctccattgtggagctggagtggctgctggagattaaccggctcacgcatcggctgctctgtaagcatatgacgctggacagcttcgatgccatgttccgagaggccaatcacaatgtgtccgccccctatggccgtatcaccctgcatgtcttctgggaactgaactttgactttctccccaactactgctacaatgggtccactaaccgttttgtgcggactgccattcctttcacccaagaaccacaacgagacaaacctgccaacgtccagccttattacctctatggatccaagcctctcaacattgcctacagccacatctacagctcctacaggaatttcgtggggccacctcatttcaagactatctgcagactcctgggttatcagggcatcgctgtggtcatggaggaactgctaaagattgtgaagagcttgctccaaggaaccattctccagtatgtgaaaacactgatagaggtgatgcccaagatatgccgcttgccccgacatgagtatggctccccagggatcctggagttcttccaccaccagctgaaggacatcattgagtacgcagagctcaaaacagacgtgttccagagcctgagggaagtgggcaatgccatcctcttctgcctcctcatagagcaagctctgtctcaggaggaggtctgcgatttgctccatgccgcacccttccaaaacatcttgcctagagtctacatcaaagagggggagcgcctggaggtccggatgaaacgtctggaagccaagtatgccccgctccacctggtccctctgatcgagcggctggggacccctcagcaaatcgccattgctcgcgagggtgacctcctgaccaaggagcggctgtgctgtggcctgtccatgttcgaggtcatcctgacccgcattcggagctacctgcaggaccccatctggcggggcccaccgcccaccaatggcgtcatgcacgtcgatgagtgtgtggagttccaccggctgtggagcgccatgcagttcgtgtactgcatccctgtgggaaccaacgagttcacagctgagcagtgtttcggcgatggcttgaactgggctggttgctccatcattgtcctgctgggccagcagcgtcgctttgacctgttcgacttctgttaccacctgctaaaagtgcagaggcaggacgggaaggatgaaatcattaagaatgtgcccctgaagaagatggccgaccggatcaggaagtatcagatcttgaacaatgaggtttttgccatcctgaacaaatacatgaagtccgtggagacagacagttccactgtggagcatgtgcgctgcttccagccacccatccaccagtccttggccaccacttgctaagcagaagatcctgcagacccttatctggaggaggaagagaagcaggagagagaaagccacagccagcctgccataggatccaactggacaacgtgtgggatggacctggaaacaagcacctccccaaacacatcaccactccctagggcggggcctgtgcatgctctcccatgacatctccatgctggtttctccatagcataaatgaaaaaaaaaaaaaaaaa

SEQ ID NO: 124674 - DNA, 967 bp, Homo sapiens
  Payload ID: 4487
  Gene Symbol: CYFIP2
  Gene Name: cytoplasmic FMR1 interacting protein 2
  ENST ID: ENST00000617629
  CDS Start-End: 81-967
cggcgcggggccctgcggtagcctcaggcccctcccctggacccgccgcagagccagtgcagaatacagaaactgcagccatgaccacgcacgtcaccctggaagatgccctgtccaacgtggacctgcttgaagagcttcccctccccgaccagcagccatgcatcgagcctccaccttcctccatcatgtaccaggctaactttgacacaaactttgaggacaggaatgcatttgtcacgggcattgcaaggtacattgagcaggctacagtccactccagcatgaatgagatgctggaggaaggacatgagtatgcggtcatgctgtacacctggcgcagctgttcccgggccattccccaggtgaaatgcaacgagcagcccaaccgagtagagatctatgagaagacagtagaggtgctggagccggaggtcaccaagctcatgaagttcatgtattttcagcgcaaggccatcgagcggttctgcagcgaggtgaagcggctgtgccatgccgagcgcaggaaggactttgtctctgaggcctacctcctgacccttggcaagttcatcaacatgtttgctgtcctggatgagctaaagaacatgaagtgcagcgtcaagaatgaccactctgcctacaagagggcagcacagttcctgcggaagatggcagatccccagtctatccaggagtcgcagaacctttccatgttcctggccaaccacaacaggatcacccagcaacttgaagtgatcccaggctatgaggagctgctggctgacattgtcaacatctgtgtggattactacgagaacaagatgtacctgactcccagtgagaaacatatgctcctcaaggtgatgggctttggcctctacctaatggatggaaatgtcagtaacatttacaaactggatgccaagaagagaattaatcttagcaaaattgataaattctttaa

SEQ ID NO: 124675 - DNA, 576 bp, Homo sapiens
  Payload ID: 4487
  Gene Symbol: CYFIP2
  Gene Name: cytoplasmic FMR1 interacting protein 2
  ENST ID: ENST00000520960
  CDS Start-End: 1-306
ctgtacatggtgcggaccatgcttgaatcactcattgcagacaaaagcggctccaagaagaccctgaggagcagcctggatggacccattgtcctcgccatagaggactttcacaaacagtccttcttcttcacacatctgctcaacatcagtgacggagtcttgctctgttgcccaggttggagtgcagtggcactatctcagctcaccgcaacctccgcttcccaggttcaggctggagtgcagtcgtgtgatctcagctcaccgcaacctctgccacccagaagccctgcagcagtgttgtgacctctcccagctctggttccgagaattcttcctggagttaaccatgggccgacgaatccagttccccatcgagatgtccatgccctggattctaacggaccatatcctggaaaccaaagaaccttccatgatggagtatgtcctctaccctctggatctgtacaacgacagcgcctactatgctctgaccaagtttaaaaagcagttcctgtacgatgagatagaagctgaggtgaacctgtgttttgatcagtttgtctacaagctggc

SEQ ID NO: 124676 - DNA, 2988 bp, Homo sapiens
  Payload ID: 4487
  Gene Symbol: CYFIP2
  Gene Name: cytoplasmic FMR1 interacting protein 2
  ENST ID: ENST00000620969
  CDS Start-End: 2284-2988
cggggccggggcggggccgagcgcggcgcagcggagcggggcagagcatcctgcgccccggcgcggggccctgcggtagcctcaggcccctcccctggacccgccgcagagccagtgcagaatacagaaactgcagccatgaccacgcacgtcaccctggaagatgccctgtccaacgtggacctgcttgaagagcttcccctccccgaccagcagccatgcatcgagcctccaccttcctccatcatgtaccaggctaactttgacacaaactttgaggacaggaatgcatttgtcacgggcattgcaaggtacattgagcaggctacagtccactccagcatgaatgagatgctggaggaaggacatgagtatgcggtcatgctgtacacctggcgcagctgttcccgggccattccccaggtgaaatgcaacgagcagcccaaccgagtagagatctatgagaagacagtagaggtgctggagccggaggtcaccaagctcatgaagttcatgtattttcagcgcaaggccatcgagcggttctgcagcgaggtgaagcggctgtgccatgccgagcgcaggaaggactttgtctctgaggcctacctcctgacccttggcaagttcatcaacatgtttgctgtcctggatgagctaaagaacatgaagtgcagcgtcaagaatgaccactctgcctacaagagggcagcacagttcctgcggaagatggcagatccccagtctatccaggagtcgcagaacctttccatgttcctggccaaccacaacaggatcacccagtgtctccaccagcaacttgaagtgatcccaggctatgaggagctgctggctgacattgtcaacatctgtgtggattactacgagaacaagatgtacctgactcccagtgagaaacatatgctcctcaaggtgatgggctttggcctctacctaatggatggaaatgtcagtaacatttacaaactggatgccaagaagagaattaatcttagcaaaattgataaattctttaagcagctgcaggtggtgccccttttcggcgacatgcagatagagctggccagatacattaagaccagtgctcactatgaagagaacaagtccaagtggacgtgcacccagagcagcatcagcccccagtacaatatctgcgagcagatggttcagatccgggatgaccacatccgcttcatctccgagctcgctcgctacagcaacagtgaggtggtgacgggctcagggctggacagccagaagtcagacgaggagtatcgcgagctcttcgacctagccctgcggggtctgcagcttctatccaagtggagcgcccacgtcatggaggtgtactcttggaagctggttcatcccacagacaagttctgcaacaaggactgtcctggcaccgcggaggaatatgagagagccacacgctacaattacaccagtgaggaaaaatttgccttcgttgaggtgatcgccatgatcaaaggcctgcaggtgctcatgggcaggatggagagcgtcttcaaccaggccatcaggaacaccatctacgcggcattgcaggacttcgcccaggtgacgctgcgtgagcccctgcggcaggcggtacggaagaagaagaatgtcctcatcagcgtcctacaggcaattcgaaagaccatctgtgactgggagggagggcgagagccccctaatgacccatgcttgagaggggagaaggaccccaaaggtggatttgatatcaaggtgccccggcgtgctgtggggccatccagcacacagctgtacatggtgcggaccatgcttgaatcactcattgcagacaaaagcggctccaagaagaccctgaggagcagcctggatggacccattgtcctcgccatagaggactttcacaaacagtccttcttcttcacacatctgctcaacatcagtgaagccctgcagcagtgttgtgacctctcccagctctggttccgagaattcttcctggagttaaccatgggccgacgaatccagttccccatcgagatgtccatgccctggattctaacggaccatatcctggaaaccaaagaaccttccatgatggagtatgtcctctaccctctggatctgtacaacgacagcgcctactatgctctgaccaagtttaaaaagcagttcctgtacgatgagatagaagctgaggtgaacctgtgttttgatcagtttgtctacaagctggcagaccagatctttgcttactacaaagccatggctggcagtgtcctgttggataaacgttttcgagctgagtgtaagaattatggcgtcatcattccgtatccaccgtccaatcgctatgaaacactgctgaagcagagacacgtccagctgttgggtagatcaattgacttgaacagactcattacccagcgcatctctgccgccatgtataaatccttggaccaagctatcagccgctttgagagtgaggacctgacctccattgtggaattagagtggacaaaggttactataaggataaagagacccctaaactgcccacatggctttttaagccttttccatgctttgctcacgcatcggctgctctgtaagcatatgacgctggacagcttcgatgccatgttccgagaggccaatcacaatgtgtccgccccctatggccgtatcaccctgcatgtcttctgggaactgaactttgactttctccccaactactgctacaatgggtccactaaccgttttgtgcggactgcctcctttcacccaagaaccacaacgagacaaacctgccaacgtccagccttattacctctatggatccaagcctctcaacattgcctacagccacatctacagctcctacaggaatttcgtggggccacctcatttcaagactatgcagactcctgggttatcagggcatcgctgtggtcatggaggaactgctaa

SEQ ID NO: 124677 - DNA, 4256 bp, Homo sapiens
  Payload ID: 4487
  Gene Symbol: CYFIP2
  Gene Name: cytoplasmic FMR1 interacting protein 2
  Uniprot ID: Q96F07
  ENST ID: ENST00000618329
  CDS Start-End: 266-4027
gtagagttaaggaagggcctcttcctctgtgagaattcagcattttgcaaccatccaaaaatgttgagggcatgctttgcttccagggcagacagagcagcacagtgagcatgggacacaggatccctgacttgctgtgtgcccttaaaccagccactacctctctgacgttcaaaattgagcaatggaaggcagcctgcccaactgttacctgcctgtcatcatgaaagcctgcggatgagtgcagaatacagaaactgcagccatgaccacgcacgtcaccctggaagatgccctgtccaacgtggacctgcttgaagagcttcccctccccgaccagcagccatgcatcgagcctccaccttcctccatcatgtaccaggctaactttgacacaaactttgaggacaggaatgcatttgtcacgggcattgcaaggtacattgagcaggctacagtccactccagcatgaatgagatgctggaggaaggacatgagtatgcggtcatgctgtacacctggcgcagctgttcccgggccattccccaggtgaaatgcaacgagcagcccaaccgagtagagatctatgagaagacagtagaggtgctggagccggaggtcaccaagctcatgaagttcatgtattttcagcgcaaggccatcgagcggttctgcagcgaggtgaagcggctgtgccatgccgagcgcaggaaggactttgtctctgaggcctacctcctgacccttggcaagttcatcaacatgtttgctgtcctggatgagctaaagaacatgaagtgcagcgtcaagaatgaccactctgcctacaagagggcagcacagttcctgcggaagatggcagatccccagtctatccaggagtcgcagaacctttccatgttcctggccaaccacaacaggatcacccagtgtctccaccagcaacttgaagtgatcccaggctatgaggagctgctggctgacattgtcaacatctgtgtggattactacgagaacaagatgtacctgactcccagtgagaaacatatgctcctcaaggtgatgggctttggcctctacctaatggatggaaatgtcagtaacatttacaaactggatgccaagaagagaattaatcttagcaaaattgataaattctttaagcagctgcaggtggtgccccttttcggcgacatgcagatagagctggccagatacattaagaccagtgctcactatgaagagaacaagtccaagtggacgtgcacccagagcagcatcagcccccagtacaatatctgcgagcagatggttcagatccgggatgaccacatccgcttcatctccgagctcgctcgctacagcaacagtgaggtggtgacgggctcagggctggacagccagaagtcagacgaggagtatcgcgagctcttcgacctagccctgcggggtctgcagcttctatccaagtggagcgcccacgtcatggaggtgtactcttggaagctggttcatcccacagacaagttctgcaacaaggactgtcctggcaccgcggaggaatatgagagagccacacgctacaattacaccagtgaggaaaaatttgccttcgttgaggtgatcgccatgatcaaaggcctgcaggtgctcatgggcaggatggagagcgtcttcaaccaggccatcaggaacaccatctacgcggcattgcaggacttcgcccaggtgacgctgcgtgagcccctgcggcaggcggtacggaagaagaagaatgtcctcatcagcgtcctacaggcaattcgaaagaccatctgtgactgggagggagggcgagagccccctaatgacccatgcttgagaggggagaaggaccccaaaggtggatttgatatcaaggtgccccggcgtgctgtggggccatccagcacacagctgtacatggtgcggaccatgcttgaatcactcattgcagacaaaagcggctccaagaagaccctgaggagcagcctggatggacccattgtcctcgccatagaggactttcacaaacagtccttcttcttcacacatctgctcaacatcagtgaagccctgcagcagtgttgtgacctctcccagctctggttccgagaattcttcctggagttaaccatgggccgacgaatccagttccccatcgagatgtccatgccctggattctaacggaccatatcctggaaaccaaagaaccttccatgatggagtatgtcctctaccctctggatctgtacaacgacagcgcctactatgctctgaccaagtttaaaaagcagttcctgtacgatgagatagaagctgaggtgaacctgtgttttgatcagtttgtctacaagctggcagaccagatctttgcttactacaaagccatggctggcagtgtcctgttggataaacgttttcgagctgagtgtaagaattatggcgtcatcattccgtatccaccgtccaatcgctatgaaacactgctgaagcagagacacgtccagctgttgggtagatcaattgacttgaacagactcattacccagcgcatctctgccgccatgtataaatccttggaccaagctatcagccgctttgagagtgaggacctgacctccattgtggagctggagtggctgctggagattaaccggctcacgcatcggctgctctgtaagcatatgacgctggacagcttcgatgccatgttccgagaggccaatcacaatgtgtccgccccctatggccgtatcaccctgcatgtcttctgggaactgaactttgactttctccccaactactgctacaatgggtccactaaccgttttgtgcggactgccattcctttcacccaagaaccacaacgagacaaacctgccaacgtccagccttattacctctatggatccaagcctctcaacattgcctacagccacatctacagctcctacaggaatttcgtggggccacctcatttcaagactatctgcagactcctgggttatcagggcatcgctgtggtcatggaggaactgctaaagattgtgaagagcttgctccaaggaaccattctccagtatgtgaaaacactgatagaggtgatgcccaagatatgccgcttgccccgacatgagtatggctccccagggatcctggagttcttccaccaccagctgaaggacatcattgagtacgcagagctcaaaacagacgtgttccagagcctgagggaagtgggcaatgccatcctcttctgcctcctcatagagcaagctctgtctcaggaggaggtctgcgatttgctccatgccgcacccttccaaaacatcttgcctagagtctacatcaaagagggggagcgcctggaggtccggatgaaacgtctggaagccaagtatgccccgctccacctggtccctctgatcgagcggctggggacccctcagcaaatcgccattgctcgcgagggtgacctcctgaccaaggagcggctgtgctgtggcctgtccatgttcgaggtcatcctgacccgcattcggagctacctgcaggaccccatctggcggggcccaccgcccaccaatggcgtcatgcacgtcgatgagtgtgtggagttccaccggctgtggagcgccatgcagttcgtgtactgcatccctgtgggaaccaacgagttcacagctgagcagtgtttcggcgatggcttgaactgggctggttgctccatcattgtcctgctgggccagcagcgtcgctttgacctgttcgacttctgttaccacctgctaaaagtgcagaggcaggacgggaaggatgaaatcattaagaatgtgcccctgaagaagatggccgaccggatcaggaagtatcagatcttgaacaatgaggtttttgccatcctgaacaaatacatgaagtccgtggagacagacagttccactgtggagcatgtgcgctgcttccagccacccatccaccagtccttggccaccacttgctaagcagaagatcctgcagacccttatctggaggaggaagagaagcaggagagagaaagccacagccagcctgccataggatccaactggacaacgtgtgggatggacctggaaacaagcacctccccaaacacatcaccactccctagggcggggcctgtgcatgctctcccatgacatctccatgctggtttctccatagcataaatgaaaaaaaaaaaaaaaaagtaaa

SEQ ID NO: 124678 - DNA, 8092 bp, Homo sapiens
  Payload ID: 4488
  Gene Symbol: CLASP1
  Gene Name: cytoplasmic linker associated protein 1
  Uniprot ID: Q7Z460
  ENST ID: ENST00000263710
  CDS Start-End: 391-5007
tttttttttttttaatccccgcaccaagcgcttaacctcattggggtggaggagaaggcggcggctctctggtccgcagcggcaacagtaacgaaaaacagggctaatggactgctgaattatgaagtatttcagacccagtagtagaacatcactctgccactcactcctttatctcctactagttatttaaattggacttttaatatcctaccagctgctcttcagacacacatggtgcattgttgccattccccagattgcatctttgaaacacaggctcttagtaaccttcagcgaacaaagaggcaacctcccagatacgtctgctgggagggagtcatcgtgactgccctctagcttttgctggatctggatttgaattccactatggagcctcgcatggagtcctgcctggcgcaggtgttgcagaaggatgtggggaaacgattgcaggttggccaagaactgatagactatttctcagacaaacagaagtctgctgaccttgagcatgaccagaccatgttagataaacttgtggatggacttgctacctcttgggtgaactctagcaattacaaggtggttctgctgggcatggacatcctgtccgccctggtgacccggctgcaggatcggttcaaggcgcagatcggcacagtgctgccaagtctaatagacagactaggagatgctaaagactctgtgagggagcaggaccaaactctgctgctaaagatcatggatcaagctgctaatccccagtacgtatgggacagaatgcttggaggcttcaaacacaagaatttccgtactcgagaaggcatctgtctctgccttatagcaacactcaatgcctctggagcacagactttaacactaagcaagattgtgccacatatatgcaacttacttggagatccaaacagccaggttcgagatgcagcaataaacagcttagtggaaatttacagacatgtaggagaacgtgtgagggcagatctcagtaaaaaaggattgccacagtcccggttgaatgtaatttttacaaaatttgatgaagtccagaaatctggaaacatgatacaatctgcaaatgataaaaatttcgacgatgaagattctgtggatggtaacagaccttcctctgctagttctacatcatccaaggctccaccaagttctcggagaaacgttggaatgggaaccacccgccggcttggttcatccacccttggatccaagtcttcagctgcaaaagaaggagctggtgctgttgatgaagaggattttattaaagcatttgatgatgtacctgtagtacagatttattccagccgagaccttgaggaatccataaacaaaattagggaaatattatctgatgacaagcatgattgggagcagagagtaaatgctctaaaaaagattagatctttacttttggctggtgctgctgagtatgataacttctttcaacatttgcgtcttttggatggagcctttaaactctctgctaaggacctgcggtctcaggtagtgcgggaggcttgtatcacgttggggcatctgtcatcagttctggggaataagtttgaccatggagctgaagccattatgccaactatctttaatttaattccaaacagtgccaaaattatggccacatctggtgttgtagctgttaggttaattattcggcacacacacatccctaggttaatacctgtcataacaagcaactgtacctctaagtctgtcgcagttagaaggcgctgttttgaatttttagatttgcttttacaagaatggcagacacattcactagaacgacacatatcagtattagctgaaacaataaagaagggaatacatgatgctgattccgaagcaagaatagaagccagaaaatgttactggggtttccacagtcacttcagcagagaagcagagcacttgtaccacaccttggagtcctcctaccagaaagccctgcagtcccacctgaagaactcagacagcatagtgtctctgcctcagtcagaccgctcatcttccagctctcaagagagtctaaatcgtccgctgtctgccaaaagaagtcctactggaagtaccacatctagagcttctacagttagtaccaaatctgtgtcaacgactgggtccctccagcgatctcgaagtgatattgatgtgaacgcagcagccagtgccaaatccaaagtctcctcatcttcgggcacgacgcctttcagctctgcagcagctttgcctccagggtcatacgcatccttaggtcggatccgcacaagacggcaaagctctgggagtgccaccaacgtcgcctctacacctgataaccggggccgcagtcgcgctaaagtggtttcacagtcccagcgatccagatctgctaatcctgctggtgctggcagccggtcaagttccccaggaaaattgttgggaagtggttatggtggacttactgggggctcctcacgaggcccacctgtgacaccgtcttcagaaaagcgaagcaagattcccaggagccagggatgtagccgggaaacaagtccaaaccgaataggattagcacggagcagccgtatccctcgacccagcatgagtcaggggtgcagccgcgataccagccgtgagagcagccgagatacaagccctgctcggggctttcctccacttgatcggtttgggcttggccagccaggaagaatacctggttctgtgaatgccatgagagttctgagcacaagtacagatcttgaagctgctgttgctgatgctttgaagaagcctgtgaggaggagatatgagccgtatgggatgtattctgacgatgatgccaacagtgatgcctcaagtgtttgctctgagcgctcatatggctccaggaatggtggcattccccattatctgcggcagactgaggatgtagcagaagttctcaaccactgtgctagttcaaactggtcagaaaggaaagaagggcttctgggcctgcagaacttactgaagagccaaagaacactgagtcgagttgaactgaaaaggttgtgtgagatcttcactcggatgtttgctgaccctcatagcaagagagttttcagtatgtttttggagactcttgtggattttataataattcataaggatgatttacaagactggctttttgttcttctcacacaattacttaagaaaatgggagcagatttacttggatctgtgcaagcaaaagttcaaaaggctctagatgtcacaagggactcctttccatttgatcaacaatttaacattttgatgagatttattgtggatcaaactcaaactccaaacctcaaggtcaaagttgcaatcctgaaatacattgagtctctggccagacagatggatccaacagattttgtaaactctagtgagacaaggcttgctgtttctagaatcataacctggacaacagaaccaaagagttcagacgtgagaaaggcagcacagattgtgctaatctctctgtttgaattgaatactcctgaatttaccatgttacttggtgccttgccaaaaacattccaggatggtgccaccaaactcctgcacaaccacctcaagaattccagtaacaccagtgtgggctctccaagcaatacgattggccggacgccctcccgacacaccagcagcaggaccagccccctgacctcacccaccaactgttcccatgggggtctgtctccaagtcggttatggggttggagtgccgacgggttagcgaagcacccacctcccttttctcagcctaactccatccccaccgctccctcccacaaggctctcaggcgctcttactctcccagcatgctggactatgatacagagaacctgaactctgaagaaatctatagttctctacgtggagttacagaagccattgaaaagtttagttttcgaagccaagaagatctgaatgagccaattaaacgagatggcaaaaaggagtgtgatattgtgtcccgcgatgggggcgctgcctcccctgccactgagggccgggggggtagtgaagtagaaggaggccggacagctctggataacaagacctcactactcaacacccagcctccgcgcgccttcccggggccgcgggcgcgagactacaacccgtacccctactcagatgccatcaacacctacgacaagaccgccctgaaagaggctgtgttcgatgacgacatggagcagcttcgagacgtgcccatcgaccattctgacctggtggctgaccttctgaaagagctgtccaaccacaatgagcgagtggaggaacggaagggagccctgctggagctgctcaagatcacgcgggaagacagccttggtgtctgggaggagcacttcaagaccattctgctcctgctgctggagacccttggagacaaagaccattcaattcgagcactggcgttaagagttttgagggaaattctgagaaatcaaccagcaagatttaaaaactacgccgagctgacgattatgaagactctggaagcccacaaagactcccataaggaggtggtgagagcggctgaggaggctgcgtccacactggccagttccatccacccggagcagtgcatcaaggtgctctgccccatcatccagacggccgactaccccatcaaccttgctgccatcaagatgcagaccaaagtcgtcgagaggatcgcaaaggagtcattgctgcagctccttgtcgacatcatcccaggcttgctgcagggttatgacaacaccgaaagtagtgtgcgtaaggccagcgtgttttgcttagtggcaatttattccgtaatcggagaagacctgaaacctcaccttgcacagctcacagggagcaagatgaagctactaaacttatacataaagagggcccagaccaccaacagcaacagcagctcctcctccgatgtctccacgcacagctaatggcagtacctgtctcttgtgtagacctagaagcaatcggtggtgcctctcagagacctttccccacccccttcatcggctgcccagtcagtacaaggaggcccacaaatatttattacaatcagtattttggtcccttccagcttttctgtagaatcttactggtattgaatgtaaaggaagcaaggcctgtattgcagtcttcatacaaaacaaaaggaataagaacagaaaagagccatactgaaacatgtcttgtacagcctgctgagatggcgaaaccctgtgtgtggggtgcagtttttaaaaatcagagcgctctagccactacttggtagaaagtagcattttttttttcagttaataacatatttgggggtggggtggggtgttactttgtgttcttcctccttagcctattttcttgtgcgtatggtctgtgtggggcccctttcacagctgacaccacgaaaggtgatatatctttaagttgtgttctgagacctactaaaaatgggaatcaagtcttggcaagaacagtctgaagatggccttttaacaaacgctgggaattttgcttgtcatatccagactggaggccgactgccctggctttcagcgtagaattgggagtgcaccctgacagtctccttccagctctccctaatcgactccaccgacaaggtccctaccccagagcttccatgcaaaggaattcttcaagtttaaatctggacacaaaaataagataaatgtatggcatcatttagggatgcctgagatggcagttcatgaagcacagaagataaagaagaagtctttcatctttactgctgagatccttgggaacactgttgtcatgggggctctgccaagaccctcatctctgggctacacggtgattcagattgagcaccaacttgtttcctcccctcaaagttctgcctaagccgttcagttctaacatggtctcagttaatctggtaaatggcatctttaccatcttagttctgacttctcagtttaatgtgggattaagagccaagaaaagcctagagagactggatatcacaattttttttaattttataaactgaagtagttccttgaatgtctgttgatgaaatagtcactgtttaaggaaaaaagtaattatgaggtgtagcagattgcagaaaaacaggattagaaacacacttaaaaagaacacacatttagagtctctcttcctcctcagcgaaccactaggccccctttttaaaaacacctttagagcctaattactccaataaaagtaactagaggtttggagtctggttaaataaattctgagtaaaattcttaagccaaatggaaattcttaatgcaatcatgaggacttctattgtctcttactgttgtattagatcctataaattgaactgatttttccataaggaaaatgcttcttttgagattaattctaataacgtatttgctattgcagtgcagagcccactgcaactgctaggactgaaagcagaggctgggtgccagagcacgtgattcttaacatcatttccacagacccctctgccctgaccctctgcattggatgcaggaagctgggaaagactgatgttgatttggaaacatgggctgaaaatgaaggccccatagtgcataggaacagtaaagccagggtgctgacgtgtgtgtgtgtgtgtgtgtgtgtgtgtgtgtgtgtgtggtgttgtgtgtgtttgtgcgtgcaccctacacatgtgtggtacctcactgctgctgtttagggaacttgagggacgcgtttcaaggggttgggtattactgacgagctttggctcaaaatatagcaggaccaggtcttttgttgataagtactgtttgtttattaatatgtcattaatggtatttcttttttacactctacaagtgaattagggagtctcttgttgacccctttgttgcaggaatgtgcgtcgggctaggttatccatgagtttctttattcctaatgcagttagaaagacctttctccttgagctctttgactcccagaaggtaccccagtccccagtgtacttagaaaggatctcgaacattgctggacgtcctcatagtactcacaaagggctagccttgaatgtcactcgcccagtcttcagtctcctgacttagagatacaatcacgtcacaggtctcttggcctcaatctgaaaactgctgccgccgcgccgaggagactcgcatgccgccaccacctcactgggagggcgccgagcccaccgtcgccccctagaccctgacagctgcagctgccttgccttgccgccgcctccctgcagggcccctgttccaatgaaaaacagaacacaaaagagcagagcacctaagcctgtctctgcctccctgtctaccggactggccagggcccaagacccccgctgctccactgcggggctgggcgggctgactccctgcttcctccaagctgctgcctcccctgcagccagggtctgggcagggtgcagccggtcctcggggcacgcagcttccttcaagtacactgtgtgtgcttcccggacctgcggcgatgccacgggcctgccttttctatgcgcctcactagcttaccaccctgtgcaggtaatgcaactgactttgtctcatcagtctttttctttccctgccaccctttatttatcaagcgtaatgttacactttaaaggacagcaaataagaactttgtagaatcccaccaggactttgctaacaataatgtttggaaataaagaagtgctctgaaaaaatatcagccaccaaaatagttatgttggcactgtgttcacacgcatggtccccacacccccaggttgggtgggtttttttgttttttgggtttttttgggggggggggctttttcatgttacatccatatctgtatttatatcttatttgtttcactttcaagtgtatcatggcaaatgtacagatttttttgttaataatgtgctaggatttgctaaaaaagaaaaaaaaaaaacccttttgagtttgccctagaataaatgagacttaattcaa

SEQ ID NO: 124679 - DNA, 7915 bp, Homo sapiens
  Payload ID: 4488
  Gene Symbol: CLASP1
  Gene Name: cytoplasmic linker associated protein 1
  Uniprot ID: Q7Z460
  ENST ID: ENST00000397587
  CDS Start-End: 391-4830
tttttttttttttaatccccgcaccaagcgcttaacctcattggggtggaggagaaggcggcggctctctggtccgcagcggcaacagtaacgaaaaacagggctaatggactgctgaattatgaagtatttcagacccagtagtagaacatcactctgccactcactcctttatctcctactagttatttaaattggacttttaatatcctaccagctgctcttcagacacacatggtgcattgttgccattccccagattgcatctttgaaacacaggctcttagtaaccttcagcgaacaaagaggcaacctcccagatacgtctgctgggagggagtcatcgtgactgccctctagcttttgctggatctggatttgaattccactatggagcctcgcatggagtcctgcctggcgcaggtgttgcagaaggatgtggggaaacgattgcaggttggccaagaactgatagactatttctcagacaaacagaagtctgctgaccttgagcatgaccagaccatgttagataaacttgtggatggacttgctacctcttgggtgaactctagcaattacaaggtggttctgctgggcatggacatcctgtccgccctggtgacccggctgcaggatcggttcaaggcgcagatcggcacagtgctgccaagtctaatagacagactaggagatgctaaagactctgtgagggagcaggaccaaactctgctgctaaagatcatggatcaagctgctaatccccagtacgtatgggacagaatgcttggaggcttcaaacacaagaatttccgtactcgagaaggcatctgtctctgccttatagcaacactcaatgcctctggagcacagactttaacactaagcaagattgtgccacatatatgcaacttacttggagatccaaacagccaggttcgagatgcagcaataaacagcttagtggaaatttacagacatgtaggagaacgtgtgagggcagatctcagtaaaaaaggattgccacagtcccggttgaatgtaatttttacaaaatttgatgaagtccagaaatctggaaacatgatacaatctgcaaatgataaaaatttcgacgatgaagattctgtggatggtaacagaccttcctctgctagttctacatcatccaaggctccaccaagttctcggagaaacgttggaatgggaaccacccgccggcttggttcatccacccttggatccaagtcttcagctgcaaaagaaggagctggtgctgttgatgaagaggattttattaaagcatttgatgatgtacctgtagtacagatttattccagccgagaccttgaggaatccataaacaaaattagggaaatattatctgatgacaagcatgattgggagcagagagtaaatgctctaaaaaagattagatctttacttttggctggtgctgctgagtatgataacttctttcaacatttgcgtcttttggatggagcctttaaactctctgctaaggacctgcggtctcaggtagtgcgggaggcttgtatcacgttggggcatctgtcatcagttctggggaataagtttgaccatggagctgaagccattatgccaactatctttaatttaattccaaacagtgccaaaattatggccacatctggtgttgtagctgttaggttaattattcggcacacacacatccctaggttaatacctgtcataacaagcaactgtacctctaagtctgtcgcagttagaaggcgctgttttgaatttttagatttgcttttacaagaatggcagacacattcactagaacgacacatatcagtattagctgaaacaataaagaagggaatacatgatgctgattccgaagcaagaatagaagccagaaaatgttactggggtttccacagtcacttcagcagagaagcagagcacttgtaccacaccttggagtcctcctaccagaaagccctgcagtcccacctgaagaactcagacagcatagtgtctctgcctcagtcagaccgctcatcttccagctctcaagagagtctaaatcgtccgctgtctgccaaaagaagtcctactggaagtaccacatctagagcttctacagttagtaccaaatctgtgtcaacgactgggtccctccagcgatctcgaagtgatattgatgtgaacgcagcagccagtgccaaatccaaagtctcctcatcttcgggcacgacgcctttcagctctgcagcagctttgcctccagggtcatacgcatccttagatggtactaccactaaagcggagggtcggatccgcacaagacggcaaagctctgggagtgccaccaacgtcgcctctacacctgataaccggggccgcagtcgcgctaaagtggtttcacagtcccagcgatccagatctgctaatcctgctggtgctggcagccggtcaagttccccaggaaaattgttgggaagtggttatggtggacttactgggggctcctcacgaggcccacctgtgacaccgtcttcagaaaagcgaagcaagattcccaggagccagggatgtagccgggaaacaagtccaaaccgaataggattagatcggtttgggcttggccagccaggaagaatacctggttctgtgaatgccatgagagttctgagcacaagtacagatcttgaagctgctgttgctgatgctttgctgttaggagactccaggagcaagaagaagcctgtgaggaggagatatgagccgtatgggatgtattctgacgatgatgccaacagtgatgcctcaagtgtttgctctgagcgctcatatggctccaggaatggtggcattccccattatctgcggcagactgaggatgtagcagaagttctcaaccactgtgctagttcaaactggtcagaaaggaaagaagggcttctgggcctgcagaacttactgaagagccaaagaacactgagtcgagttgaactgaaaaggttgtgtgagatcttcactcggatgtttgctgaccctcatagcaagagagttttcagtatgtttttggagactcttgtggattttataataattcataaggatgatttacaagactggctttttgttcttctcacacaattacttaagaaaatgggagcagatttacttggatctgtgcaagcaaaagttcaaaaggctctagatgtcacaagggactcctttccatttgatcaacaatttaacattttgatgagatttattgtggatcaaactcaaactccaaacctcaaggtcaaagttgcaatcctgaaatacattgagtctctggccagacagatggatccaacagattttgtaaactctagtgagacaaggcttgctgtttctagaatcataacctggacaacagaaccaaagagttcagacgtgagaaaggcagcacagattgtgctaatctctctgtttgaattgaatactcctgaatttaccatgttacttggtgccttgccaaaaacattccaggatggtgccaccaaactcctgcacaaccacctcaagaattccagtaacaccagtgtgggctctccaagcaatacgattggccggacgccctcccgacacaccagcagcaggaccagccccctgacctcacccaccaactgttcccatgggggtctgtctccaagcatgctggactatgatacagagaacctgaactctgaagaaatctatagttctctacgtggagttacagaagccattgaaaagtttagttttcgaagccaagaagatctgaatgagccaattaaacgagatggcaaaaaggagtgtgatattgtgtcccgcgatgggggcgctgcctcccctgccactgagggccgggggggtagtgaagtagaaggaggccggacagctctggataacaagacctcactactcaacacccagcctccgcgcgccttcccggggccgcgggcgcgagactacaacccgtacccctactcagatgccatcaacacctacgacaagaccgccctgaaagaggctgtgttcgatgacgacatggagcagcttcgagacgtgcccatcgaccattctgacctggtggctgaccttctgaaagagctgtccaaccacaatgagcgagtggaggaacggaagggagccctgctggagctgctcaagatcacgcgggaagacagccttggtgtctgggaggagcacttcaagaccattctgctcctgctgctggagacccttggagacaaagaccattcaattcgagcactggcgttaagagttttgagggaaattctgagaaatcaaccagcaagatttaaaaactacgccgagctgacgattatgaagactctggaagcccacaaagactcccataaggaggtggtgagagcggctgaggaggctgcgtccacactggccagttccatccacccggagcagtgcatcaaggtgctctgccccatcatccagacggccgactaccccatcaaccttgctgccatcaagatgcagaccaaagtcgtcgagaggatcgcaaaggagtcattgctgcagctccttgtcgacatcatcccaggcttgctgcagggttatgacaacaccgaaagtagtgtgcgtaaggccagcgtgttttgcttagtggcaatttattccgtaatcggagaagacctgaaacctcaccttgcacagctcacagggagcaagatgaagctactaaacttatacataaagagggcccagaccaccaacagcaacagcagctcctcctccgatgtctccacgcacagctaatggcagtacctgtctcttgtgtagacctagaagcaatcggtggtgcctctcagagacctttccccacccccttcatcggctgcccagtcagtacaaggaggcccacaaatatttattacaatcagtattttggtcccttccagcttttctgtagaatcttactggtattgaatgtaaaggaagcaaggcctgtattgcagtcttcatacaaaacaaaaggaataagaacagaaaagagccatactgaaacatgtcttgtacagcctgctgagatggcgaaaccctgtgtgtggggtgcagtttttaaaaatcagagcgctctagccactacttggtagaaagtagcattttttttttcagttaataacatatttgggggtggggtggggtgttactttgtgttcttcctccttagcctattttcttgtgcgtatggtctgtgtggggcccctttcacagctgacaccacgaaaggtgatatatctttaagttgtgttctgagacctactaaaaatgggaatcaagtcttggcaagaacagtctgaagatggccttttaacaaacgctgggaattttgcttgtcatatccagactggaggccgactgccctggctttcagcgtagaattgggagtgcaccctgacagtctccttccagctctccctaatcgactccaccgacaaggtccctaccccagagcttccatgcaaaggaattcttcaagtttaaatctggacacaaaaataagataaatgtatggcatcatttagggatgcctgagatggcagttcatgaagcacagaagataaagaagaagtctttcatctttactgctgagatccttgggaacactgttgtcatgggggctctgccaagaccctcatctctgggctacacggtgattcagattgagcaccaacttgtttcctcccctcaaagttctgcctaagccgttcagttctaacatggtctcagttaatctggtaaatggcatctttaccatcttagttctgacttctcagtttaatgtgggattaagagccaagaaaagcctagagagactggatatcacaattttttttaattttataaactgaagtagttccttgaatgtctgttgatgaaatagtcactgtttaaggaaaaaagtaattatgaggtgtagcagattgcagaaaaacaggattagaaacacacttaaaaagaacacacatttagagtctctcttcctcctcagcgaaccactaggccccctttttaaaaacacctttagagcctaattactccaataaaagtaactagaggtttggagtctggttaaataaattctgagtaaaattcttaagccaaatggaaattcttaatgcaatcatgaggacttctattgtctcttactgttgtattagatcctataaattgaactgatttttccataaggaaaatgcttcttttgagattaattctaataacgtatttgctattgcagtgcagagcccactgcaactgctaggactgaaagcagaggctgggtgccagagcacgtgattcttaacatcatttccacagacccctctgccctgaccctctgcattggatgcaggaagctgggaaagactgatgttgatttggaaacatgggctgaaaatgaaggccccatagtgcataggaacagtaaagccagggtgctgacgtgtgtgtgtgtgtgtgtgtgtgtgtgtgtgtgtgtgtggtgttgtgtgtgtttgtgcgtgcaccctacacatgtgtggtacctcactgctgctgtttagggaacttgagggacgcgtttcaaggggttgggtattactgacgagctttggctcaaaatatagcaggaccaggtcttttgttgataagtactgtttgtttattaatatgtcattaatggtatttcttttttacactctacaagtgaattagggagtctcttgttgacccctttgttgcaggaatgtgcgtcgggctaggttatccatgagtttctttattcctaatgcagttagaaagacctttctccttgagctctttgactcccagaaggtaccccagtccccagtgtacttagaaaggatctcgaacattgctggacgtcctcatagtactcacaaagggctagccttgaatgtcactcgcccagtcttcagtctcctgacttagagatacaatcacgtcacaggtctcttggcctcaatctgaaaactgctgccgccgcgccgaggagactcgcatgccgccaccacctcactgggagggcgccgagcccaccgtcgccccctagaccctgacagctgcagctgccttgccttgccgccgcctccctgcagggcccctgttccaatgaaaaacagaacacaaaagagcagagcacctaagcctgtctctgcctccctgtctaccggactggccagggcccaagacccccgctgctccactgcggggctgggcgggctgactccctgcttcctccaagctgctgcctcccctgcagccagggtctgggcagggtgcagccggtcctcggggcacgcagcttccttcaagtacactgtgtgtgcttcccggacctgcggcgatgccacgggcctgccttttctatgcgcctcactagcttaccaccctgtgcaggtaatgcaactgactttgtctcatcagtctttttctttccctgccaccctttatttatcaagcgtaatgttacactttaaaggacagcaaataagaactttgtagaatcccaccaggactttgctaacaataatgtttggaaataaagaagtgctctgaaaaaatatcagccaccaaaatagttatgttggcactgtgttcacacgcatggtccccacacccccaggttgggtgggtttttttgttttttgggtttttttgggggggggggctttttcatgttacatccatatctgtatttatatcttatttgtttcactttcaagtgtatcatggcaaatgtacagatttttttgttaataatgtgctaggatttgctaaaaaagaaaaaaaaaaaacccttttgagtttgccctagaataaatgagacttaattcaa

SEQ ID NO: 124680 - DNA, 8002 bp, Homo sapiens
  Payload ID: 4488
  Gene Symbol: CLASP1
  Gene Name: cytoplasmic linker associated protein 1
  Uniprot ID: Q7Z460
  ENST ID: ENST00000409078
  CDS Start-End: 502-4917
gctctctatggtgtacccgggttggtggcggtaagaagaaaaagggtgaccgcactgcgcaggcgccctcggcgtctctctcgctctctcggtcttttttttttttttctttttttttttttttaatccccgcaccaagcgcttaacctcattggggtggaggagaaggcggcggctctctggtccgcagcggcaacagtaacgaaaaacagggctaatggactgctgaattatgaagtatttcagacccagtagtagaacatcactctgccactcactcctttatctcctactagttatttaaattggacttttaatatcctaccagctgctcttcagacacacatggtgcattgttgccattccccagattgcatctttgaaacacaggctcttagtaaccttcagcgaacaaagaggcaacctcccagatacgtctgctgggagggagtcatcgtgactgccctctagcttttgctggatctggatttgaattccactatggagcctcgcatggagtcctgcctggcgcaggtgttgcagaaggatgtggggaaacgattgcaggttggccaagaactgatagactatttctcagacaaacagaagtctgctgaccttgagcatgaccagaccatgttagataaacttgtggatggacttgctacctcttgggtgaactctagcaattacaaggtggttctgctgggcatggacatcctgtccgccctggtgacccggctgcaggatcggttcaaggcgcagatcggcacagtgctgccaagtctaatagacagactaggagatgctaaagactctgtgagggagcaggaccaaactctgctgctaaagatcatggatcaagctgctaatccccagtacgtatgggacagaatgcttggaggcttcaaacacaagaatttccgtactcgagaaggcatctgtctctgccttatagcaacactcaatgcctctggagcacagactttaacactaagcaagattgtgccacatatatgcaacttacttggagatccaaacagccaggttcgagatgcagcaataaacagcttagtggaaatttacagacatgtaggagaacgtgtgagggcagatctcagtaaaaaaggattgccacagtcccggttgaatgtaatttttacaaaatttgatgaagtccagaaatctggaaacatgatacaatctgcaaatgataaaaatttcgacgatgaagattctgtggatggtaacagaccttcctctgctagttctacatcatccaaggctccaccaagttctcggagaaacgttggaatgggaaccacccgccggcttggttcatccacccttggatccaagtcttcagctgcaaaagaaggagctggtgctgttgatgaagaggattttattaaagcatttgatgatgtacctgtagtacagatttattccagccgagaccttgaggaatccataaacaaaattagggaaatattatctgatgacaagcatgattgggagcagagagtaaatgctctaaaaaagattagatctttacttttggctggtgctgctgagtatgataacttctttcaacatttgcgtcttttggatggagcctttaaactctctgctaaggacctgcggtctcaggtagtgcgggaggcttgtatcacgttggggcatctgtcatcagttctggggaataagtttgaccatggagctgaagccattatgccaactatctttaatttaattccaaacagtgccaaaattatggccacatctggtgttgtagctgttaggttaattattcggcacacacacatccctaggttaatacctgtcataacaagcaactgtacctctaagtctgtcgcagttagaaggcgctgttttgaatttttagatttgcttttacaagaatggcagacacattcactagaacgacacatatcagtattagctgaaacaataaagaagggaatacatgatgctgattccgaagcaagaatagaagccagaaaatgttactggggtttccacagtcacttcagcagagaagcagagcacttgtaccacaccttggagtcctcctaccagaaagccctgcagtcccacctgaagaactcagacagcatagtgtctctgcctcagtcagaccgctcatcttccagctctcaagagagtctaaatcgtccgctgtctgccaaaagaagtcctactggaagtaccacatctagagcttctacagttagtaccaaatctgtgtcaacgactgggtccctccagcgatctcgaagtgatattgatgtgaacgcagcagccagtgccaaatccaaagtctcctcatcttcgggcacgacgcctttcagctctgcagcagctttgcctccagggtcatacgcatccttaggtcggatccgcacaagacggcaaagctctgggagtgccaccaacgtcgcctctacacctgataaccggggccgcagtcgcgctaaagtggtttcacagtcccagcgatccagatctgctaatcctgctggtgctggcagccggtcaagttccccaggaaaattgttgggaagtggttatggtggacttactgggggctcctcacgaggcccacctgtgacaccgtcttcagaaaagcgaagcaagattcccaggagccagggatgtagccgggaaacaagtccaaaccgaataggattagatcggtttgggcttggccagccaggaagaatacctggttctgtgaatgccatgagagttctgagcacaagtacagatcttgaagctgctgttgctgatgctttgctgttaggagactccaggagcaagaagaagcctgtgaggaggagatatgagccgtatgggatgtattctgacgatgatgccaacagtgatgcctcaagtgtttgctctgagcgctcatatggctccaggaatggtggcattccccattatctgcggcagactgaggatgtagcagaagttctcaaccactgtgctagttcaaactggtcagaaaggaaagaagggcttctgggcctgcagaacttactgaagagccaaagaacactgagtcgagttgaactgaaaaggttgtgtgagatcttcactcggatgtttgctgaccctcatagcaagagagttttcagtatgtttttggagactcttgtggattttataataattcataaggatgatttacaagactggctttttgttcttctcacacaattacttaagaaaatgggagcagatttacttggatctgtgcaagcaaaagttcaaaaggctctagatgtcacaagggactcctttccatttgatcaacaatttaacattttgatgagatttattgtggatcaaactcaaactccaaacctcaaggtcaaagttgcaatcctgaaatacattgagtctctggccagacagatggatccaacagattttgtaaactctagtgagacaaggcttgctgtttctagaatcataacctggacaacagaaccaaagagttcagacgtgagaaaggcagcacagattgtgctaatctctctgtttgaattgaatactcctgaatttaccatgttacttggtgccttgccaaaaacattccaggatggtgccaccaaactcctgcacaaccacctcaagaattccagtaacaccagtgtgggctctccaagcaatacgattggccggacgccctcccgacacaccagcagcaggaccagccccctgacctcacccaccaactgttcccatgggggtctgtctccaagcatgctggactatgatacagagaacctgaactctgaagaaatctatagttctctacgtggagttacagaagccattgaaaagtttagttttcgaagccaagaagatctgaatgagccaattaaacgagatggcaaaaaggagtgtgatattgtgtcccgcgatgggggcgctgcctcccctgccactgagggccgggggggtagtgaagtagaaggaggccggacagctctggataacaagacctcactactcaacacccagcctccgcgcgccttcccggggccgcgggcgcgagactacaacccgtacccctactcagatgccatcaacacctacgacaagaccgccctgaaagaggctgtgttcgatgacgacatggagcagcttcgagacgtgcccatcgaccattctgacctggtggctgaccttctgaaagagctgtccaaccacaatgagcgagtggaggaacggaagggagccctgctggagctgctcaagatcacgcgggaagacagccttggtgtctgggaggagcacttcaagaccattctgctcctgctgctggagacccttggagacaaagaccattcaattcgagcactggcgttaagagttttgagggaaattctgagaaatcaaccagcaagatttaaaaactacgccgagctgacgattatgaagactctggaagcccacaaagactcccataaggaggtggtgagagcggctgaggaggctgcgtccacactggccagttccatccacccggagcagtgcatcaaggtgctctgccccatcatccagacggccgactaccccatcaaccttgctgccatcaagatgcagaccaaagtcgtcgagaggatcgcaaaggagtcattgctgcagctccttgtcgacatcatcccaggcttgctgcagggttatgacaacaccgaaagtagtgtgcgtaaggccagcgtgttttgcttagtggcaatttattccgtaatcggagaagacctgaaacctcaccttgcacagctcacagggagcaagatgaagctactaaacttatacataaagagggcccagaccaccaacagcaacagcagctcctcctccgatgtctccacgcacagctaatggcagtacctgtctcttgtgtagacctagaagcaatcggtggtgcctctcagagacctttccccacccccttcatcggctgcccagtcagtacaaggaggcccacaaatatttattacaatcagtattttggtcccttccagcttttctgtagaatcttactggtattgaatgtaaaggaagcaaggcctgtattgcagtcttcatacaaaacaaaaggaataagaacagaaaagagccatactgaaacatgtcttgtacagcctgctgagatggcgaaaccctgtgtgtggggtgcagtttttaaaaatcagagcgctctagccactacttggtagaaagtagcattttttttttcagttaataacatatttgggggtggggtggggtgttactttgtgttcttcctccttagcctattttcttgtgcgtatggtctgtgtggggcccctttcacagctgacaccacgaaaggtgatatatctttaagttgtgttctgagacctactaaaaatgggaatcaagtcttggcaagaacagtctgaagatggccttttaacaaacgctgggaattttgcttgtcatatccagactggaggccgactgccctggctttcagcgtagaattgggagtgcaccctgacagtctccttccagctctccctaatcgactccaccgacaaggtccctaccccagagcttccatgcaaaggaattcttcaagtttaaatctggacacaaaaataagataaatgtatggcatcatttagggatgcctgagatggcagttcatgaagcacagaagataaagaagaagtctttcatctttactgctgagatccttgggaacactgttgtcatgggggctctgccaagaccctcatctctgggctacacggtgattcagattgagcaccaacttgtttcctcccctcaaagttctgcctaagccgttcagttctaacatggtctcagttaatctggtaaatggcatctttaccatcttagttctgacttctcagtttaatgtgggattaagagccaagaaaagcctagagagactggatatcacaattttttttaattttataaactgaagtagttccttgaatgtctgttgatgaaatagtcactgtttaaggaaaaaagtaattatgaggtgtagcagattgcagaaaaacaggattagaaacacacttaaaaagaacacacatttagagtctctcttcctcctcagcgaaccactaggccccctttttaaaaacacctttagagcctaattactccaataaaagtaactagaggtttggagtctggttaaataaattctgagtaaaattcttaagccaaatggaaattcttaatgcaatcatgaggacttctattgtctcttactgttgtattagatcctataaattgaactgatttttccataaggaaaatgcttcttttgagattaattctaataacgtatttgctattgcagtgcagagcccactgcaactgctaggactgaaagcagaggctgggtgccagagcacgtgattcttaacatcatttccacagacccctctgccctgaccctctgcattggatgcaggaagctgggaaagactgatgttgatttggaaacatgggctgaaaatgaaggccccatagtgcataggaacagtaaagccagggtgctgacgtgtgtgtgtgtgtgtgtgtgtgtgtgtgtgtgtgtgtggtgttgtgtgtgtttgtgcgtgcaccctacacatgtgtggtacctcactgctgctgtttagggaacttgagggacgcgtttcaaggggttgggtattactgacgagctttggctcaaaatatagcaggaccaggtcttttgttgataagtactgtttgtttattaatatgtcattaatggtatttcttttttacactctacaagtgaattagggagtctcttgttgacccctttgttgcaggaatgtgcgtcgggctaggttatccatgagtttctttattcctaatgcagttagaaagacctttctccttgagctctttgactcccagaaggtaccccagtccccagtgtacttagaaaggatctcgaacattgctggacgtcctcatagtactcacaaagggctagccttgaatgtcactcgcccagtcttcagtctcctgacttagagatacaatcacgtcacaggtctcttggcctcaatctgaaaactgctgccgccgcgccgaggagactcgcatgccgccaccacctcactgggagggcgccgagcccaccgtcgccccctagaccctgacagctgcagctgccttgccttgccgccgcctccctgcagggcccctgttccaatgaaaaacagaacacaaaagagcagagcacctaagcctgtctctgcctccctgtctaccggactggccagggcccaagacccccgctgctccactgcggggctgggcgggctgactccctgcttcctccaagctgctgcctcccctgcagccagggtctgggcagggtgcagccggtcctcggggcacgcagcttccttcaagtacactgtgtgtgcttcccggacctgcggcgatgccacgggcctgccttttctatgcgcctcactagcttaccaccctgtgcaggtaatgcaactgactttgtctcatcagtctttttctttccctgccaccctttatttatcaagcgtaatgttacactttaaaggacagcaaataagaactttgtagaatcccaccaggactttgctaacaataatgtttggaaataaagaagtgctctgaaaaaatatcagccaccaaaatagttatgttggcactgtgttcacacgcatggtccccacacccccaggttgggtgggtttttttgttttttgggtttttttgggggggggggctttttcatgttacatccatatctgtatttatatcttatttgtttcactttcaagtgtatcatggcaaatgtacagatttttttgttaataatgtgctaggatttgctaaaaaagaaaaaaaaaaaacccttttgagtttgccctagaataaatgagacttaattcaa

SEQ ID NO: 124681 - DNA, 5660 bp, Homo sapiens
  Payload ID: 4488
  Gene Symbol: CLASP1
  Gene Name: cytoplasmic linker associated protein 1
  ENST ID: ENST00000455322
  CDS Start-End: 353-4789
cattggggtggaggagaaggcggcggctctctggtccgcagcggcaacagtaacgaaaaacagggctaatggactgctgaattatgaagtatttcagacccagtagtagaacatcactctgccactcactcctttatctcctactagttatttaaattggacttttaatatcctaccagctgctcttcagacacacatggtgcattgttgccattccccagattgcatctttgaaacacaggctcttagtaaccttcagcgaacaaagaggcaacctcccagatacgtctgctgggagggagtcatcgtgactgccctctagcttttgctggatctggatttgaattccactatggagcctcgcatggagtcctgcctggcgcaggtgttgcagaaggatgtggggaaacgattgcaggttggccaagaactgatagactatttctcagacaaacagaagtctgctgaccttgagcatgaccagaccatgttagataaacttgtggatggacttgctacctcttgggtgaactctagcaattacaaggtggttctgctgggcatggacatcctgtccgccctggtgacccggctgcaggatcggttcaaggcgcagatcggcacagtgctgccaagtctaatagacagactaggagatgctaaagactctgtgagggagcaggaccaaactctgctgctaaagatcatggatcaagctgctaatccccagtacgtatgggacagaatgcttggaggcttcaaacacaagaatttccgtactcgagaaggcatctgtctctgccttatagcaacactcaatgcctctggagcacagactttaacactaagcaagattgtgccacatatatgcaacttacttggagatccaaacagccaggttcgagatgcagcaataaacagcttagtggaaatttacagacatgtaggagaacgtgtgagggcagatctcagtaaaaaaggattgccacagtcccggttgaatgtaatttttacaaaatttgatgaagtccagaaatctggaaacatgatacaatctgcaaatgataaaaatttcgacgatgaagattctgtggatggtaacagaccttcctctgctagttctacatcatccaaggctccaccaagttctcggagaaacgttggaatgggaaccacccgccggcttggttcatccacccttggatccaagtcttcagctgcaaaagaaggagctggtgctgttgatgaagaggattttattaaagcatttgatgatgtacctgtagtacagatttattccagccgagaccttgaggaatccataaacaaaattagggaaatattatctgatgacaagcatgattgggagcagagagtaaatgctctaaaaaagattagatctttacttttggctggtgctgctgagtatgataacttctttcaacatttgcgtcttttggatggagcctttaaactctctgctaaggacctgcggtctcaggtagtgcgggaggcttgtatcacgttggggcatctgtcatcagttctggggaataagtttgaccatggagctgaagccattatgccaactatctttaatttaattccaaacagtgccaaaattatggccacatctggtgttgtagctgttaggttaattattcggcacacacacatccctaggttaatacctgtcataacaagcaactgtacctctaagtctgtcgcagttagaaggcgctgttttgaatttttagatttgcttttacaagaatggcagacacattcactagaacgacacatatcagtattagctgaaacaataaagaagggaatacatgatgctgattccgaagcaagaatagaagccagaaaatgttactggggtttccacagtcacttcagcagagaagcagagcacttgtaccacaccttggagtcctcctaccagaaagccctgcagtcccacctgaagaactcagacagcatagtgtctctgcctcagtcagaccgctcatcttccagctctcaagagagtctaaatcgtccgctgtctgccaaaagaagtcctactggaagtaccacatctagagcttctacagttagtaccaaatctgtgtcaacgactgggtccctccagcgatctcgaagtgatattgatgtgaacgcagcagccagtgccaaatccaaagtctcctcatcttcgggcacgacgcctttcagctctgcagcagctttgcctccagggtcatacgcatccttagatggtactaccactaaagcggagggtcggatccgcacaagacggcaaagctctgggagtgccaccaacgtcgcctctacacctgataaccggggccgcagtcgcgctaaagtggtttcacagtcccagcgatccagatctgctaatcctgctggtgctggcagccggtcaagttccccaggaaaattgttgggaagtggttatggtggacttactgggggctcctcacgaggcccacctgtgacaccgtcttcagaaaagcgaagcaagattcccaggagccagggatgtagccgggaaacaagtccaaaccgaataggattagatcggtttgggcttggccagccaggaagaatacctggttctgtgaatgccatgagagttctgagcacaagtacagatcttgaagctgctgttgctgatgctttgctgttaggagactccaggagcaagaagaagcctgtgaggaggagatatgagccgtatgggatgtattctgacgatgatgccaacagtgatgcctcaagtgtttgctctgagcgctcatatggctccaggaatggtggcattccccattatctgcggcagactgaggatgtagcagaagttctcaaccactgtgctagttcaaactggtcagaaaggaaagaagggcttctgggcctgcagaacttactgaagagccaaagaacactgagtcgagttgaactgaaaaggttgtgtgagatcttcactcggatgtttgctgaccctcatagcaaggttttcagtatgtttttggagactcttgtggattttataataattcataaggatgatttacaagactggctttttgttcttctcacacaattacttaagaaaatgggagcagatttacttggatctgtgcaagcaaaagttcaaaaggctctagatgtcacaagggactcctttccatttgatcaacaatttaacattttgatgagatttattgtggatcaaactcaaactccaaacctcaaggtcaaagttgcaatcctgaaatacattgagtctctggccagacagatggatccaacagattttgtaaactctagtgagacaaggcttgctgtttctagaatcataacctggacaacagaaccaaagagttcagacgtgagaaaggcagcacagattgtgctaatctctctgtttgaattgaatactcctgaatttaccatgttacttggtgccttgccaaaaacattccaggatggtgccaccaaactcctgcacaaccacctcaagaattccagtaacaccagtgtgggctctccaagcaatacgattggccggacgccctcccgacacaccagcagcaggaccagccccctgacctcacccaccaactgttcccatgggggtctgtctccaagcatgctggactatgatacagagaacctgaactctgaagaaatctatagttctctacgtggagttacagaagccattgaaaagtttagttttcgaagccaagaagatctgaatgagccaattaaacgagatggcaaaaaggagtgtgatattgtgtcccgcgatgggggcgctgcctcccctgccactgagggccgggggggtagtgaagtagaaggaggccggacagctctggataacaagacctcactactcaacacccagcctccgcgcgccttcccggggccgcgggcgcgagactacaacccgtacccctactcagatgccatcaacacctacgacaagaccgccctgaaagaggctgtgttcgatgacgacatggagcagcttcgagacgtgcccatcgaccattctgacctggtggctgaccttctgaaagagctgtccaaccacaatgagcgagtggaggaacggaagggagccctgctggagctgctcaagatcacgcgggaagacagccttggtgtctgggaggagcacttcaagaccattctgctcctgctgctggagacccttggagacaaagaccattcaattcgagcactggcgttaagagttttgagggaaattctgagaaatcaaccagcaagatttaaaaactacgccgagctgacgattatgaagactctggaagcccacaaagactcccataaggaggtggtgagagcggctgaggaggctgcgtccacactggccagttccatccacccggagcagtgcatcaaggtgctctgccccatcatccagacggccgactaccccatcaaccttgctgccatcaagatgcagaccaaagtcgtcgagaggatcgcaaaggagtcattgctgcagctccttgtcgacatcatcccaggcttgctgcagggttatgacaacaccgaaagtagtgtgcgtaaggccagcgtgttttgcttagtggcaatttattccgtaatcggagaagacctgaaacctcaccttgcacagctcacagggagcaagatgaagctactaaacttatacataaagagggcccagaccaccaacagcaacagcagctcctcctccgatgtctccacgcacagctaatggcagtacctgtctcttgtgtagacctagaagcaatcggtggtgcctctcagagacctttccccacccccttcatcggctgcccagtcagtacaaggaggcccacaaatatttattacaatcagtattttggtcccttccagcttttctgtagaatcttactggtattgaatgtaaaggaagcaaggcctgtattgcagtcttcatacaaaacaaaaggaataagaacagaaaagagccatactgaaacatgtcttgtacagcctgctgagatggcgaaaccctgtgtgtggggtgcagtttttaaaaatcagagcgctctagccactacttggtagaaagtagcattttttttttcagttaataacatatttgggggtggggtggggtgttactttgtgttcttcctccttagcctattttcttgtgcgtatggtctgtgtggggcccctttcacagctgacaccacgaaaggtgatatatctttaagttgtgttctgagacctactaaaaatgggaatcaagtcttggcaagaacagtctgaagatggccttttaacaaacgctgggaattttgcttgtcatatccagactggaggccgactgccctggctttcagcgtagaattgggagtgcaccctgacagtctccttccagctctccctaatcgactccaccgacaaggtccctaccccagagcttccatgcaaaggaattcttcaagtttaaatctggacacaaaaataagataaatgtatggcatcatttagggatgcctgagatggcagttcatgaagcacagaagataaagaagaagtctttcatctttactgctgagatccttgggaacactgttgtcatgggggctctg

SEQ ID NO: 124682 - DNA, 663 bp, Homo sapiens
  Payload ID: 4488
  Gene Symbol: CLASP1
  Gene Name: cytoplasmic linker associated protein 1
  ENST ID: ENST00000418989
  CDS Start-End: 214-663
agtgagggcatgccctggcaaccggtgtcatgatattatttatgagtttgtcaagccattggagatctttgttacttttaaaaagggaagataatggaaacatcataagaaacacaatcatgtaaggcatctttccagttctttagtaactgctggatttgaaagttgaatgtaatttttacaaaatttgatgaagtccagaaatctggaaacatgatacaatctgcaaatgataaaaatttcgacgatgaagattctgtggatggtaacagaccttcctctgctagttctacatcatccaaggctccaccaagttctcggagaaacgttggaatgggaaccacccgccggcttggttcatccacccttggatccaagtcttcagctgcaaaagaaggagctggtgctgttgatgaagaggattttattaaagcatttgatgatgtacctgtagtacagatttattccagccgagaccttgaggaatccataaacaaaattagggaaatattatctgatgacaagcatgattgggagcagagagtaaatgctctaaaaaagattagatctttacttttggctggtgctgctgagtatgataacttctttcaacatttgcgtcttttggatggagcctttaaactctctgctaaggacctgcgg

SEQ ID NO: 124683 - DNA, 3966 bp, Homo sapiens
  Payload ID: 4488
  Gene Symbol: CLASP1
  Gene Name: cytoplasmic linker associated protein 1
  ENST ID: ENST00000452274
  CDS Start-End: 1-3827
ttacaaaatttgatgaagtccagaaatctggaaacatgatacaatctgcaaatgataaaaatttcgacgatgaagattctgtggatggtaacagaccttcctctgctagttctacatcatccaaggctccaccaagttctcggagaaacgttggaatgggaaccacccgccggcttggttcatccacccttggatccaagtcttcagctgcaaaagaaggagctggtgctgttgatgaagaggattttattaaagcatttgatgatgtacctgtagtacagatttattccagccgagaccttgaggaatccataaacaaaattagggaaatattatctgatgacaagcatgattgggagcagagagtaaatgctctaaaaaagattagatctttacttttggctggtgctgctgagtatgataacttctttcaacatttgcgtcttttggatggagcctttaaactctctgctaaggacctgcggtctcaggtagtgcgggaggcttgtatcacgttggggcatctgtcatcagttctggggaataagtttgaccatggagctgaagccattatgccaactatctttaatttaattccaaacagtgccaaaattatggccacatctggtgttgtagctgttaggttaattattcggcacacacacatccctaggttaatacctgtcataacaagcaactgtacctctaagtctgtcgcagttagaaggcgctgttttgaatttttagatttgcttttacaagaatggcagacacattcactagaacgacacatatcagtattagctgaaacaataaagaagggaatacatgatgctgattccgaagcaagaatagaagccagaaaatgttactggggtttccacagtcacttcagcagagaagcagagcacttgtaccacaccttggagtcctcctaccagaaagccctgcagtcccacctgaagaactcagacagcatagtgtctctgcctcagtcagaccgctcatcttccagctctcaagagagtctaaatcgtccgctgtctgccaaaagaagtcctactggaagtaccacatctagagcttctacagttagtaccaaatctgtgtcaacgactgggtccctccagcgatctcgaagtgatattgatgtgaacgcagcagccagtgccaaatccaaagtctcctcatcttcgggcacgacgcctttcagctctgcagcagctttgcctccagggtcatacgcatccttaggtcggatccgcacaagacggcaaagctctgggagtgccaccaacgtcgcctctacacctgataaccggggccgcagtcgcgctaaagtggtttcacagtcccagcgatccagatctgctaatcctgctggtgctggcagccggtcaagttccccaggaaaattgttgggaagtggttatggtggacttactgggggctcctcacgaggcccacctgtgacaccgtcttcagaaaagcgaagcaagattcccaggagccagggatgtagccgggaaacaagtccaaaccgaataggattagatcggtttgggcttggccagccaggaagaatacctggttctgtgaatgccatgagagttctgagcacaagtacagatcttgaagctgctgttgctgatgctttgctgttaggagactccaggagcaagaagaagcctgtgaggaggagatatgagccgtatgggatgtattctgacgatgatgccaacagtgatgcctcaagtgtttgctctgagcgctcatatggctccaggaatggtggcattccccattatctgcggcagactgaggatgtagcagaagttctcaaccactgtgctagttcaaactggtcagaaaggaaagaagggcttctgggcctgcagaacttactgaagagccaaagaacactgagtcgagttgaactgaaaaggttgtgtgagatcttcactcggatgtttgctgaccctcatagcaagattgctgattcagaagcagaatgtgaggataaagaaggaaatttgtttccatcagaagtctcttgtacaagagttttcagtatgtttttggagactcttgtggattttataataattcataaggatgatttacaagactggctttttgttcttctcacacaattacttaagaaaatgggagcagatttacttggatctgtgcaagcaaaagttcaaaaggctctagatgtcacaagggactcctttccatttgatcaacaatttaacattttgatgagatttattgtggatcaaactcaaactccaaacctcaaggtcaaagttgcaatcctgaaatacattgagtctctggccagacagatggatccaacagattttgtaaactctagtgagacaaggcttgctgtttctagaatcataacctggacaacagaaccaaagagttcagacgtgagaaaggcagcacagattgtgctaatctctctgtttgaattgaatactcctgaatttaccatgttacttggtgccttgccaaaaacattccaggatggtgccaccaaactcctgcacaaccacctcaagaattccagtaacaccagtgtgggctctccaagcaatacgattggccggacgccctcccgacacaccagcagcaggaccagccccctgacctcacccaccaactgttcccatgggggtctgtctccaagcatgctggactatgatacagagaacctgaactctgaagaaatctatagttctctacgtggagttacagaagccattgaaaagtttagttttcgaagccaagaagatctgaatgagccaattaaacgagatggcaaaaaggagtgtgatattgtgtcccgcgatgggggcgctgcctcccctgccactgagggccgggggggtagtgaagtagaaggaggccggacagctctggataacaagacctcactactcaacacccagcctccgcgcgccttcccggggccgcgggcgcgagactacaacccgtacccctactcagatgccatcaacacctacgacaagaccgccctgaaagaggctgtgttcgatgacgacatggagcagcttcgagacgtgcccatcgaccattctgacctggtggctgaccttctgaaagagctgtccaaccacaatgagcgagtggaggaacggaagggagccctgctggagctgctcaagatcacgcgggaagacagccttggtgtctgggaggagcacttcaagaccattctgctcctgctgctggagacccttggagacaaagaccattcaattcgagcactggcgttaagagttttgagggaaattctgagaaatcaaccagcaagatttaaaaactacgccgagctgacgattatgaagactctggaagcccacaaagactcccataaggaggtggtgagagcggctgaggaggctgcgtccacactggccagttccatccacccggagcagtgcatcaaggtgctctgccccatcatccagacggccgactaccccatcaaccttgctgccatcaagatgcagaccaaagtcgtcgagaggatcgcaaaggagtcattgctgcagctccttgtcgacatcatcccaggcttgctgcagggttatgacaacaccgaaagtagtgtgcgtaaggccagcgtgttttgcttagtggcaatttattccgtaatcggagaagacctgaaacctcaccttgcacagctcacagggagcaagatgaagctactaaacttatacataaagagggcccagaccaccaacagcaacagcagctcctcctccgatgtctccacgcacagctaatggcagtacctgtctcttgtgtagacctagaagcaatcggtggtgcctctcagagacctttccccacccccttcatcggctgcccagtcagtacaaggaggcccacaaatatttattacaatcagtattttggtccctt

SEQ ID NO: 124684 - DNA, 555 bp, Homo sapiens
  Payload ID: 4488
  Gene Symbol: CLASP1
  Gene Name: cytoplasmic linker associated protein 1
  ENST ID: ENST00000449975
  CDS Start-End: 225-555
aaagtgctgggattacagtaatgagccaccatgcccggctcaagaaagcctcttttttcttaactttttctactaattatgattgcattctcccaccttttcctttcatttttggtgtcactaggatggaatatttagactggttaaggaattttgctttaatttaaatgccaaggttgaatgtaatttttacaaaatttgatgaagtccagaaatctggaaacatgatacaatctgcaaatgataaaaatttcgacgatgaagattctgtggatggtaacagaccttcctctgctagttctacatcatccaaggctccaccaagttctcggagaaacgttggaatgggaaccacccgccggcttggttcatccacccttggatccaagtcttcagctgcaaaagaaggagctggtgctgttgatgaagaggattttattaaagcatttgatgatgtacctgtagtacagatttattccagccgagaccttgaggaatccataaacaaaattagggaaatattatctgatgacaagcatgattgggagcagagag

SEQ ID NO: 124685 - DNA, 7909 bp, Homo sapiens
  Payload ID: 4488
  Gene Symbol: CLASP1
  Gene Name: cytoplasmic linker associated protein 1
  Uniprot ID: Q7Z460
  ENST ID: ENST00000541377
  CDS Start-End: 391-4824
tttttttttttttaatccccgcaccaagcgcttaacctcattggggtggaggagaaggcggcggctctctggtccgcagcggcaacagtaacgaaaaacagggctaatggactgctgaattatgaagtatttcagacccagtagtagaacatcactctgccactcactcctttatctcctactagttatttaaattggacttttaatatcctaccagctgctcttcagacacacatggtgcattgttgccattccccagattgcatctttgaaacacaggctcttagtaaccttcagcgaacaaagaggcaacctcccagatacgtctgctgggagggagtcatcgtgactgccctctagcttttgctggatctggatttgaattccactatggagcctcgcatggagtcctgcctggcgcaggtgttgcagaaggatgtggggaaacgattgcaggttggccaagaactgatagactatttctcagacaaacagaagtctgctgaccttgagcatgaccagaccatgttagataaacttgtggatggacttgctacctcttgggtgaactctagcaattacaaggtggttctgctgggcatggacatcctgtccgccctggtgacccggctgcaggatcggttcaaggcgcagatcggcacagtgctgccaagtctaatagacagactaggagatgctaaagactctgtgagggagcaggaccaaactctgctgctaaagatcatggatcaagctgctaatccccagtacgtatgggacagaatgcttggaggcttcaaacacaagaatttccgtactcgagaaggcatctgtctctgccttatagcaacactcaatgcctctggagcacagactttaacactaagcaagattgtgccacatatatgcaacttacttggagatccaaacagccaggttcgagatgcagcaataaacagcttagtggaaatttacagacatgtaggagaacgtgtgagggcagatctcagtaaaaaaggattgccacagtcccggttgaatgtaatttttacaaaatttgatgaagtccagaaatctggaaacatgatacaatctgcaaatgataaaaatttcgacgatgaagattctgtggatggtaacagaccttcctctgctagttctacatcatccaaggctccaccaagttctcggagaaacgttggaatgggaaccacccgccggcttggttcatccacccttggatccaagtcttcagctgcaaaagaaggagctggtgctgttgatgaagaggattttattaaagcatttgatgatgtacctgtagtacagatttattccagccgagaccttgaggaatccataaacaaaattagggaaatattatctgatgacaagcatgattgggagcagagagtaaatgctctaaaaaagattagatctttacttttggctggtgctgctgagtatgataacttctttcaacatttgcgtcttttggatggagcctttaaactctctgctaaggacctgcggtctcaggtagtgcgggaggcttgtatcacgttggggcatctgtcatcagttctggggaataagtttgaccatggagctgaagccattatgccaactatctttaatttaattccaaacagtgccaaaattatggccacatctggtgttgtagctgttaggttaattattcggcacacacacatccctaggttaatacctgtcataacaagcaactgtacctctaagtctgtcgcagttagaaggcgctgttttgaatttttagatttgcttttacaagaatggcagacacattcactagaacgacacatatcagtattagctgaaacaataaagaagggaatacatgatgctgattccgaagcaagaatagaagccagaaaatgttactggggtttccacagtcacttcagcagagaagcagagcacttgtaccacaccttggagtcctcctaccagaaagccctgcagtcccacctgaagaactcagacagcatagtgtctctgcctcagtcagaccgctcatcttccagctctcaagagagtctaaatcgtccgctgtctgccaaaagaagtcctactggaagtaccacatctagagcttctacagttagtaccaaatctgtgtcaacgactgggtccctccagcgatctcgaagtgatattgatgtgaacgcagcagccagtgccaaatccaaagtctcctcatcttcgggcacgacgcctttcagctctgcagcagctttgcctccagggtcatacgcatccttagagtccagacacatgagggaagacatggagtacataggcctggactcaggtcggatccgcacaagacggcaaagctctgggagtgccaccaacgtcgcctctacacctgataaccggggccgcagtcgcgctaaagtggtttcacagtcccagcctggcagccggtcaagttccccaggaaaattgttgggaagtggttatggtggacttactgggggctcctcacgaggcccacctgtgacaccgtcttcagaaaagcgaagcaagattcccaggagccagggatgtagccgggaaacaagtccaaaccgaataggattagatcggtttgggcttggccagccaggaagaatacctggttctgtgaatgccatgagagttctgagcacaagtacagatcttgaagctgctgttgctgatgctttgctgttaggagactccaggagcaagaagcctgtgaggaggagatatgagccgtatgggatgtattctgacgatgatgccaacagtgatgcctcaagtgtttgctctgagcgctcatatggctccaggaatggtggcattccccattatctgcggcagactgaggatgtagcagaagttctcaaccactgtgctagttcaaactggtcagaaaggaaagaagggcttctgggcctgcagaacttactgaagagccaaagaacactgagtcgagttgaactgaaaaggttgtgtgagatcttcactcggatgtttgctgaccctcatagcaagagagttttcagtatgtttttggagactcttgtggattttataataattcataaggatgatttacaagactggctttttgttcttctcacacaattacttaagaaaatgggagcagatttacttggatctgtgcaagcaaaagttcaaaaggctctagatgtcacaagggactcctttccatttgatcaacaatttaacattttgatgagatttattgtggatcaaactcaaactccaaacctcaaggtcaaagttgcaatcctgaaatacattgagtctctggccagacagatggatccaacagattttgtaaactctagtgagacaaggcttgctgtttctagaatcataacctggacaacagaaccaaagagttcagacgtgagaaaggcagcacagattgtgctaatctctctgtttgaattgaatactcctgaatttaccatgttacttggtgccttgccaaaaacattccaggatggtgccaccaaactcctgcacaaccacctcaagaattccagtaacaccagtgtgggctctccaagcaatacgattggccggacgccctcccgacacaccagcagcaggaccagccccctgacctcacccaccaactgttcccatgggggtctgtctccaagcatgctggactatgatacagagaacctgaactctgaagaaatctatagttctctacgtggagttacagaagccattgaaaagtttagttttcgaagccaagaagatctgaatgagccaattaaacgagatggcaaaaaggagtgtgatattgtgtcccgcgatgggggcgctgcctcccctgccactgagggccgggggggtagtgaagtagaaggaggccggacagctctggataacaagacctcactactcaacacccagcctccgcgcgccttcccggggccgcgggcgcgagactacaacccgtacccctactcagatgccatcaacacctacgacaagaccgccctgaaagaggctgtgttcgatgacgacatggagcagcttcgagacgtgcccatcgaccattctgacctggtggctgaccttctgaaagagctgtccaaccacaatgagcgagtggaggaacggaagggagccctgctggagctgctcaagatcacgcgggaagacagccttggtgtctgggaggagcacttcaagaccattctgctcctgctgctggagacccttggagacaaagaccattcaattcgagcactggcgttaagagttttgagggaaattctgagaaatcaaccagcaagatttaaaaactacgccgagctgacgattatgaagactctggaagcccacaaagactcccataaggaggtggtgagagcggctgaggaggctgcgtccacactggccagttccatccacccggagcagtgcatcaaggtgctctgccccatcatccagacggccgactaccccatcaaccttgctgccatcaagatgcagaccaaagtcgtcgagaggatcgcaaaggagtcattgctgcagctccttgtcgacatcatcccaggcttgctgcagggttatgacaacaccgaaagtagtgtgcgtaaggccagcgtgttttgcttagtggcaatttattccgtaatcggagaagacctgaaacctcaccttgcacagctcacagggagcaagatgaagctactaaacttatacataaagagggcccagaccaccaacagcaacagcagctcctcctccgatgtctccacgcacagctaatggcagtacctgtctcttgtgtagacctagaagcaatcggtggtgcctctcagagacctttccccacccccttcatcggctgcccagtcagtacaaggaggcccacaaatatttattacaatcagtattttggtcccttccagcttttctgtagaatcttactggtattgaatgtaaaggaagcaaggcctgtattgcagtcttcatacaaaacaaaaggaataagaacagaaaagagccatactgaaacatgtcttgtacagcctgctgagatggcgaaaccctgtgtgtggggtgcagtttttaaaaatcagagcgctctagccactacttggtagaaagtagcattttttttttcagttaataacatatttgggggtggggtggggtgttactttgtgttcttcctccttagcctattttcttgtgcgtatggtctgtgtggggcccctttcacagctgacaccacgaaaggtgatatatctttaagttgtgttctgagacctactaaaaatgggaatcaagtcttggcaagaacagtctgaagatggccttttaacaaacgctgggaattttgcttgtcatatccagactggaggccgactgccctggctttcagcgtagaattgggagtgcaccctgacagtctccttccagctctccctaatcgactccaccgacaaggtccctaccccagagcttccatgcaaaggaattcttcaagtttaaatctggacacaaaaataagataaatgtatggcatcatttagggatgcctgagatggcagttcatgaagcacagaagataaagaagaagtctttcatctttactgctgagatccttgggaacactgttgtcatgggggctctgccaagaccctcatctctgggctacacggtgattcagattgagcaccaacttgtttcctcccctcaaagttctgcctaagccgttcagttctaacatggtctcagttaatctggtaaatggcatctttaccatcttagttctgacttctcagtttaatgtgggattaagagccaagaaaagcctagagagactggatatcacaattttttttaattttataaactgaagtagttccttgaatgtctgttgatgaaatagtcactgtttaaggaaaaaagtaattatgaggtgtagcagattgcagaaaaacaggattagaaacacacttaaaaagaacacacatttagagtctctcttcctcctcagcgaaccactaggccccctttttaaaaacacctttagagcctaattactccaataaaagtaactagaggtttggagtctggttaaataaattctgagtaaaattcttaagccaaatggaaattcttaatgcaatcatgaggacttctattgtctcttactgttgtattagatcctataaattgaactgatttttccataaggaaaatgcttcttttgagattaattctaataacgtatttgctattgcagtgcagagcccactgcaactgctaggactgaaagcagaggctgggtgccagagcacgtgattcttaacatcatttccacagacccctctgccctgaccctctgcattggatgcaggaagctgggaaagactgatgttgatttggaaacatgggctgaaaatgaaggccccatagtgcataggaacagtaaagccagggtgctgacgtgtgtgtgtgtgtgtgtgtgtgtgtgtgtgtgtgtgtggtgttgtgtgtgtttgtgcgtgcaccctacacatgtgtggtacctcactgctgctgtttagggaacttgagggacgcgtttcaaggggttgggtattactgacgagctttggctcaaaatatagcaggaccaggtcttttgttgataagtactgtttgtttattaatatgtcattaatggtatttcttttttacactctacaagtgaattagggagtctcttgttgacccctttgttgcaggaatgtgcgtcgggctaggttatccatgagtttctttattcctaatgcagttagaaagacctttctccttgagctctttgactcccagaaggtaccccagtccccagtgtacttagaaaggatctcgaacattgctggacgtcctcatagtactcacaaagggctagccttgaatgtcactcgcccagtcttcagtctcctgacttagagatacaatcacgtcacaggtctcttggcctcaatctgaaaactgctgccgccgcgccgaggagactcgcatgccgccaccacctcactgggagggcgccgagcccaccgtcgccccctagaccctgacagctgcagctgccttgccttgccgccgcctccctgcagggcccctgttccaatgaaaaacagaacacaaaagagcagagcacctaagcctgtctctgcctccctgtctaccggactggccagggcccaagacccccgctgctccactgcggggctgggcgggctgactccctgcttcctccaagctgctgcctcccctgcagccagggtctgggcagggtgcagccggtcctcggggcacgcagcttccttcaagtacactgtgtgtgcttcccggacctgcggcgatgccacgggcctgccttttctatgcgcctcactagcttaccaccctgtgcaggtaatgcaactgactttgtctcatcagtctttttctttccctgccaccctttatttatcaagcgtaatgttacactttaaaggacagcaaataagaactttgtagaatcccaccaggactttgctaacaataatgtttggaaataaagaagtgctctgaaaaaatatcagccaccaaaatagttatgttggcactgtgttcacacgcatggtccccacacccccaggttgggtgggtttttttgttttttgggtttttttgggggggggggctttttcatgttacatccatatctgtatttatatcttatttgtttcactttcaagtgtatcatggcaaatgtacagatttttttgttaataatgtgctaggatttgctaaaaaagaaaaaaaaaaaacccttttgagtttgccctagaataaatgagacttaattcaa

SEQ ID NO: 124686 - DNA, 1597 bp, Homo sapiens
  Payload ID: 4489
  Gene Symbol: CLASP2
  Gene Name: cytoplasmic linker associated protein 2
  Uniprot ID: O75122
  ENST ID: ENST00000313350
  CDS Start-End: 178-1473
acagcacctagggcagggaagagaaagaaaaatgccggcacaaacctcagtggtggttctgtggttgtttctgtctttttttgatagaatctttgattagtatcgaatttactgtatttggccatgtgaactattgggagcctcctagggtgagggaaattaagagctttcagaggaatgaggcgactgatttgcaaacggatctgtgattataaaagcttcgatgatgaagaatcagtggatggaaataggccatcatcagctgcatcagccttcaaggttcctgcacctaaaacatccggaaatcctgccaacagtgcaaggaagcctggttcagcaggtggccctaaggttggaggtgcttctaaggaaggaggtgctggagcagttgatgaagatgattttataaaagcttttacagatgtcccttctattcagatttattctagtcgagaactcgaagaaacattaaataaaatcagggaaattttgtcagatgataaacatgactgggatcagcgtgccaatgcactgaagaaaattcgatcactgcttgttgctggagctgcacagtatgattgcttttttcaacatttacgattgttggatggagcacttaaactttcagctaaggatcttagatcccaggtggttagagaagcttgtattactgtagcccacctttcaacagttttgggaaacaagtttgatcatggcgctgaagccattgtacctacactttttaatctcgtccccaatagtgcaaaagtcatggcaacttctggatgtgcagcaatcagatttatcattcggcatactcatgtacccagacttatacctttaataacaagcaattgcacatcaaaatcagttcccgtgaggagacgttcatttgaatttttagatttattgttgcaagagtggcagactcattcattggaaagacatgcagccgtcttggttgaaactattaaaaagggaattcatgatgctgacgctgaggccagagtggaggcaagaaagacatacatgggtcttagaaaccactttcctggtgaagctgaaacattatataattcccttgagccatcttatcagaagagtcttcaaacttacttaaagagttctggcagtgtagcatctcttccacaatcagacaggtcctcatccagctcacaggaaagtctcaatcgccctttttcttccaaatggtctacagcaaatccatcaactgtggctggaagagtatcagcaggcagcagcaaagccagttcccttccaggaagcctgcagcgttcacgaagtgacattgatgtgaatgctgctgcaggtgccaaggcacatcatgctgctggacagtctgtgcgaagcgggcgcttaggtgcaggtgccctgaatgcaggttcctatgcgtcactagaatgtgaagccttttggagatctgggagaactgcaaagctctactctgtctaaccaaaccctaaacatatattccaaaactctattcagtttgatttcttcatgtttttatgtctatcaaattaaaaagttgacgttggtttgcgtatctcttcttcatgcttccatttttttcttt

SEQ ID NO: 124687 - DNA, 1989 bp, Homo sapiens
  Payload ID: 4489
  Gene Symbol: CLASP2
  Gene Name: cytoplasmic linker associated protein 2
  ENST ID: ENST00000333778
  CDS Start-End: 227-1603
gcagaatctgggtataaggaataaggcagggcgtgctagaagatacactatgggaggagctggcagaaaatgcagagtagcaaaaacatgaaaaatacttttactacctttagagttaaaatgttttatgttttgacttaatatgtataagtaagaagtatgaaaatactgcattttgattttgaattacagaggattattttatatggtgttagccaatatataaatgcttattcaaaggacctttatttcgtattatatatcttaccaaaataaaagcttcgatgatgaagaatcagtggatggaaataggccatcatcagctgcatcagccttcaaggttcctgcacctaaaacatccggaaatcctgccaacagtgcaaggaagcctggttcagcaggtggccctaaggttggaggtgcttctaaggaaggaggtgctggagcagttgatgaagatgattttataaaagcttttacagatgtcccttctattcagatttattctagtcgagaactcgaagaaacattaaataaaatcagggaaattttgtcagatgataaacatgactgggatcagcgtgccaatgcactgaagaaaattcgatcactgcttgttgctggagctgcacagtatgattgcttttttcaacatttacgattgttggatggagcacttaaactttcagctaaggatcttagatcccaggtggttagagaagcttgtattactgtagcccacctttcaacagttttgggaaacaagtttgatcatggcgctgaagccattgtacctacactttttaatctcgtccccaatagtgcaaaagtcatggcaacttctggatgtgcagcaatcagatttatcattcggcatactcatgtacccagacttatacctttaataacaagcaattgcacatcaaaatcagttcccgtgaggagacgttcatttgaatttttagatttattgttgcaagagtggcagactcattcattggaaagacatgcagccgtcttggttgaaactattaaaaagggaattcatgatgctgacgctgaggccagagtggaggcaagaaagacatacatgggtcttagaaaccactttcctggtgaagctgaaacattatataattcccttgagccatcttatcagaagagtcttcaaacttacttaaagagttctggcagtgtagcatctcttccacaatcagacaggtcctcatccagctcacaggaaagtctcaatcgccctttttcttccaaatggtctacagcaaatccatcaactgtggctggaagagtatcagcaggcagcagcaaagccagttcccttccaggaagcctgcagcgttcacgaagtgacattgatgtgaatgctgctgcaggtgccaaggcacatcatgctgctggacagtctgtgcgaagcgggcgcttaggtgcaggtgccctgaatgcaggttcctatgcgtcactaggtaagagaactgattatggaaaattgtaccatgttctctccctgatctctgtgaagacaagttcatataccttaatcatttctattcattcttgttatttaaggatagtccatatgttttaatataattctatattgcggacacacttctgaggaatctgagctgccttgtttctccttttcccttgttctcatcatcgtcttgatcaaagaaacaattcttgaatccatgattgcctgtagaattttcataactgcacttctaccacatctagccactggtttctaagggggtttgggaagggaattggcttgtatctaactttcctgttttctttctcctacttctcttctcttaccaagaatgtgaagccttttggagatctgggagaactgcaaagctctactctgtctaaccaaaccctaaacatatattccaaaactctattcagtttgatttcttcatgtttttatgtctatcaaattaaaaagttgacgttggtttgcgt

SEQ ID NO: 124688 - DNA, 7141 bp, Homo sapiens
  Payload ID: 4489
  Gene Symbol: CLASP2
  Gene Name: cytoplasmic linker associated protein 2
  Uniprot ID: O75122
  ENST ID: ENST00000359576
  CDS Start-End: 212-4759
gggctggggatcggggggcgccgagtttgactagtttgggggcggctgggcgcttggcgttcctcccgccgcccgctgcgccccgcaagccgcgcccctggcgggctaagtgagtcccgcccgctcccgcggggacccgcactggaggctgggcggctctcggcgaaagttggccgctcacagactggcaggcgggcgggcggccgcagccatggagccccgcagcatggagtacttctgcgcccaggtgcagcagaaggacgtcggcggccggctgcaggtcggccaggagctcctgctctaccttggcgcccccggcgccatctcggacctggaggaggacctgggccgcctaggcaagacagtcgacgcgctcaccggctgggtgggttcgagcaactaccgggtatcattaatgggattggaaattttaagtgcctttgtggacagattatcaacacgctttaaatcctatgtagcaatggttattgtagctttaatagacagaatgggagatgccaaagacaaggttcgagatgaagctcagactctgatattgaagttaatggatcaagtagcaccacctatgtacatttgggagcagttggcttctggttttaaacacaagaattttcgatctcgagaaggcgtgtgtctgtgtcttattgaaaccttaaacatttttggggctcagccactagtcatcagcaaattgataccacatttgtgtatcctgtttggagactccaacagtcaggtgagagatgctgcaatattggctatagtggagatttatagacatgtgggagaaaaagtgaggatggatctttataagagaggaattccccctgctagattagaaatgatatttgccaaatttgatgaagtgcaaagttcaggcggtatgattttgagtgtctgcaaagataaaagcttcgatgatgaagaatcagtggatggaaataggccatcatcagctgcatcagccttcaaggttcctgcacctaaaacatccggaaatcctgccaacagtgcaaggaagcctggttcagcaggtggccctaaggttggagcaggtgcttctaaggaaggaggtgctggagcagttgatgaagatgattttataaaagcttttacagatgtcccttctattcagatttattctagtcgagaactcgaagaaacattaaataaaatcagggaaattttgtcagatgataaacatgactgggatcagcgtgccaatgcactgaagaaaattcgatcactgcttgttgctggagctgcacagtatgattgcttttttcaacatttacgattgttggatggagcacttaaactttcagctaaggatcttagatcccaggtggttagagaagcttgtattactgtagcccacctttcaacagttttgggaaacaagtttgatcatggcgctgaagccattgtacctacactttttaatctcgtccccaatagtgcaaaagtcatggcaacttctggatgtgcagcaatcagatttatcattcggcatactcatgtacccagacttatacctttaataacaagcaattgcacatcaaaatcagttcccgtgaggagacgttcatttgaatttttagatttattgttgcaagagtggcagactcattcattggaaagacatgcagccgtcttggttgaaactattaaaaagggaattcatgatgctgacgctgaggccagagtggaggcaagaaagacatacatgggtcttagaaaccactttcctggtgaagctgaaacattatataattcccttgagccatcttatcagaagagtcttcaaacttacttaaagagttctggcagtgtagcatctcttccacaatcagacaggtcctcatccagctcacaggaaagtctcaatcgccctttttcttccaaatggtctacagcaaatccatcaactgtggctggaagagtatcagcaggcagcagcaaagccagttcccttccaggaagcctgcagcgttcacgaagtgacattgatgtgaatgctgctgcaggtgccaaggcacatcatgctgctggacagtctgtgcgaagcgggcgcttaggtgcaggtgccctgaatgcaggttcctatgcgtcactagaggatacttctgacaagctggatggaacagcatctgaagatggccgggtgagagcaaaactttcagcaccacttgctggcatgggaaatgccaaggcagattctagaggaagaagtcgaacaaaaatggtgtctcaatcacagcctggtagccggtctgggtctccaggaagagttctgaccacaacagccctgtccactgtgagctctggtgttcaaagagtcctggtcaattcagcctcagcacaaaaaagaagcaagataccacggagccagggctgtagcagagaggctagtccatctaggctttcagtggcccgaagcagtcgtattcctcgaccaagtgtgagtcaaggatgcagccgggaagctagtcgggagagcagcagagacacaagtcctgttcgctcttttcagcccctcggtccaggttatgggatcagccaatcaagtcgactgtcgtcttctgttagtgccatgcgagtcctgaacacaggttctgatgtggaggaggcggtggcagatgccttgctcttaggagacatacggactaagaaaaaaccagctcgaagaagatatgaatcatatggaatgcattcagatgatgacgccaacagcgatgcatctagtgcttgttcagaacgctcctatagttctcgaaatggtagtattcctacatatatgaggcagacggaagatgtggcagaagtcctcaatagatgtgctagttccaattggtcagaaaggaaagaaggcctcctaggtctgcagaacttattaaaaaatcagagaacactaagtcgagttgaactgaaaagattatgtgaaattttcacaagaatgtttgctgaccctcatggcaagagagtattcagcatgtttttggagactctagtggatttcatacaagtccacaaagatgatcttcaagattggttgtttgtactgctgacacaactactaaaaaaaatgggtgctgatttgcttggatctgttcaggcaaaagttcagaaagcccttgatgttacaagagagtcttttccaaatgatcttcagttcaatattctaatgagatttacagttgatcagacccagacaccaagcttaaaggtgaaggttgctatccttaaatacatagaaactctggccaaacagatggatccaggagattttataaattccagtgaaactcgcctagcagtgtctcgggtcatcacttggacaacagaacccaaaagttctgatgttcggaaggcagcacagtcagtgctgatttcattatttgaactcaataccccagagtttacaatgttattaggagctttaccaaaaacttttcaggatggtgctaccaagcttcttcataatcaccttcgaaacactggcaatggaacccagagttccatggggagtcctttgacaagaccaacaccacgatcaccagctaactggtccagtcctcttacttctcctaccaatacatcacagaatactttatctccaagtgcatttgattatgacacagaaaatatgaactctgaagatatttatagctctcttagaggtgtcactgaagcaatccagaatttcagcttccgtagccaagaagatatgaatgagccattgaaaagggattctaaaaaagatgatggcgattcaatgtgtggtggtcctgggatgtctgacccaagagcaggaggtgatgctactgactcaagtcaaacagctcttgataataaagcttcattgctccattcaatgcctactcactcctctccacgctctcgagactataatccatataactattcagatagcatcagtcccttcaacaagtctgccctcaaggaagccatgtttgatgatgatgctgaccagtttcctgacgatctttccctagatcattctgacctagttgcagagttgttgaaggagctgtctaaccataatgagcgtgtagaagaaagaaaaattgccctctatgaacttatgaaactgacacaggaagaatcttttagtgtttgggatgaacacttcaaaacaatattgcttttattgcttgaaacgcttggagataaagagcctacaatcagggctttggcattaaaggttttaagagaaatcctaaggcatcaaccagcaagatttaaaaactatgcagaattgactgtcatgaaaacattggaagcacataaagatcctcataaggaggtggtgagatctgctgaggaagcggcatcagtgttggccacttcaattagtccagagcagtgcatcaaagtgctttgtcctatcattcaaactgcagactacccaattaatctggctgcaatcaaaatgcaaacaaaagtgatagagagagtgtccaaggaaaccctaaacctgcttttgccagagattatgccaggtctaatacagggttatgataattcagagagcagtgttcggaaagcttgtgtcttctgcctggtggctgttcatgcggtaattggtgatgaactaaaaccacatctcagtcaacttactggcagtaaaatgaagctactgaatctttacatcaaacgtgcacaaacaggttctggaggagctgatcccactactgatgtttctggacaaagttagtgaagctcatcacagcgaaccaggtctctcaaaagaaaggacagatagaccaccctcatcaatgaaaggaagttctcaaacacatcctttggaacttactattgtttcccagttttagttttttgtttcgtttcgttttgtattttctgtaacagaggactatcctcagtctgcatgtaacttttatgatagttattccaaattcaagaagaagcagtattaacatcaattgatcgacacaaagtaatttttaatttaattcatcatttcacatgtttgtactttgtcttcccattaacctttgccagtgttatgattgtataaatttttttaaatgctggttaaacaggaatgcttaaagctttaaaagtttaacagtctaaaacatttttgcttttattcaactgcagaataatatttttattgctactttgagttttgtttcgtatcatgtcctatgctagaaatatttaaatgatgtgaaacaaagcaggactaatttgaactacagctggactccgtttgtgtgatggtgatacatgtcattagttgcaacttctttggggtgatctatagtttgaaaactaaaacctcaaagacagatgttacagaatcagccagttctgtaaaactgatattgtctattggttattgatcttgccatctttatttaaaaccatgtcccttctatgatcccttaagaaagctgcaccaaatcatctgcctgttttttcttgatacttactgaaatagaaggttttattgcagggtttattttggtttgtttatatctttgttgtgaatgatgcttttttgtatttattaatatcaaattcacttatgaataaacttgataatggaaacggacaaaaaaaatcaagtgcgtgtgtgtccttgaccgtcttctgtttctcacgtaataaacaaattatcgagacatgggagtgaccagcaccttttctttaaatggtggaacctggtttccttttaccatgaaattgtcttacttgaaaatattgatcctgatgagagagaagatggtgccaaggctgtctttgtataatgggctcaaattctctacctcttcagggctaatacttttaactgagctgctgcctatagtgtcttttggaaaactacttaaagggtgattttctgttactttttagcaaatttttttaatcacctcttgctacacccattcttttcatgtgcagccgactcaaaaattaccagttttggtgaaaggctaaattagataatttggaaccaggatactaatgatttctcatctttacttttttttaatcctaatataaagtgaatttgattgaaaaggcaaatagctattagggaagcagtttgccattgttgcagagttatctgtactttgtttaactgaaaaaaatgtagaaatatatgtaaagaatttaagacaagagtactgaatggatgatttgtcataggctttcccctttctttctgttctagcagcaggaaaagtttctctatatcctctccctctacctgtaacaattttgttttctactgttaattacattgtgtatttatagttctatgcttactgttgtgcatatactggcaataaaactgtacataacattacttgaaaaagttaataatgtatatcagtttttctgtctcactgtgtaacaagtcactcagttttattttaactttagacggtcttgtatcagtggtggtctcttgaattttgtaagttcatctgaggagaaaagatttttcaggtgtagctaccacaatcaaaggtatatagctacatacgcatgtatatattacagcttatctgtaagaagaaaatgcattttaaacacaactcttctcagtagcattttatgacctttggatatgtttgtaatcatttcgaatcaaaatattgatttaattttgacctctggtttaagatactgctttaactactgttgacaaccaagtagagtgacttaagctgaacagtaactaactggaaaattagataagcacctggcatctaatggcaggcaggcactcaagaaatgaattaactacataatggaaaagtatggtttaatgtgtccaaatgaaagctagtagatgtaaacatggaaaaattgtgtttacaattttataatctcagttgataagactataagaaagctgattatttaaatcactatatacaatacacccttaatttgttcattccagaaacatactgagatgtcagctacttaaaaatggtcacaaaaagctactgtttatatttttcctcctgctattctctcccaaattaattattaataagtgttgttcatttactgcactgctgagaactaattaaaattatatattccagattgt

SEQ ID NO: 124689 - DNA, 7282 bp, Homo sapiens
  Payload ID: 4489
  Gene Symbol: CLASP2
  Gene Name: cytoplasmic linker associated protein 2
  ENST ID: ENST00000399362
  CDS Start-End: 355-4896
agaggtcctatcgctcccagcggtttccgcagccacctccaccacctccgcagcaaaacgctagccggactggagggccctcgccggcgtcgtgctgacgtcacgcgcgtgctgacgtcgcccgcggccgcggcctctgaagcgggctggggatcggggggcgccgagtttgactagtttgggggcggctgggcgcttggcgttcctcccgccgcccgctgcgccccgcaagccgcgcccctggcgggctaagtgagtcccgcccgctcccgcggggacccgcactggaggctgggcggctctcggcgaaagttggccgctcacagactggcaggcgggcgggcggccgcagccatggagccccgcagcatggagtacttctgcgcccaggtgcagcagaaggacgtcggcggccggctgcaggtcggccaggagctcctgctctaccttggcgcccccggcgccatctcggacctggaggaggacctgggccgcctaggcaagacagtcgacgcgctcaccggctgggtgggttcgagcaactaccgggtatcattaatgggattggaaattttaagtgcctttgtggacagattatcaacacgctttaaatcctatgtagcaatggttattgtagctttaatagacagaatgggagatgccaaagacaaggttcgagatgaagctcagactctgatattgaagttaatggatcaagtagcaccacctatgtacatttgggagcagttggcttctggttttaaacacaagaattttcgatctcgagaaggcgtgtgtctgtgtcttattgaaaccttaaacatttttggggctcagccactagtcatcagcaaattgataccacatttgtgtatcctgtttggagactccaacagtcaggtgagagatgctgcaatattggctatagtggagatttatagacatgtgggagaaaaagtgaggatggatctttataagagaggaattccccctgctagattagaaatgatatttgccaaatttgatgaagtgcaaagttcaggcggtatgattttgagtgtctgcaaagataaaagcttcgatgatgaagaatcagtggatggaaataggccatcatcagctgcatcagccttcaaggttcctgcacctaaaacatccggaaatcctgccaacagtgcaaggaagcctggttcagcaggtggccctaaggttggaggtgcttctaaggaaggaggtgctggagcagttgatgaagatgattttataaaagcttttacagatgtcccttctattcagatttattctagtcgagaactcgaagaaacattaaataaaatcagggaaattttgtcagatgataaacatgactgggatcagcgtgccaatgcactgaagaaaattcgatcactgcttgttgctggagctgcacagtatgattgcttttttcaacatttacgattgttggatggagcacttaaactttcagctaaggatcttagatcccaggtggttagagaagcttgtattactgtagcccacctttcaacagttttgggaaacaagtttgatcatggcgctgaagccattgtacctacactttttaatctcgtccccaatagtgcaaaagtcatggcaacttctggatgtgcagcaatcagatttatcattcggcatactcatgtacccagacttatacctttaataacaagcaattgcacatcaaaatcagttcccgtgaggagacgttcatttgaatttttagatttattgttgcaagagtggcagactcattcattggaaagacatgcagccgtcttggttgaaactattaaaaagggaattcatgatgctgacgctgaggccagagtggaggcaagaaagacatacatgggtcttagaaaccactttcctggtgaagctgaaacattatataattcccttgagccatcttatcagaagagtcttcaaacttacttaaagagttctggcagtgtagcatctcttccacaatcagacaggtcctcatccagctcacaggaaagtctcaatcgccctttttcttccaaatggtctacagcaaatccatcaactgtggctggaagagtatcagcaggcagcagcaaagccagttcccttccaggaagcctgcagcgttcacgaagtgacattgatgtgaatgctgctgcaggtgccaaggcacatcatgctgctggacagtctgtgcgaagcgggcgcttaggtgcaggtgccctgaatgcaggttcctatgcgtcactagaggatacttctgacaagctggatggaacagcatctgaagatggccgggtgagagcaaaactttcagcaccacttgctggcatgggaaatgccaaggcagattctagaggaagaagtcgaacaaaaatggtgtctcaatcacagcctggtagccggtctgggtctccaggaagagttctgaccacaacagccctgtccactgtgagctctggtgttcaaagagtcctggtcaattcagcctcagcacaaaaaagaagcaagataccacggagccagggctgtagcagagaggctagtccatctaggctttcagtggcccgaagcagtcgtattcctcgaccaagtgtgagtcaaggatgcagccgggaagctagtcgggagagcagcagagacacaagtcctgttcgctcttttcagcccctcggtccaggttatgggatcagccaatcaagtcgactgtcgtcttctgttagtgccatgcgagtcctgaacacaggttctgatgtggaggaggcggtggcagatgccttgctcttaggagacatacggactaagaaaaaaccagctcgaagaagatatgaatcatatggaatgcattcagatgatgacgccaacagcgatgcatctagtgcttgttcagaacgctcctatagttctcgaaatggtagtattcctacatatatgaggcagacggaagatgtggcagaagtcctcaatagatgtgctagttccaattggtcagaaaggaaagaaggcctcctaggtctgcagaacttattaaaaaatcagagaacactaagtcgagttgaactgaaaagattatgtgaaattttcacaagaatgtttgctgaccctcatggcaaggtattcagcatgtttttggagactctagtggatttcatacaagtccacaaagatgatcttcaagattggttgtttgtactgctgacacaactactaaaaaaaatgggtgctgatttgcttggatctgttcaggcaaaagttcagaaagcccttgatgttacaagagagtcttttccaaatgatcttcagttcaatattctaatgagatttacagttgatcagacccagacaccaagcttaaaggtgaaggttgctatccttaaatacatagaaactctggccaaacagatggatccaggagattttataaattccagtgaaactcgcctagcagtgtctcgggtcatcacttggacaacagaacccaaaagttctgatgttcggaaggcagcacagtcagtgctgatttcattatttgaactcaataccccagagtttacaatgttattaggagctttaccaaaaacttttcaggatggtgctaccaagcttcttcataatcaccttcgaaacactggcaatggaacccagagttccatggggagtcctttgacaagaccaacaccacgatcaccagctaactggtccagtcctcttacttctcctaccaatacatcacagaatactttatctccaagtgcatttgattatgacacagaaaatatgaactctgaagatatttatagctctcttagaggtgtcactgaagcaatccagaatttcagcttccgtagccaagaagatatgaatgagccattgaaaagggattctaaaaaagatgatggcgattcaatgtgtggtggtcctgggatgtctgacccaagagcaggaggtgatgctactgactcaagtcaaacagctcttgataataaagcttcattgctccattcaatgcctactcactcctctccacgctctcgagactataatccatataactattcagatagcatcagtcccttcaacaagtctgccctcaaggaagccatgtttgatgatgatgctgaccagtttcctgacgatctttccctagatcattctgacctagttgcagagttgttgaaggagctgtctaaccataatgagcgtgtagaagaaagaaaaattgccctctatgaacttatgaaactgacacaggaagaatcttttagtgtttgggatgaacacttcaaaacaatattgcttttattgcttgaaacgcttggagataaagagcctacaatcagggctttggcattaaaggttttaagagaaatcctaaggcatcaaccagcaagatttaaaaactatgcagaattgactgtcatgaaaacattggaagcacataaagatcctcataaggaggtggtgagatctgctgaggaagcggcatcagtgttggccacttcaattagtccagagcagtgcatcaaagtgctttgtcctatcattcaaactgcagactacccaattaatctggctgcaatcaaaatgcaaacaaaagtgatagagagagtgtccaaggaaaccctaaacctgcttttgccagagattatgccaggtctaatacagggttatgataattcagagagcagtgttcggaaagcttgtgtcttctgcctggtggctgttcatgcggtaattggtgatgaactaaaaccacatctcagtcaacttactggcagtaaaatgaagctactgaatctttacatcaaacgtgcacaaacaggttctggaggagctgatcccactactgatgtttctggacaaagttagtgaagctcatcacagcgaaccaggtctctcaaaagaaaggacagatagaccaccctcatcaatgaaaggaagttctcaaacacatcctttggaacttactattgtttcccagttttagttttttgtttcgtttcgttttgtattttctgtaacagaggactatcctcagtctgcatgtaacttttatgatagttattccaaattcaagaagaagcagtattaacatcaattgatcgacacaaagtaatttttaatttaattcatcatttcacatgtttgtactttgtcttcccattaacctttgccagtgttatgattgtataaatttttttaaatgctggttaaacaggaatgcttaaagctttaaaagtttaacagtctaaaacatttttgcttttattcaactgcagaataatatttttattgctactttgagttttgtttcgtatcatgtcctatgctagaaatatttaaatgatgtgaaacaaagcaggactaatttgaactacagctggactccgtttgtgtgatggtgatacatgtcattagttgcaacttctttggggtgatctatagtttgaaaactaaaacctcaaagacagatgttacagaatcagccagttctgtaaaactgatattgtctattggttattgatcttgccatctttatttaaaaccatgtcccttctatgatcccttaagaaagctgcaccaaatcatctgcctgttttttcttgatacttactgaaatagaaggttttattgcagggtttattttggtttgtttatatctttgttgtgaatgatgcttttttgtatttattaatatcaaattcacttatgaataaacttgataatggaaacggacaaaaaaaatcaagtgcgtgtgtgtccttgaccgtcttctgtttctcacgtaataaacaaattatcgagacatgggagtgaccagcaccttttctttaaatggtggaacctggtttccttttaccatgaaattgtcttacttgaaaatattgatcctgatgagagagaagatggtgccaaggctgtctttgtataatgggctcaaattctctacctcttcagggctaatacttttaactgagctgctgcctatagtgtcttttggaaaactacttaaagggtgattttctgttactttttagcaaatttttttaatcacctcttgctacacccattcttttcatgtgcagccgactcaaaaattaccagttttggtgaaaggctaaattagataatttggaaccaggatactaatgatttctcatctttacttttttttaatcctaatataaagtgaatttgattgaaaaggcaaatagctattagggaagcagtttgccattgttgcagagttatctgtactttgtttaactgaaaaaaatgtagaaatatatgtaaagaatttaagacaagagtactgaatggatgatttgtcataggctttcccctttctttctgttctagcagcaggaaaagtttctctatatcctctccctctacctgtaacaattttgttttctactgttaattacattgtgtatttatagttctatgcttactgttgtgcatatactggcaataaaactgtacataacattacttgaaaaagttaataatgtatatcagtttttctgtctcactgtgtaacaagtcactcagttttattttaactttagacggtcttgtatcagtggtggtctcttgaattttgtaagttcatctgaggagaaaagatttttcaggtgtagctaccacaatcaaaggtatatagctacatacgcatgtatatattacagcttatctgtaagaagaaaatgcattttaaacacaactcttctcagtagcattttatgacctttggatatgtttgtaatcatttcgaatcaaaatattgatttaattttgacctctggtttaagatactgctttaactactgttgacaaccaagtagagtgacttaagctgaacagtaactaactggaaaattagataagcacctggcatctaatggcaggcaggcactcaagaaatgaattaactacataatggaaaagtatggtttaatgtgtccaaatgaaagctagtagatgtaaacatggaaaaattgtgtttacaattttataatctcagttgataagactataagaaagctgattatttaaatcactatatacaatacacccttaatttgttcattccagaaacatactgagatgtcagctacttaaaaatggtcacaaaaagctactgtttatatttttcctcctgctattctctcccaaattaattattaataagtgttgttcatttactgcactgctgagaactaattaaaattatatattccagattgtaaaa

SEQ ID NO: 124690 - DNA, 614 bp, Homo sapiens
  Payload ID: 4489
  Gene Symbol: CLASP2
  Gene Name: cytoplasmic linker associated protein 2
  ENST ID: ENST00000480385
  CDS Start-End: 1-614
aaaaaaaatgggtgctgatttgcttggatctgttcaggcaaaagttcagaaagcccttgatgttacaagagagtcttttccaaatgatcttcagttcaatattctaatgagatttacagttgatcagacccagacaccaagcttaaagacagtcaagccagcacttcgggaccagcttcactctttttggagctccaaggtgaaggttgctatccttaaatacatagaaactctggccaaacagatggatccaggagattttataaattccagtgaaactcgcctagcagtgtctcgggtcatcacttggacaacagaacccaaaagttctgatgttcggaaggcagcacagtcagtgctgatttcattatttgaactcaataccccagagtttacaatgttattaggagctttaccaaaaacttttcaggatggtgctaccaagcttcttcataatcaccttcgaaacactggcaatggaacccagagttccatggggagtcctttgacaagaccaacaccacgatcaccagctaactggtccagtcctcttacttctcctaccaatacatcacagaatactttatctccaagtgcatttgattatgacacag

SEQ ID NO: 124691 - DNA, 5972 bp, Homo sapiens
  Payload ID: 4489
  Gene Symbol: CLASP2
  Gene Name: cytoplasmic linker associated protein 2
  ENST ID: ENST00000480013
  CDS Start-End: 453-4334
attgctactgattacatggatatctttagggaagcagaaaatgattgctgaacacatgccttgtgttttgatgattgcattaaaagtcccccagcgggatggcatttattggctctcagagcttttcttagattaaatttcaggcagccagtacaaggagaaacatcataacctgtatccaacagcatatgtgcagctaaagagtaatcttaatcaagtccttctaggctgtgctaaataaacgagggttttcagcaagaccccagacttttattttgaagtggagtagcagctgttggctattgcggtgcagagctgcagcgaggcctgggtcacacagtgctccgggtgtctgcaggctgcaggccgagcccagtggcgcaggcactgagctgtacttatttgctgtgctatttgacctcttggtttcagagagctccctggaccatctaatggctatgggagatgataaaagcttcgatgatgaagaatcagtggatggaaataggccatcatcagctgcatcagccttcaaggttcctgcacctaaaacatccggaaatcctgccaacagtgcaaggaagcctggttcagcaggtggccctaaggttggaggtgcttctaaggaaggaggtgctggagcagttgatgaagatgattttataaaagcttttacagatgtcccttctattcagatttattctagtcgagaactcgaagaaacattaaataaaatcagggaaattttgtcagatgataaacatgactgggatcagcgtgccaatgcactgaagaaaattcgatcactgcttgttgctggagctgcacagtatgattgcttttttcaacatttacgattgttggatggagcacttaaactttcagctaaggatcttagatcccaggtggttagagaagcttgtattactgtagcccacctttcaacagttttgggaaacaagtttgatcatggcgctgaagccattgtacctacactttttaatctcgtccccaatagtgcaaaagtcatggcaacttctggatgtgcagcaatcagatttatcattcggcatactcatgtacccagacttatacctttaataacaagcaattgcacatcaaaatcagttcccgtgaggagacgttcatttgaatttttagatttattgttgcaagagtggcagactcattcattggaaagacatgcagccgtcttggttgaaactattaaaaagggaattcatgatgctgacgctgaggccagagtggaggcaagaaagacatacatgggtcttagaaaccactttcctggtgaagctgaaacattatataattcccttgagccatcttatcagaagagtcttcaaacttacttaaagagttctggcagtgtagcatctcttccacaatcagacaggtcctcatccagctcacaggaaagtctcaatcgccctttttcttccaaatggtctacagcaaatccatcaactgtggctggaagagtatcagcaggcagcagcaaagccagttcccttccaggaagcctgcagcgttcacgaagtgacattgatgtgaatgctgctgcaggtgccaaggcacatcatgctgctggacagtctgtgcgaagcgggcgcttaggtgcaggtgccctgaatgcaggttcctatgcgtcactagaggatacttctgacaagctggatggaacagcatctgaagatggccgggtgagagcaaaactttcagcaccacttgctggcatgggaaatgccaaggcagattctagaggaagaagtcgaacaaaaatggtgtctcaatcacagcctggtagccggtctgggtctccaggaagagttctgaccacaacagccctgtccactgtgagctctggtgttcaaagagtcctggtcaattcagcctcagcacaaaaaagaagcaagataccacggagccagggctgtagcagagaggctagtccatctaggctttcagtggcccgaagcagtcgtattcctcgaccaagtgtgagtcaaggatgcagccgggaagctagtcgggagagcagcagagacacaagtcctgttcgctcttttcagcccctcgcctccagacaccattccagatcaactggtgccctctacgcccccgaagtgtatggggcctcaggtccaggttatgggatcagccaatcaagtcgactgtcgtcttctgttagtgccatgcgagtcctgaacacaggttctgatgtggaggaggcggtggcagatgccttgaaaaaaccagctcgaagaagatatgaatcatatggaatgcattcagatgatgacgccaacagcgatgcatctagtgcttgttcagaacgctcctatagttctcgaaatggtagtattcctacatatatgaggcagacggaagatgtggcagaagtcctcaatagatgtgctagttccaattggtcagaaaggaaagaaggcctcctaggtctgcagaacttattaaaaaatcagagaacactaagtcgagttgaactgaaaagattatgtgaaattttcacaagaatgtttgctgaccctcatggcaaggtattcagcatgtttttggagactctagtggatttcatacaagtccacaaagatgatcttcaagattggttgtttgtactgctgacacaactactaaaaaaaatgggtgctgatttgcttggatctgttcaggcaaaagttcagaaagcccttgatgttacaagagagtcttttccaaatgatcttcagttcaatattctaatgagatttacagttgatcagacccagacaccaagcttaaaggtgaaggttgctatccttaaatacatagaaactctggccaaacagatggatccaggagattttataaattccagtgaaactcgcctagcagtgtctcgggtcatcacttggacaacagaacccaaaagttctgatgttcggaaggcagcacagtcagtgctgatttcattatttgaactcaataccccagagtttacaatgttattaggagctttaccaaaaacttttcaggatggtgctaccaagcttcttcataatcaccttcgaaacactggcaatggaacccagagttccatggggagtcctttgacaagaccaacaccacgatcaccagctaactggtccagtcctcttacttctcctaccaatacatcacagaatactttatctccaagtgcatttgattatgacacagaaaatatgaactctgaagatatttatagctctcttagaggtgtcactgaagcaatccagaatttcagcttccgtagccaagaagatatgaatgagccattgaaaagggattctaaaaaagatgatggcgattcaatgtgtggtggtcctgggatgtctgacccaagagcaggaggtgatgctactgactcaagtcaaacagctcttgataataaagcttcattgctccattcaatgcctactcactcctctccacgctctcgagactataatccatataactattcagatagcatcagtcccttcaacaagtctgccctcaaggaagccatgtttgatgatgatgctgaccagtttcctgacgatctttccctagatcattctgacctagttgcagagttgttgaaggagctgtctaaccataatgagcgtgtagaagaaagaaaaattgccctctatgaacttatgaaactgacacaggaagaatcttttagtgtttgggatgaacacttcaaaacaatattgcttttattgcttgaaacgcttggagataaagagcctacaatcagggctttggcattaaaggttttaagagaaatcctaaggcatcaaccagcaagatttaaaaactatgcagaattgactgtcatgaaaacattggaagcacataaagatcctcataaggaggtggtgagatctgctgaggaagcggcatcagtgttggccacttcaattagtccagagcagtgcatcaaagtgctttgtcctatcattcaaactgcagactacccaattaatctggctgcaatcaaaatgcaaacaaaagtgatagagagagtgtccaaggaaaccctaaacctgcttttgccagagattatgccaggtctaatacagggttatgataattcagagagcagtgttcggaaagcttgtgtcttctgcctggtggctgttcatgcggtaattggtgatgaactaaaaccacatctcagtcaacttactggcagtaaaatgaagctactgaatctttacatcaaacgtgcacaaacaggttctggaggagctgatcccactactgatgtttctggacaaagttagtgaagctcatcacagcgaaccaggtctctcaaaagaaaggacagatagaccaccctcatcaatgaaaggaagttctcaaacacatcctttggaacttactattgtttcccagttttagttttttgtttcgtttcgttttgtattttctgtaacagaggactatcctcagtctgcatgtaacttttatgatagttattccaaattcaagaagaagcagtattaacatcaattgatcgacacaaagtaatttttaatttaattcatcatttcacatgtttgtactttgtcttcccattaacctttgccagtgttatgattgtataaatttttttaaatgctggttaaacaggaatgcttaaagctttaaaagtttaacagtctaaaacatttttgcttttattcaactgcagaataatatttttattgctactttgagttttgtttcgtatcatgtcctatgctagaaatatttaaatgatgtgaaacaaagcaggactaatttgaactacagctggactccgtttgtgtgatggtgatacatgtcattagttgcaacttctttggggtgatctatagtttgaaaactaaaacctcaaagacagatgttacagaatcagccagttctgtaaaactgatattgtctattggttattgatcttgccatctttatttaaaaccatgtcccttctatgatcccttaagaaagctgcaccaaatcatctgcctgttttttcttgatacttactgaaatagaaggttttattgcagggtttattttggtttgtttatatctttgttgtgaatgatgcttttttgtatttattaatatcaaattcacttatgaataaacttgataatggaaacggacaaaaaaaatcaagtgcgtgtgtgtccttgaccgtcttctgtttctcacgtaataaacaaattatcgagacatgggagtgaccagcaccttttctttaaatggtggaacctggtttccttttaccatgaaattgtcttacttgaaaatattgatcctgatgagagagaagatggtgccaaggctgtctttgtataatgggctcaaattctctacctcttcagggctaatacttttaactgagctgctgcctatagtgtcttttggaaaactacttaaagggtgattttctgttactttttagcaaatttttttaatcacctcttgctacacccattcttttcatgtgcagccgactcaaaaattaccagttttggtgaaaggctaaattagataatttggaaccaggatactaatgatttctcatctttacttttttttaatcctaatataaagtgaatttgattgaaaaggcaaatagctattagggaagcagtttgccattgttgcagagttatctgtactttgtttaactgaaaaaaatgtagaaatatatgtaaagaatttaagacaagagtactgaatggatgatttgtcataggctttcccctttctttctgttctagcagcaggaaaagtttctctatatcctctccctctacctgtaacaattttgttttctactgttaattacattgtgtatttatagttctatgcttactgttgtgcatatactggcaataaaactgtacataacattacttgaaaaagtt

SEQ ID NO: 124692 - DNA, 536 bp, Homo sapiens
  Payload ID: 4489
  Gene Symbol: CLASP2
  Gene Name: cytoplasmic linker associated protein 2
  ENST ID: ENST00000475576
  CDS Start-End: 1-536
cggagccagggctgtagcagagaggctagtccatctaggctttcagtggcccgaagcagtcgtattcctcgaccaagtgtgagtcaaggatgcagccgggaagctagtcgggagagcagcagagacacaagtcctgttcgctcttttcagcccctcgcctccagacaccattccagatcaactggtgccctctacgcccccgaagtgtatggggcctcaggtccaggttatgggatcagccaatcaagtcgactgtcgtcttctgttagtgccatgcgagtcctgaacacaggttctgatgtggaggaggcggtggcagatgccttgctcttaggagacatacggactaagaaaaaaccagctcgaagaagatatgaatcatatggaatgcattcagatgatgacgccaacagcgatgcatctagtgcttgttcagaacgctcctatagttctcgaaatggtagtattcctacatatatgaggcagacggaagatgtggcagaagtcctcaatagatgtgctagttccaattggtc

SEQ ID NO: 124693 - DNA, 685 bp, Homo sapiens
  Payload ID: 4489
  Gene Symbol: CLASP2
  Gene Name: cytoplasmic linker associated protein 2
  ENST ID: ENST00000496954
  CDS Start-End: 152-685
attgcggtgcagagctgcagcgaggcctgggtcacacagtgctccgggtgtctgcaggctgcaggccgagcccagtggcgcaggcactgagctgtacttatttgctgtgctatttgacctcttggtttcagagagctccctggaccatctaatggctatgggagatgataaaagcttcgatgatgaagaatcagtggatggaaataggccatcatcagctgcatcagccttcaaggttcctgcacctaaaacatccggaaatcctgccaacagtgcaaggaagcctggttcagcaggtggccctaaggttggagcaggtgcttctaaggaaggaggtgctggagcagttgatgaagatgattttataaaagcttttacagatgtcccttctattcagatttattctagtcgagaactcgaagaaacattaaataaaatcagggaaattttgtcagatgataaacatgactgggatcagcgtgccaatgcactgaagaaaattcgatcactgcttgttgctggagctgcacagtatgattgcttttttcaacatttacgattgttggatggagcacttaaactttcagctaaggatcttagatcccaggtggttagagaagcttgtattactgtagcccacctttcaacagttttgggaaacaagtttgatcatggcgctgaagcc

SEQ ID NO: 124694 - DNA, 1097 bp, Homo sapiens
  Payload ID: 4489
  Gene Symbol: CLASP2
  Gene Name: cytoplasmic linker associated protein 2
  ENST ID: ENST00000476251
  CDS Start-End: 1-554
ctgggatgtctgacccaagagcaggaggtgatgctactgactcaagtcaaacagctcttgataataaagcttcattgctccattcaatgcctactcactcctctccacgctctcgagactataatccatataactattcagatagcatcagtcccttcaacaagtctgccctcaaggaagccatgtttgatgatgatgctgaccagtttcctgacgatctttccctagatcattctgacctagttgcagagttgttgaaggagctgtctaaccataatgagcgtgtagaagaaagaaaaattgccctctatgaacttatgaaactgacacaggaagaatcttttagtgtttgggatgaacacttcaaaacaatattgcttttattgcttgaaacgcttggagataaagagcctacaatcagggctttggcattaaaggttttaagagaaatcctaaggcatcaaccagcaagatttaaaaactatgcagaattgactgtcatgaaaacattggaagcacataaagatcctcataaggaggtagatacccaatagtgggattgctggatcaaatggagttctacttttagttctgtaaggactgtatttctaagagaaagcaactgagcaatagcattaggtggtgagatctgctgaggaagcggcatcagtgttggccacttcaattagtccagagcagtgcatcaaagtgctttgtcctatcattcaaactgcagactacccaattaatctggctgcaatcaaaatgcaaacaaaagtgatagagagagtgtccaaggaaaccctaaacctgcttttgccagagattatgccaggtctaatacagggttatgataattcagagagcagtgttcggaaagcttgtgtcttctgcctggtggctgttcatgcggtaattggtgatgaactaaaaccacatctcagtcaacttactggcagtaaaatgaagctactgaatctttacatcaaacgtgcacaaacaggttctggaggagctgatcccactactgatgtttctggacaaagttagtgaagctcatcacagcgaaccaggtctctcaaaagaaaggacagata

SEQ ID NO: 124695 - DNA, 1940 bp, Homo sapiens
  Payload ID: 4489
  Gene Symbol: CLASP2
  Gene Name: cytoplasmic linker associated protein 2
  ENST ID: ENST00000487200
  CDS Start-End: 189-1553
gattggctgttacagcacctagggcagggaagagaaagaaaaatgccggcacaaacctcagtggtggttctgtggttgtttctgtctttttttgatagaatctttgattagtatcgaatttactgtatttggccatgtgaactattgggagcctcctagggtgagggaaattaagagctttcagaggaatgaggcgactgatttgcaaacggatctgtgattataaaagcttcgatgatgaagaatcagtggatggaaataggccatcatcagctgcatcagccttcaaggttcctgcacctaaaacatccggaaatcctgccaacagtgcaaggaagcctggttcagcaggtggccctaaggttggaggtgcttctaaggaaggaggtgctggagcagttgatgaagatgattttataaaagcttttacagatgtcccttctattcagatttattctagtcgagaactcgaagaaacattaaataaaatcagggaaattttgtcagatgataaacatgactgggatcagcgtgccaatgcactgaagaaaattcgatcactgcttgttgctggagctgcacagtatgattgcttttttcaacatttacgattgttggatggagcacttaaactttcagctaaggatcttagatcccaggtggttagagaagcttgtattactgtagcccacctttcaacagttttgggaaacaagtttgatcatggcgctgaagccattgtacctacactttttaatctcgtccccaatagtgcaaaagtcatggcaacttctggatgtgcagcaatcagatttatcattcggcatactcatgtacccagacttatacctttaataacaagcaattgcacatcaaaatcagttcccgtgaggagacgttcatttgaatttttagatttattgttgcaagagtggcagactcattcattggaaagacatgcagccgtcttggttgaaactattaaaaagggaattcatgatgctgacgctgaggccagagtggaggcaagaaagacatacatgggtcttagaaaccactttcctggtgaagctgaaacattatataattcccttgagccatcttatcagaagagtcttcaaacttacttaaagagttctggcagtgtagcatctcttccacaatcagacaggtcctcatccagctcacaggaaagtctcaatcgccctttttcttccaaatggtctacagcaaatccatcaactgtggctggaagagtatcagcaggcagcagcaaagccagttcccttccaggaagcctgcagcgttcacgaagtgacattgatgtgaatgctgctgcaggtgccaaggcacatcatgctgctggacagtctgtgcgaagcgggcgcttaggtgcaggtgccctgaatgcaggttcctatgcgtcactaggtaagagaactgattatggaaaattgtaccatgttctctccctgatctctgtgaagacaagttcatataccttaatcatttctattcattcttgttatttaaggatagtccatatgttttaatataattctatattgcggacacacttctgaggaatctgagctgccttgtttctccttttcccttgttctcatcatcgtcttgatcaaagaaacaattcttgaatccatgattgcctgtagaattttcataactgcacttctaccacatctagccactggtttctaagggggtttgggaagggaattggcttgtatctaactttcctgttttctttctcctacttctcttctcttaccaagaatgtgaagccttttggagatctgggagaactgcaaagctctactctgtctaaccaaaccctaaacatatattccaaaactctattcagtttgatttcttcatgtttttatgtctatcaaattaaaaagttgacgttggtttgcgta

SEQ ID NO: 124696 - DNA, 874 bp, Homo sapiens
  Payload ID: 4489
  Gene Symbol: CLASP2
  Gene Name: cytoplasmic linker associated protein 2
  ENST ID: ENST00000485378
  CDS Start-End: 176-874
agcacctagggcagggaagagaaagaaaaatgccggcacaaacctcagtggtggttctgtggttgtttctgtctttttttgatagaatctttgattagtatcgaatttactgtatttggccatgtgaactattgggagcctcctagggtgagggaaattaagagctttcagaggaatgaggcgactgatttgcaaacggatctgtgattataaaagcttcgatgatgaagaatcagtggatggaaataggccatcatcagctgcatcagccttcaaggttcctgcacctaaaacatccggaaatcctgccaacagtgcaaggaagcctggttcagcaggtggccctaaggttggaggtgcttctaaggaaggaggtgctggagcagttgatgaagatgattttataaaagcttttacagatgtcccttctattcagatttattctagtcgagaactcgaagaaacattaaataaaatcagggaaattttgtcagatgataaacatgactgggatcagcgtgccaatgcactgaagaaaattcgatcactgcttgttgctggagctgcacagtatgattgcttttttcaacatttacgattgttggatggagcacttaaactttcagctaaggatcttagatcccaggtggttagagaagcttgtattactgtagcccacctttcaacagttttgggaaacaagtttgatcatggcgctgaagccattgtacctacactttttaatctcgtccccaatagtgcaaaagtcatggcaacttctggatgtgcagcaatcagatttatcattcggcatactcatgtacccagacttatacctttaataacaagcaattgcacatcaaaatcagttccc

SEQ ID NO: 124697 - DNA, 4814 bp, Homo sapiens
  Payload ID: 4489
  Gene Symbol: CLASP2
  Gene Name: cytoplasmic linker associated protein 2
  ENST ID: ENST00000461133
  CDS Start-End: 117-3938
acagtgctccgggtgtctgcaggctgcaggccgagcccagtggcgcaggcactgagctgtacttatttgctgtgctatttgacctcttggtttcagagagctccctggaccatctaatggctatgggagatgataaaagcttcgatgatgaagaatcagtggatggaaataggccatcatcagctgcatcagccttcaaggttcctgcacctaaaacatccggaaatcctgccaacagtgcaaggaagcctggttcagcaggtggccctaaggttggaggtgcttctaaggaaggaggtgctggagcagttgatgaagatgattttataaaagcttttacagatgtcccttctattcagatttattctagtcgagaactcgaagaaacattaaataaaatcagggaaattttgtcagatgataaacatgactgggatcagcgtgccaatgcactgaagaaaattcgatcactgcttgttgctggagctgcacagtatgattgcttttttcaacatttacgattgttggatggagcacttaaactttcagctaaggatcttagatcccaggtggttagagaagcttgtattactgtagcccacctttcaacagttttgggaaacaagtttgatcatggcgctgaagccattgtacctacactttttaatctcgtccccaatagtgcaaaagtcatggcaacttctggatgtgcagcaatcagatttatcattcggcatactcatgtacccagacttatacctttaataacaagcaattgcacatcaaaatcagttcccgtgaggagacgttcatttgaatttttagatttattgttgcaagagtggcagactcattcattggaaagacatgcagccgtcttggttgaaactattaaaaagggaattcatgatgctgacgctgaggccagagtggaggcaagaaagacatacatgggtcttagaaaccactttcctggtgaagctgaaacattatataattcccttgagccatcttatcagaagagtcttcaaacttacttaaagagttctggcagtgtagcatctcttccacaatcagacaggtcctcatccagctcacaggaaagtctcaatcgccctttttcttccaaatggtctacagcaaatccatcaactgtggctggaagagtatcagcaggcagcagcaaagccagttcccttccaggaagcctgcagcgttcacgaagtgacattgatgtgaatgctgctgcaggtgccaaggcacatcatgctgctggacagtctgtgcgaagcgggcgcttaggtgcaggtgccctgaatgcaggttcctatgcgtcactagaggatacttctgacaagctggatggaacagcatctgaagatggccgggtgagagcaaaactttcagcaccacttgctggcatgggaaatgccaaggcagattctagaggaagaagtcgaacaaaaatggtgtctcaatcacagcctggtagccggtctgggtctccaggaagagttctgaccacaacagccctgtccactgtgagctctggtgttcaaagagtcctggtcaattcagcctcagcacaaaaaagaagcaagataccacggagccagggctgtagcagagaggctagtccatctaggctttcagtggcccgaagcagtcgtattcctcgaccaagtgtgagtcaaggatgcagccgggaagctagtcgggagagcagcagagacacaagtcctgttcgctcttttcagcccctcggtccaggttatgggatcagccaatcaagtcgactgtcgtcttctgttagtgccatgcgagtcctgaacacaggttctgatgtggaggaggcggtggcagatgccttgaaaaaaccagctcgaagaagatatgaatcatatggaatgcattcagatgatgacgccaacagcgatgcatctagtgcttgttcagaacgctcctatagttctcgaaatggtagtattcctacatatatgaggcagacggaagatgtggcagaagtcctcaatagatgtgctagttccaattggtcagaaaggaaagaaggcctcctaggtctgcagaacttattaaaaaatcagagaacactaagtcgagttgaactgaaaagattatgtgaaattttcacaagaatgtttgctgaccctcatggcaagagagtattcagcatgtttttggagactctagtggatttcatacaagtccacaaagatgatcttcaagattggttgtttgtactgctgacacaactactaaaaaaaatgggtgctgatttgcttggatctgttcaggcaaaagttcagaaagcccttgatgttacaagagagtcttttccaaatgatcttcagttcaatattctaatgagatttacagttgatcagacccagacaccaagcttaaaggtgaaggttgctatccttaaatacatagaaactctggccaaacagatggatccaggagattttataaattccagtgaaactcgcctagcagtgtctcgggtcatcacttggacaacagaacccaaaagttctgatgttcggaaggcagcacagtcagtgctgatttcattatttgaactcaataccccagagtttacaatgttattaggagctttaccaaaaacttttcaggatggtgctaccaagcttcttcataatcaccttcgaaacactggcaatggaacccagagttccatggggagtcctttgacaagaccaacaccacgatcaccagctaactggtccagtcctcttacttctcctaccaatacatcacagaatactttatctccaagtgcatttgattatgacacagaaaatatgaactctgaagatatttatagctctcttagaggtgtcactgaagcaatccagaatttcagcttccgtagccaagaagatatgaatgagccattgaaaagggattctaaaaaagatgatggcgattcaatgtgtggtggtcctgggatgtctgacccaagagcaggaggtgatgctactgactcaagtcaaacagctcttgataataaagcttcattgctccattcaatgcctactcactcctctccacgctctcgagactataatccatataactattcagatagcatcagtcccttcaacaagtctgccctcaaggaagccatgtttgatgatgatgctgaccagtttcctgacgatctttccctagatcattctgacctagttgcagagttgttgaaggagctgtctaaccataatgagcgtgtagaagaaagaaaaattgccctctatgaacttatgaaactgacacaggaagaatcttttagtgtttgggatgaacacttcaaaacaatattgcttttattgcttgaaacgcttggagataaagagcctacaatcagggctttggcattaaaggttttaagagaaatcctaaggcatcaaccagcaagatttaaaaactatgcagaattgactgtcatgaaaacattggaagcacataaagatcctcataaggaggtggtgagatctgctgaggaagcggcatcagtgttggccacttcaattagtccagagcagtgcatcaaagtgctttgtcctatcattcaaactgcagactacccaattaatctggctgcaatcaaaatgcaaacaaaagtgatagagagagtgtccaaggaaaccctaaacctgcttttgccagagattatgccaggtctaatacagggttatgataattcagagagcagtgttcggaaagcttgtgtcttctgcctggtggctgttcatgcggtaattggtgatgaactaaaaccacatctcagtcaacttactggcagtaaaatgaagctactgaatctttacatcaaacgtgcacaaacaggttctggaggagctgatcccactactgatgtttctggacaaagttagtgaagctcatcacagcgaaccaggtctctcaaaagaaaggacagatagaccaccctcatcaatgaaaggaagttctcaaacacatcctttggaacttactattgtttcccagttttagttttttgtttcgtttcgttttgtattttctgtaacagaggactatcctcagtctgcatgtaacttttatgatagttattccaaattcaagaagaagcagtattaacatcaattgatcgacacaaagtaatttttaatttaattcatcatttcacatgtttgtactttgtcttcccattaacctttgccagtgttatgattgtataaatttttttaaatgctggttaaacaggaatgcttaaagctttaaaagtttaacagtctaaaacatttttgcttttattcaactgcagaataatatttttattgctactttgagttttgtttcgtatcatgtcctatgctagaaatatttaaatgatgtgaaacaaagcaggactaatttgaactacagctggactccgtttgtgtgatggtgatacatgtcattagttgcaacttctttggggtgatctatagtttgaaaactaaaacctcaaagacagatgttacagaatcagccagttctgtaaaactgatattgtctattggttattgatcttgccatctttatttaaaaccatgtcccttctatgatcccttaagaaagctgcaccaaatcatctgcctgttttttcttgatacttactgaaatagaaggttttattgcagggtttattttggtttgtttatatctttgttgtgaatgatgcttttttgtatttattaatatcaaattcacttatgaataaacttgataatggaaacggacaaaaaaaa

SEQ ID NO: 124698 - DNA, 6978 bp, Homo sapiens
  Payload ID: 4489
  Gene Symbol: CLASP2
  Gene Name: cytoplasmic linker associated protein 2
  ENST ID: ENST00000468888
  CDS Start-End: 48-4592
gaaagttggccgctcacagactggcaggcgggcgggcggccgcagccatggagccccgcagcatggagtacttctgcgcccaggtgcagcagaaggacgtcggcggccggctgcaggtcggccaggagctcctgctctaccttggcgcccccggcgccatctcggacctggaggaggacctgggccgcctaggcaagacagtcgacgcgctcaccggctgggtgggttcgagcaactaccgggtatcattaatgggattggaaattttaagtgcctttgtggacagattatcaacacgctttaaatcctatgtagcaatggttattgtagctttaatagacagaatgggagatgccaaagacaaggttcgagatgaagctcagactctgatattgaagttaatggatcaagtagcaccacctatgtacatttgggagcagttggcttctggttttaaacacaagaattttcgatctcgagaaggcgtgtgtctgtgtcttattgaaaccttaaacatttttggggctcagccactagtcatcagcaaattgataccacatttgtgtatcctgtttggagactccaacagtcaggtgagagatgctgcaatattggctatagtggagatttatagacatgtgggagaaaaagtgaggatggatctttataagagaggaattccccctgctagattagaaatgatatttgccaaatttgatgaagtgcaaagttcaggcggtatgattttgagtgtctgcaaagataaaagcttcgatgatgaagaatcagtggatggaaataggccatcatcagctgcatcagccttcaaggttcctgcacctaaaacatccggaaatcctgccaacagtgcaaggaagcctggttcagcaggtggccctaaggttggagcaggtgcttctaaggaaggaggtgctggagcagttgatgaagatgattttataaaagcttttacagatgtcccttctattcagatttattctagtcgagaactcgaagaaacattaaataaaatcagggaaattttgtcagatgataaacatgactgggatcagcgtgccaatgcactgaagaaaattcgatcactgcttgttgctggagctgcacagtatgattgcttttttcaacatttacgattgttggatggagcacttaaactttcagctaaggatcttagatcccaggtggttagagaagcttgtattactgtagcccacctttcaacagttttgggaaacaagtttgatcatggcgctgaagccattgtacctacactttttaatctcgtccccaatagtgcaaaagtcatggcaacttctggatgtgcagcaatcagatttatcattcggcatactcatgtacccagacttatacctttaataacaagcaattgcacatcaaaatcagttcccgtgaggagacgttcatttgaatttttagatttattgttgcaagagtggcagactcattcattggaaagacatgcagccgtcttggttgaaactattaaaaagggaattcatgatgctgacgctgaggccagagtggaggcaagaaagacatacatgggtcttagaaaccactttcctggtgaagctgaaacattatataattcccttgagccatcttatcagaagagtcttcaaacttacttaaagagttctggcagtgtagcatctcttccacaatcagacaggtcctcatccagctcacaggaaagtctcaatcgccctttttcttccaaatggtctacagcaaatccatcaactgtggctggaagagtatcagcaggcagcagcaaagccagttcccttccaggaagcctgcagcgttcacgaagtgacattgatgtgaatgctgctgcaggtgccaaggcacatcatgctgctggacagtctgtgcgaagcgggcgcttaggtgcaggtgccctgaatgcaggttcctatgcgtcactagaggatacttctgacaagctggatggaacagcatctgaagatggccgggtgagagcaaaactttcagcaccacttgctggcatgggaaatgccaaggcagattctagaggaagaagtcgaacaaaaatggtgtctcaatcacagcctggtagccggtctgggtctccaggaagagttctgaccacaacagccctgtccactgtgagctctggtgttcaaagagtcctggtcaattcagcctcagcacaaaaaagaagcaagataccacggagccagggctgtagcagagaggctagtccatctaggctttcagtggcccgaagcagtcgtattcctcgaccaagtgtgagtcaaggatgcagccgggaagctagtcgggagagcagcagagacacaagtcctgttcgctcttttcagcccctcggtccaggttatgggatcagccaatcaagtcgactgtcgtcttctgttagtgccatgcgagtcctgaacacaggttctgatgtggaggaggcggtggcagatgccttgctcttaggagacatacggactaagaaaaaaccagctcgaagaagatatgaatcatatggaatgcattcagatgatgacgccaacagcgatgcatctagtgcttgttcagaacgctcctatagttctcgaaatggtagtattcctacatatatgaggcagacggaagatgtggcagaagtcctcaatagatgtgctagttccaattggtcagaaaggaaagaaggcctcctaggtctgcagaacttattaaaaaatcagagaacactaagtcgagttgaactgaaaagattatgtgaaattttcacaagaatgtttgctgaccctcatggcaaggtattcagcatgtttttggagactctagtggatttcatacaagtccacaaagatgatcttcaagattggttgtttgtactgctgacacaactactaaaaaaaatgggtgctgatttgcttggatctgttcaggcaaaagttcagaaagcccttgatgttacaagagagtcttttccaaatgatcttcagttcaatattctaatgagatttacagttgatcagacccagacaccaagcttaaaggtgaaggttgctatccttaaatacatagaaactctggccaaacagatggatccaggagattttataaattccagtgaaactcgcctagcagtgtctcgggtcatcacttggacaacagaacccaaaagttctgatgttcggaaggcagcacagtcagtgctgatttcattatttgaactcaataccccagagtttacaatgttattaggagctttaccaaaaacttttcaggatggtgctaccaagcttcttcataatcaccttcgaaacactggcaatggaacccagagttccatggggagtcctttgacaagaccaacaccacgatcaccagctaactggtccagtcctcttacttctcctaccaatacatcacagaatactttatctccaagtgcatttgattatgacacagaaaatatgaactctgaagatatttatagctctcttagaggtgtcactgaagcaatccagaatttcagcttccgtagccaagaagatatgaatgagccattgaaaagggattctaaaaaagatgatggcgattcaatgtgtggtggtcctgggatgtctgacccaagagcaggaggtgatgctactgactcaagtcaaacagctcttgataataaagcttcattgctccattcaatgcctactcactcctctccacgctctcgagactataatccatataactattcagatagcatcagtcccttcaacaagtctgccctcaaggaagccatgtttgatgatgatgctgaccagtttcctgacgatctttccctagatcattctgacctagttgcagagttgttgaaggagctgtctaaccataatgagcgtgtagaagaaagaaaaattgccctctatgaacttatgaaactgacacaggaagaatcttttagtgtttgggatgaacacttcaaaacaatattgcttttattgcttgaaacgcttggagataaagagcctacaatcagggctttggcattaaaggttttaagagaaatcctaaggcatcaaccagcaagatttaaaaactatgcagaattgactgtcatgaaaacattggaagcacataaagatcctcataaggaggtggtgagatctgctgaggaagcggcatcagtgttggccacttcaattagtccagagcagtgcatcaaagtgctttgtcctatcattcaaactgcagactacccaattaatctggctgcaatcaaaatgcaaacaaaagtgatagagagagtgtccaaggaaaccctaaacctgcttttgccagagattatgccaggtctaatacagggttatgataattcagagagcagtgttcggaaagcttgtgtcttctgcctggtggctgttcatgcggtaattggtgatgaactaaaaccacatctcagtcaacttactggcagtaaaatgaagctactgaatctttacatcaaacgtgcacaaacaggttctggaggagctgatcccactactgatgtttctggacaaagttagtgaagctcatcacagcgaaccaggtctctcaaaagaaaggacagatagaccaccctcatcaatgaaaggaagttctcaaacacatcctttggaacttactattgtttcccagttttagttttttgtttcgtttcgttttgtattttctgtaacagaggactatcctcagtctgcatgtaacttttatgatagttattccaaattcaagaagaagcagtattaacatcaattgatcgacacaaagtaatttttaatttaattcatcatttcacatgtttgtactttgtcttcccattaacctttgccagtgttatgattgtataaatttttttaaatgctggttaaacaggaatgcttaaagctttaaaagtttaacagtctaaaacatttttgcttttattcaactgcagaataatatttttattgctactttgagttttgtttcgtatcatgtcctatgctagaaatatttaaatgatgtgaaacaaagcaggactaatttgaactacagctggactccgtttgtgtgatggtgatacatgtcattagttgcaacttctttggggtgatctatagtttgaaaactaaaacctcaaagacagatgttacagaatcagccagttctgtaaaactgatattgtctattggttattgatcttgccatctttatttaaaaccatgtcccttctatgatcccttaagaaagctgcaccaaatcatctgcctgttttttcttgatacttactgaaatagaaggttttattgcagggtttattttggtttgtttatatctttgttgtgaatgatgcttttttgtatttattaatatcaaattcacttatgaataaacttgataatggaaacggacaaaaaaaatcaagtgcgtgtgtgtccttgaccgtcttctgtttctcacgtaataaacaaattatcgagacatgggagtgaccagcaccttttctttaaatggtggaacctggtttccttttaccatgaaattgtcttacttgaaaatattgatcctgatgagagagaagatggtgccaaggctgtctttgtataatgggctcaaattctctacctcttcagggctaatacttttaactgagctgctgcctatagtgtcttttggaaaactacttaaagggtgattttctgttactttttagcaaatttttttaatcacctcttgctacacccattcttttcatgtgcagccgactcaaaaattaccagttttggtgaaaggctaaattagataatttggaaccaggatactaatgatttctcatctttacttttttttaatcctaatataaagtgaatttgattgaaaaggcaaatagctattagggaagcagtttgccattgttgcagagttatctgtactttgtttaactgaaaaaaatgtagaaatatatgtaaagaatttaagacaagagtactgaatggatgatttgtcataggctttcccctttctttctgttctagcagcaggaaaagtttctctatatcctctccctctacctgtaacaattttgttttctactgttaattacattgtgtatttatagttctatgcttactgttgtgcatatactggcaataaaactgtacataacattacttgaaaaagttaataatgtatatcagtttttctgtctcactgtgtaacaagtcactcagttttattttaactttagacggtcttgtatcagtggtggtctcttgaattttgtaagttcatctgaggagaaaagatttttcaggtgtagctaccacaatcaaaggtatatagctacatacgcatgtatatattacagcttatctgtaagaagaaaatgcattttaaacacaactcttctcagtagcattttatgacctttggatatgtttgtaatcatttcgaatcaaaatattgatttaattttgacctctggtttaagatactgctttaactactgttgacaaccaagtagagtgacttaagctgaacagtaactaactggaaaattagataagcacctggcatctaatggcaggcaggcactcaagaaatgaattaactacataatggaaaagtatggtttaatgtgtccaaatgaaagctagtagatgtaaacatggaaaaattgtgtttacaattttataatctcagttgataagactataagaaagctgattatttaaatcactatatacaatacacccttaatttgttcattccagaaacatactgagatgtcagctacttaaaaatggtcacaaaaagctactgtttatatttttcctcctgctattctctcccaaattaattattaataagtgttgttcatttactgcactgctgagaactaattaaaattatatattccagattgtaaaa

SEQ ID NO: 124699 - DNA, 825 bp, Homo sapiens
  Payload ID: 4489
  Gene Symbol: CLASP2
  Gene Name: cytoplasmic linker associated protein 2
  ENST ID: ENST00000487553
  CDS Start-End: 1-661
ttcaatgcctactcactcctctccacgctctcgagactataatccatataactattcagatagcatcagtcccttcaacaagtctgccctcaaggaagccatgtttgatgatgatgctgaccagtttcctgacgatctttccctagatcattctgacctagttgcagagttgttgaaggagctgtctaaccataatgagcgtgtagaagaaagaaaaattgccctctatgaacttatgaaactgacacaggaagaatcttttagtgtttgggatgaacacttcaaaacaatattgcttttattgcttgaaacgcttggagataaagagcctacaatcagggctttggcattaaaggttttaagagaaatcctaaggcatcaaccagcaagatttaaaaactatgcagaattgactgtcatgaaaacattggaagcacataaagatcctcataaggagggttatgataattcagagagcagtgttcggaaagcttgtgtcttctgcctggtggctgttcatgcggtaattggtgatgaactaaaaccacatctcagtcaacttactggcagtaaaatgaagctactgaatctttacatcaaacgtgcacaaacaggttctggaggagctgatcccactactgatgtttctggacaaagttagtgaagctcatcacagcgaaccaggtctctcaaaagaaaggacagatagaccaccctcatcaatgaaaggaagttctcaaacacatcctttggaacttactattgtttcccagttttagttttttgtttcgtttcgttttgtattttctgtaacagaggactatc

SEQ ID NO: 124700 - DNA, 4176 bp, Homo sapiens
  Payload ID: 4489
  Gene Symbol: CLASP2
  Gene Name: cytoplasmic linker associated protein 2
  ENST ID: ENST00000635664
  CDS Start-End: 144-4058
ccggcacaaacctcagtggtggttctgtggttgtttctgtctttttttgatagaatctttgattagtatcgaatttactgtatttggccatgtgaactattgggagcctcctagggtgagggaaattaagagctttcagaggaatgaggcgactgatttgcaaacggatctgtgattataaaagcttcgatgatgaagaatcagtggatggaaataggccatcatcagctgcatcagccttcaaggttcctgcacctaaaacatccggaaatcctgccaacagtgcaaggaagcctggttcagcaggtggccctaaggttggaggtgcttctaaggaaggaggtgctggagcagttgatgaagatgattttataaaagcttttacagatgtcccttctattcagatttattctagtcgagaactcgaagaaacattaaataaaatcagggaaattttgtcagatgataaacatgactgggatcagcgtgccaatgcactgaagaaaattcgatcactgcttgttgctggagctgcacagtatgattgcttttttcaacatttacgattgttggatggagcacttaaactttcagctaaggatcttagatcccaggtggttagagaagcttgtattactgtagcccacctttcaacagttttgggaaacaagtttgatcatggcgctgaagccattgtacctacactttttaatctcgtccccaatagtgcaaaagtcatggcaacttctggatgtgcagcaatcagatttatcattcggcatactcatgtacccagacttatacctttaataacaagcaattgcacatcaaaatcagttcccgtgaggagacgttcatttgaatttttagatttattgttgcaagagtggcagactcattcattggaaagacatgcagccgtcttggttgaaactattaaaaagggaattcatgatgctgacgctgaggccagagtggaggcaagaaagacatacatgggtcttagaaaccactttcctggtgaagctgaaacattatataattcccttgagccatcttatcagaagagtcttcaaacttacttaaagagttctggcagtgtagcatctcttccacaatcagacaggtcctcatccagctcacaggaaagtctcaatcgccctttttcttccaaatggtctacagcaaatccatcaactgtggctggaagagtatcagcaggcagcagcaaagccagttcccttccaggaagcctgcagcgttcacgaagtgacattgatgtgaatgctgctgcaggtgccaaggcacatcatgctgctggacagtctgtgcgaagcgggcgcttaggtgcaggtgccctgaatgcaggttcctatgcgtcactagaggatacttctgacaagctggatggaacagcatctgaagatggccgggtgagagcaaaactttcagcaccacttgctggcatgggaaatgccaaggcagattctagaggaagaagtcgaacaaaaatggtgtctcaatcacagcgttcatcatcacctgacaaaaatgaaggatcacaatctgctaataccattggtgctggtagccggtctgggtctccaggaagagttctgaccacaacagccctgtccactgtgagctctggtgttcaaagagtcctggtcaattcagcctcagcacaaaaaagaagcaagataccacggagccagggctgtagcagagaggctagtccatctaggctttcagtggcccgaagcagtcgtattcctcgaccaagtgtgagtcaaggatgcagccgggaagctagtcgggagagcagcagagacacaagtcctgttcgctcttttcagcccctcggtccaggttatgggatcagccaatcaagtcgactgtcgtcttctgttagtgccatgcgagtcctgaacacaggttctgatgtggaggaggcggtggcagatgccttgctcttaggagacatacggactaagaaaaaaccagctcgaagaagatatgaatcatatggaatgcattcagatgatgacgccaacagcgatgcatctagtgcttgttcagaacgctcctatagttctcgaaatggtagtattcctacatatatgaggcagacggaagatgtggcagaagtcctcaatagatgtgctagttccaattggtcagaaaggaaagaaggcctcctaggtctgcagaacttattaaaaaatcagagaacactaagtcgagttgaactgaaaagattatgtgaaattttcacaagaatgtttgctgaccctcatggcaaggtattcagcatgtttttggagactctagtggatttcatacaagtccacaaagatgatcttcaagattggttgtttgtactgctgacacaactactaaaaaaaatgggtgctgatttgcttggatctgttcaggcaaaagttcagaaagcccttgatgttacaagagagtcttttccaaatgatcttcagttcaatattctaatgagatttacagttgatcagacccagacaccaagcttaaaggtgaaggttgctatccttaaatacatagaaactctggccaaacagatggatccaggagattttataaattccagtgaaactcgcctagcagtgtctcgggtcatcacttggacaacagaacccaaaagttctgatgttcggaaggcagcacagtcagtgctgatttcattatttgaactcaataccccagagtttacaatgttattaggagctttaccaaaaacttttcaggatggtgctaccaagcttcttcataatcaccttcgaaacactggcaatggaacccagagttccatggggagtcctttgacaagaccaacaccacgatcaccagctaactggtccagtcctcttacttctcctaccaatacatcacagaatactttatctccaagtgcatttgattatgacacagaaaatatgaactctgaagatatttatagctctcttagaggtgtcactgaagcaatccagaatttcagcttccgtagccaagaagatatgaatgagccattgaaaagggattctaaaaaagatgatggcgattcaatgtgtggtggtcctgggatgtctgacccaagagcaggaggtgatgctactgactcaagtcaaacagctcttgataataaagcttcattgctccattcaatgcctactcactcctctccacgctctcgagactataatccatataactattcagatagcatcagtcccttcaacaagtctgccctcaaggaagccatgtttgatgatgatgctgaccagtttcctgacgatctttccctagatcattctgacctagttgcagagttgttgaaggagctgtctaaccataatgagcgtgtagaagaaagaaaaattgccctctatgaacttatgaaactgacacaggaagaatcttttagtgtttgggatgaacacttcaaaacaatattgcttttattgcttgaaacgcttggagataaagagcctacaatcagggctttggcattaaaggttttaagagaaatcctaaggcatcaaccagcaagatttaaaaactatgcagaattgactgtcatgaaaacattggaagcacataaagatcctcataaggaggtggtgagatctgctgaggaagcggcatcagtgttggccacttcaattagtccagagcagtgcatcaaagtgctttgtcctatcattcaaactgcagactacccaattaatctggctgcaatcaaaatgcaaacaaaagtgatagagagagtgtccaaggaaaccctaaacctgcttttgccagagattatgccaggtctaatacagggttatgataattcagagagcagtgttcggaaagcttgtgtcttctgcctggtggctgttcatgcggtaattggtgatgaactaaaaccacatctcagtcaacttactggcagtaaaatgaagctactgaatctttacatcaaacgtgcacaaacaggttctggaggagctgatcccactactgatgtttctggacaaagttagtgaagctcatcacagcgaaccaggtctctcaaaagaaaggacagatagaccaccctcatcaatgaaaggaagttctcaaacacatcctttggaacttactattgtttcccagttttag

SEQ ID NO: 124701 - DNA, 554 bp, Homo sapiens
  Payload ID: 4490
  Gene Symbol: CPEB1
  Gene Name: cytoplasmic polyadenylation element binding protein 1
  ENST ID: ENST00000568994
  CDS Start-End: 213-554
acacgagcaggcagtcggctgctttggctctgctgtcggcggagaggacttcagtcgtgcgtgagggctgcttggccaccattgctggagaccggagggcgctgccttgcaacccagacttaacggcactgcaccgggactattccaagtagctgttgtgctgtctttccctgggagacttccaggactctgaagaaacagttacaagcaggatgcttttcccaacctctgcgcaagaatcttcccgtggcctcccagatgcaaatgacttgtgccttggcctgcagtccctcagtctgacaggctgggaccgaccctggagcacccaggactcagattcctcagcccagagcagcacacactcggtactgagcatgctccataacccactgggaaatgtcctaggaaaaccccccttgagcttcctgcctctggatccccttgggtctgacttggtggacaagtttccagcaccctcagttagaggatcacgcctggacacccggcccatcctggactctcgatctagcagcccctctgactcagacaccagt

SEQ ID NO: 124702 - DNA, 527 bp, Homo sapiens
  Payload ID: 4490
  Gene Symbol: CPEB1
  Gene Name: cytoplasmic polyadenylation element binding protein 1
  ENST ID: ENST00000569257
  CDS Start-End: 421-527
atgggcgggagagggttaggcttgcaggccgcggaggtggcgtaggcggggagcgacccgagcccactctgggctgtgctgttcggaccctcagcctggcgagcattcgtgatgagttcccctgaggtaacaggagaatccccagagggcaggtctaaagcattgccaagtaattcttcctgttgactcctgattttcggtagtattaaggaagaagaagcaggaaggataaaagattgctgggacaaccaggaagcacctgctctctccacgtgtagtaatgccaatatctttcgaaggataaatgccatattggataattctctggatttcagtagagtctgcactacacctataaaccgaggaattcatgatcatttgccagacttccaggactctgaagaaacagttacaagcaggatgcttttcccaacctctgcgcaagaatcttcccgtggcctcccagatgcaaatgacttgtgccttggcctgcagtccctcagtctgacaggctgggaccgaccctg

SEQ ID NO: 124703 - DNA, 557 bp, Homo sapiens
  Payload ID: 4490
  Gene Symbol: CPEB1
  Gene Name: cytoplasmic polyadenylation element binding protein 1
  ENST ID: ENST00000567678
  CDS Start-End: 506-557
ctttctcacactgccgtcgcacgggagacccgaagccgctggcgctggaagctcacgccccctgcgggtctctttagcacccggcgcgcggtgggggcgcccgggcgggacggggcggggctgctgacggcgtagaccccgtgctctgtggagagccccacgacggcggcggtcgcggcacctttaaggtggagggctcaagcccctcgtgcggcttcccaatcctgggcaggtcacgtggcttcacaccttcgcttggcgccggagagggagtctcgggggcggggctggccaggaagaagaagcaggaaggataaaagattgctgggacaaccaggaagcacctgctctctccacgtgtagtaatgccaatatctttcgaaggataaatgccatattggataattctctggatttcagtagagtctgcactacacctataaaccgaggaattcatgatcatttgccagacttccaggactctgaagaaacagttacaagcaggatgcttttcccaacctctgcgcaagaatcttcccgtggcctcccagatgcaa

SEQ ID NO: 124704 - DNA, 2068 bp, Homo sapiens
  Payload ID: 4490
  Gene Symbol: CPEB1
  Gene Name: cytoplasmic polyadenylation element binding protein 1
  Uniprot ID: Q9BZB8
  ENST ID: ENST00000617462
  CDS Start-End: 313-1773
actggcagcgggaagcatcagcagcctgatcacatgctggcccagtctgtaatgcagacgggataggggtgtgtgtgtgaggggagggggcctgtatggcaactgctcttgccccagcgtccccaaaagtgcagaggcagcggctgcagcatccagccagcttggatgtctggcctgtgagcctggggaaactattattaataatatttactgttgataatattggggaaaacagcccttaactctgaggtttctgctgtgctcctttccaaaacagacttccaggactctgaagaaacagttacaagcaggatgcttttcccaacctctgcgcaagaatcttcccgtggcctcccagatgcaaatgacttgtgccttggcctgcagtccctcagtctgacaggctgggaccgaccctggagcacccaggactcagattcctcagcccagagcagcacacactcggtactgagcatgctccataacccactgggaaatgtcctaggaaaaccccccttgagcttcctgcctctggatccccttgggtctgacttggtggacaagtttccagcaccctcagttagaggatcacgcctggacacccggcccatcctggactctcgatctagcagcccctctgactcagacaccagtggcttcagctctggatcagatcatctctcagatttgatttcaagccttcgcatttctccacctctgcccttcctgtctctgtcagggggtggtcccagagaccctttaaagatgggggtagggtctcggatggaccaagagcaagctgctcttgctgcagtcactccctccccaaccagtgcttcaaagagatggccaggagcttctgtgtggccatcctgggacctcctcgaagctcccaaagaccccttcagcatagagagagaggccaggctgcaccgacaagctgcagctgtgaatgaagccacctgtacctggagtggccagcttcctccccggaactataagaaccccatctactcttgcaaggtgtttctaggaggtgttccttgggatattacagaagctggattagttaacaccttccgtgtttttggctctttgagtgtggagtggcctggtaaggatggcaagcatccccggtgtcctcccaaagggtatgtgtatctggtcttcgaactagagaagtctgtccgatccttgcttcaggcttgctctcatgacccgctgagcccagatggcctgagtgaatattatttcaagatgtccagccgaaggatgcgctgcaaggaggtgcaggtgatcccctgggtattagccgacagtaactttgtccggagcccatctcagaggcttgaccccagcaggacggtgtttgtcggtgctctgcatggaatgctaaatgctgaggccctggcagccatcttgaacgacctatttggtggagtggtgtatgccgggattgacacagataagcacaagtatcccattggttctggtcgtgtgactttcaataaccaacggagttacctgaaagcagtcagcgctgcttttgtggagatcaaaaccaccaagttcacaaagaaggttcagattgacccctacctagaagattctctgtgtcatatctgcagttctcagcctggtcctttcttctgtcgagatcaggtctgcttcaaatacttctgccggagctgctggcactggcggcacagcatggagggcctgcgccaccacagccccctgatgcggaaccagaagaaccgagattccagctagaggagctggccttgcccagtggcctgtggcgcccaaagctggcaggtcaggcaagcagcctgcaccaccctgccactggcgaccagggagctggcttcccaaggacaagggaaaattgtagtcacctttgcacttgctgaatctgtctttgtttctgcactaattaatgcacattgagttttgtcaggttttgttttcagggggtgtaccaagggcaaggaccctctggcttaccctccaagcgactctgtagttttcccagattttagttcctcattttgcagatgaaaagcgg

SEQ ID NO: 124705 - DNA, 2112 bp, Homo sapiens
  Payload ID: 4490
  Gene Symbol: CPEB1
  Gene Name: cytoplasmic polyadenylation element binding protein 1
  Uniprot ID: Q9BZB8
  ENST ID: ENST00000615198
  CDS Start-End: 108-1793
cggggctgcgcgcggcccgctgcaaaaatagtgcccacgtgcgtgcgcgtctctcgcccgccggctggccggtcagcccgtcagccccgcagggccacaccggccccatggcgttcccgctggaagaagaagcaggaaggataaaagattgctgggacaaccaggaagcacctgctctctccacgtgtagtaatgccaatatctttcgaaggataaatgccatattggataattctctggatttcagtagagtctgcactacacctataaaccgaggaattcatgatcatttgccagacttccaggactctgaagaaacagttacaagcaggatgcttttcccaacctctgcgcaagaatcttcccgtggcctcccagatgcaaatgacttgtgccttggcctgcagtccctcagtctgacaggctgggaccgaccctggagcacccaggactcagattcctcagcccagagcagcacacactcggtactgagcatgctccataacccactgggaaatgtcctaggaaaaccccccttgagcttcctgcctctggatccccttgggtctgacttggtggacaagtttccagcaccctcagttagaggatcacgcctggacacccggcccatcctggactctcgatctagcagcccctctgactcagacaccagtggcttcagctctggatcagatcatctctcagatttgatttcaagccttcgcatttctccacctctgcccttcctgtctctgtcagggggtggtcccagagaccctttaaagatgggggtagggtctcggatggaccaagagcaagctgctcttgctgcagtcactccctccccaaccagtgcttcaaagagatggccaggagcttctgtgtggccatcctgggacctcctcgaagctcccaaagaccccttcagcatagagagagaggccaggctgcaccgacaagctgcagctgtgaatgaagccacctgtacctggagtggccagcttcctccccggaactataagaaccccatctactcttgcaaggtgtttctaggaggtgttccttgggatattacagaagctggattagttaacaccttccgtgtttttggctctttgagtgtggagtggcctggtaaggatggcaagcatccccggtgtcctcccaaagggtatgtgtatctggtcttcgaactagagaagtctgtccgatccttgcttcaggcttgctctcatgacccgctgagcccagatggcctgagtgaatattatttcaagatgtccagccgaaggatgcgctgcaaggaggtgcaggtgatcccctgggtattagccgacagtaactttgtccggagcccatctcagaggcttgaccccagcaggacggtgtttgtcggtgctctgcatggaatgctaaatgctgaggccctggcagccatcttgaacgacctatttggtggagtggtgtatgccgggattgacacagataagcacaagtatcccattggttctggtcgtgtgactttcaataaccaacggagttacctgaaagcagtcagcgctgcttttgtggagatcaaaaccaccaagttcacaaagaaggttcagattgacccctacctagaagattctctgtgtcatatctgcagttctcagcctggtcctttcttctgtcgagatcaggtctgcttcaaatacttctgccggagctgctggcactggcggcacagcatggagggcctgcgccaccacagccccctgatgcggaaccagaagaaccgagattccagctagaggagctggccttgcccagtggcctgtggcgcccaaagctggcaggtcaggcaagcagcctgcaccaccctgccactggcgaccagggagctggcttcccaaggacaagggaaaattgtagtcacctttgcacttgctgaatctgtctttgtttctgcactaattaatgcacattgagttttgtcaggttttgttttcagggggtgtaccaagggcaaggaccctctggcttaccctccaagcgactctgtagttttcccagattttagttcctcattttgcagatgaaaagcggggaaaaaaaaaaaaaaaaaaaaaa

SEQ ID NO: 124706 - DNA, 3074 bp, Homo sapiens
  Payload ID: 4490
  Gene Symbol: CPEB1
  Gene Name: cytoplasmic polyadenylation element binding protein 1
  ENST ID: ENST00000610719
  CDS Start-End: 1-1686
atggcattgtcactggaagaagaagcaggaaggataaaagattgctgggacaaccaggaagcacctgctctctccacgtgtagtaatgccaatatctttcgaaggataaatgccatattggataattctctggatttcagtagagtctgcactacacctataaaccgaggaattcatgatcatttgccagacttccaggactctgaagaaacagttacaagcaggatgcttttcccaacctctgcgcaagaatcttcccgtggcctcccagatgcaaatgacttgtgccttggcctgcagtccctcagtctgacaggctgggaccgaccctggagcacccaggactcagattcctcagcccagagcagcacacactcggtactgagcatgctccataacccactgggaaatgtcctaggaaaaccccccttgagcttcctgcctctggatccccttgggtctgacttggtggacaagtttccagcaccctcagttagaggatcacgcctggacacccggcccatcctggactctcgatctagcagcccctctgactcagacaccagtggcttcagctctggatcagatcatctctcagatttgatttcaagccttcgcatttctccacctctgcccttcctgtctctgtcagggggtggtcccagagaccctttaaagatgggggtagggtctcggatggaccaagagcaagctgctcttgctgcagtcactccctccccaaccagtgcttcaaagagatggccaggagcttctgtgtggccgtcctgggacctcctcgaagctcccaaagaccccttcagcatagagagagaggccaggctgcaccgacaagctgcagctgtgaatgaagccacctgtacctggagtggccagcttcctccccggaactataagaaccccatctactcttgcaaggtgtttctaggaggtgttccttgggatattacagaagctggattagttaacaccttccgtgtttttggctctttgagtgtggagtggcctggtaaggatggcaagcatccccggtgtcctcccaaagggtatgtgtatctggtcttcgaactagagaagtctgtccgatccttgcttcaggcttgctctcatgacccgctgagcccagatggcctgagtgaatattatttcaagatgtccagccgaaggatgcgctgcaaggaggtgcaggtgatcccctgggtattagccgacagtaactttgtccggagcccatctcagaggcttgaccccagcaggacggtgtttgtcggtgctctgcatggaatgctaaatgctgaggccctggcagccatcttgaacgacctatttggtggagtggtgtatgccgggattgacacagataagcacaagtatcccattggttctggtcgtgtgactttcaataaccaacggagttacctgaaagcagtcagcgctgcttttgtggagatcaaaaccaccaagttcacaaagaaggttcagattgacccctacctagaagattctctgtgtcatatctgcagttctcagcctggtcctttcttctgtcgagatcaggtctgcttcaaatacttctgccggagctgctggcactggcggcacagcatggagggcctgcgccaccacagccccctgatgcggaaccagaagaaccgagattccagctagaggagctggccttgcccagtggcctgtggcgcccaaagctggcaggtcaggcaagcagcctgcaccaccctgccactggcgaccagggagctggcttcccaaggacaagggaaaattgtagtcacctttgcacttgctgaatctgtctttgtttctgcactaattaatgcacattgagttttgtcaggttttgttttcagggggtgtaccaagggcaaggaccctctggcttaccctccaagcgactctgtagttttcccagattttagttcctcattttgcagatgaaaagcggggaaaaaaaaaaaaaaaaaaaaaactacgtgtccagaaggtattgaggtattgacacggatgcctacacctaggtttatttattaaaagcgcttttttacattccttgcaatactgatggtgatgatgcgcaggtctcattggtttcattcttgcagttgccatacagtgcctttccatttatttaacccccacctgaacggcataaactgagtgttcagctggtgttttttactgtaaacaataaggagactttgctcttcatttaaaccaaaatcatatttcatattttacgctcgagggtttttaccggttcctttttacactccttaaaacagtttttaagtcgtttggaacaagatattttttctttcctggcagcttttaacattatagcaaatttgtgtctgggggactgctggtcactgtttctcacagttgcaaatcaaggcatttgcaaccaagaaaaaaaaaattttttgttttatttgaaactggaccggataaacggtgtttgagcggctgctgtatatagttttaaatggtttattgcacctccttaagttgcacttatgtgggggggtggggttgatagaagtttttaatcacaaagtcacaggacttttttcttttgtaactgagctaaaaagggctgcttttcggtgggggcagatgaaggctcacaggagccctttctcttagagggggcaagtacccttcccttatatctttaatttgaggaatgtatgagataacagttgcagttgactgaaatgccactggaatttgaaaacttgacttttttttctttcctttttttttttttttttttttttaaaaagaaacaaaaaacccacaaaaactacttgcccctcctagggaagctgtgtgccaaagaaccagtgtcataacccctccctcctgctgagctgacgttgcattgttgcatatcccagctactctgtgggttttgtgaagctgtgtgtgaagtctctacctcattgtagtatatgcaggcaagactgcactctcctacagatgtgtggagtaagctgtggtgtagtttttttggcacataataaacacgttgcagc

SEQ ID NO: 124707 - DNA, 2068 bp, Homo sapiens
  Payload ID: 4490
  Gene Symbol: CPEB1
  Gene Name: cytoplasmic polyadenylation element binding protein 1
  Uniprot ID: Q9BZB8
  ENST ID: ENST00000620212
  CDS Start-End: 313-1773
actggcagcgggaagcatcagcagcctgatcacatgctggcccagtctgtaatgcagacgggataggggtgtgtgtgtgaggggagggggcctgtatggcaactgctcttgccccagcgtccccaaaagtgcagaggcagcggctgcagcatccagccagcttggatgtctggcctgtgagcctggggaaactattattaataatatttactgttgataatattggggaaaacagcccttaactctgaggtttctgctgtgctcctttccaaaacagacttccaggactctgaagaaacagttacaagcaggatgcttttcccaacctctgcgcaagaatcttcccgtggcctcccagatgcaaatgacttgtgccttggcctgcagtccctcagtctgacaggctgggaccgaccctggagcacccaggactcagattcctcagcccagagcagcacacactcggtactgagcatgctccataacccactgggaaatgtcctaggaaaaccccccttgagcttcctgcctctggatccccttgggtctgacttggtggacaagtttccagcaccctcagttagaggatcacgcctggacacccggcccatcctggactctcgatctagcagcccctctgactcagacaccagtggcttcagctctggatcagatcatctctcagatttgatttcaagccttcgcatttctccacctctgcccttcctgtctctgtcagggggtggtcccagagaccctttaaagatgggggtagggtctcggatggaccaagagcaagctgctcttgctgcagtcactccctccccaaccagtgcttcaaagagatggccaggagcttctgtgtggccgtcctgggacctcctcgaagctcccaaagaccccttcagcatagagagagaggccaggctgcaccgacaagctgcagctgtgaatgaagccacctgtacctggagtggccagcttcctccccggaactataagaaccccatctactcttgcaaggtgtttctaggaggtgttccttgggatattacagaagctggattagttaacaccttccgtgtttttggctctttgagtgtggagtggcctggtaaggatggcaagcatccccggtgtcctcccaaagggtatgtgtatctggtcttcgaactagagaagtctgtccgatccttgcttcaggcttgctctcatgacccgctgagcccagatggcctgagtgaatattatttcaagatgtccagccgaaggatgcgctgcaaggaggtgcaggtgatcccctgggtattagccgacagtaactttgtccggagcccatctcagaggcttgaccccagcaggacggtgtttgtcggtgctctgcatggaatgctaaatgctgaggccctggcagccatcttgaacgacctatttggtggagtggtgtatgccgggattgacacagataagcacaagtatcccattggttctggtcgtgtgactttcaataaccaacggagttacctgaaagcagtcagcgctgcttttgtggagatcaaaaccaccaagttcacaaagaaggttcagattgacccctacctagaagattctctgtgtcatatctgcagttctcagcctggtcctttcttctgtcgagatcaggtctgcttcaaatacttctgccggagctgctggcactggcggcacagcatggagggcctgcgccaccacagccccctgatgcggaaccagaagaaccgagattccagctagaggagctggccttgcccagtggcctgtggcgcccaaagctggcaggtcaggcaagcagcctgcaccaccctgccactggcgaccagggagctggcttcccaaggacaagggaaaattgtagtcacctttgcacttgctgaatctgtctttgtttctgcactaattaatgcacattgagttttgtcaggttttgttttcagggggtgtaccaagggcaaggaccctctggcttaccctccaagcgactctgtagttttcccagattttagttcctcattttgcagatgaaaagcgg

SEQ ID NO: 124708 - DNA, 2776 bp, Homo sapiens
  Payload ID: 4490
  Gene Symbol: CPEB1
  Gene Name: cytoplasmic polyadenylation element binding protein 1
  ENST ID: ENST00000617958
  CDS Start-End: 138-2018
taatgtcaatatgttttctggcattgctacttcaacatcgtcttccatgtctggcactggtttggagcactcatctctatcagattgtcttctgctaattcctctggtatgttaactcttggatttctccaaggtccatgtcttggaaatcttcactcccaacctttttttgtcatatctacagtttctttcatgatttcctgtattggctctgtggtaaatctgtgaagtcatgtacaacatctggaaacagtttttttaagcaggaatttattattttgggcatgatggctttcatggatttttctgtaacaatgatggcattgtcactggaagaagaagcaggaaggataaaagattgctgggacaaccaggaagcacctgctctctccacgtgtagtaatgccaatatctttcgaaggataaatgccatattggataattctctggatttcagtagagtctgcactacacctataaaccgaggaattcatgatcatttgccagacttccaggactctgaagaaacagttacaagcaggatgcttttcccaacctctgcgcaagaatcttcccgtggcctcccagatgcaaatgacttgtgccttggcctgcagtccctcagtctgacaggctgggaccgaccctggagcacccaggactcagattcctcagcccagagcagcacacactcggtactgagcatgctccataacccactgggaaatgtcctaggaaaaccccccttgagcttcctgcctctggatccccttgggtctgacttggtggacaagtttccagcaccctcagttagaggatcacgcctggacacccggcccatcctggactctcgatctagcagcccctctgactcagacaccagtggcttcagctctggatcagatcatctctcagatttgatttcaagccttcgcatttctccacctctgcccttcctgtctctgtcagggggtggtcccagagaccctttaaagatgggggtagggtctcggatggaccaagagcaagctgctcttgctgcagtcactccctccccaaccagtgcttcaaagagatggccaggagcttctgtgtggccatcctgggacctcctcgaagctcccaaagaccccttcagcatagagagagaggccaggctgcaccgacaagctgcagctgtgaatgaagccacctgtacctggagtggccagcttcctccccggaactataagaaccccatctactcttgcaaggtgtttctaggaggtgttccttgggatattacagaagctggattagttaacaccttccgtgtttttggctctttgagtgtggagtggcctggtaaggatggcaagcatccccggtgtcctcccaaaggtaatatgcctaaagggtatgtgtatctggtcttcgaactagagaagtctgtccgatccttgcttcaggcttgctctcatgacccgctgagcccagatggcctgagtgaatattatttcaagatgtccagccgaaggatgcgctgcaaggaggtgcaggtgatcccctgggtattagccgacagtaactttgtccggagcccatctcagaggcttgaccccagcaggacggtgtttgtcggtgctctgcatggaatgctaaatgctgaggccctggcagccatcttgaacgacctatttggtggagtggtgtatgccgggattgacacagataagcacaagtatcccattggttctggtcgtgtgactttcaataaccaacggagttacctgaaagcagtcagcgctgcttttgtggagatcaaaaccaccaagttcacaaagaaggttcagattgacccctacctagaagattctctgtgtcatatctgcagttctcagcctggtcctttcttctgtcgagatcaggtctgcttcaaatacttctgccggagctgctggcactggcggcacagcatggagggcctgcgccaccacagccccctgatgcggaaccagaagaaccgagattccagctagaggagctggccttgcccagtggcctgtggcgcccaaagctggcaggtcaggcaagcagcctgcaccaccctgccactggcgaccagggagctggcttcccaaggacaagggaaaattgtagtcacctttgcacttgctgaatctgtctttgtttctgcactaattaatgcacattgagttttgtcaggttttgttttcagggggtgtaccaagggcaaggaccctctggcttaccctccaagcgactctgtagttttcccagattttagttcctcattttgcagatgaaaagcggggaaaaaaaaaaaaaaaaaaaaaactacgtgtccagaaggtattgaggtattgacacggatgcctacacctaggtttatttattaaaagcgcttttttacattccttgcaatactgatggtgatgatgcgcaggtctcattggtttcattcttgcagttgccatacagtgcctttccatttatttaacccccacctgaacggcataaactgagtgttcagctggtgttttttactgtaaacaataaggagactttgctcttcatttaaaccaaaatcatatttcatattttacgctcgagggtttttaccggttcctttttacactccttaaaacagtttttaagtcgtttggaacaagatattttttctttcctggcagcttttaacattatagcaaatttgtgtctgggggactgctggtcactgtttctcacagttgcaaatcaaggcatttgcaaccaa

SEQ ID NO: 124709 - DNA, 1559 bp, Homo sapiens
  Payload ID: 4490
  Gene Symbol: CPEB1
  Gene Name: cytoplasmic polyadenylation element binding protein 1
  ENST ID: ENST00000614977
  CDS Start-End: 187-603
ctgatcacatgctggcccagtctgtaatgcagacgggataggggtgtgtgtgtgaggggagggggcctgtatggcaactgctcttgccccagcgtccccaaaagtgcagaggcagcggctgcagcatccagccagcttggatgtctggcctacttccaggactctgaagaaacagttacaagcaggatgcttttcccaacctctgcgcaagaatcttcccgtggcctcccagatgcaaatgacttgtgccttggcctgcagtccctcagtctgacaggctgggaccgaccctggagcacccaggactcagattcctcagcccagagcagcacacactcggtcaagccttcgcatttctccacctctgcccttcctgtctctgtcagggggtggtcccagagaccctttaaagatgggggtagggtctcggatggaccaagagcaagctgctcttgctgcagtcactccctccccaaccagtgcttcaaagagatggccaggagcttctgtgtggccatcctgggacctcctcgaagctcccaaagaccccttcagcatagagagagaggccaggctgcaccgacaagctgcagctgtgaatgaagccacctgtacctggagtggccagcttcctccccggaactataagaaccccatctactcttgcaaggtgtttctaggaggtgttccttgggatattacagaagctggattagttaacaccttccgtgtttttggctctttgagtgtggagtggcctggtaaggatggcaagcatccccggtgtcctcccaaagggtatgtgtatctggtcttcgaactagagaagtctgtccgatccttgcttcaggcttgctctcatgacccgctgagcccagatggcctgagtgaatattatttcaagatgtccagccgaaggatgcgctgcaaggaggtgcaggtgatcccctgggtattagccgacagtaactttgtccggagcccatctcagaggcttgaccccagcaggacggtgtttgtcggtgctctgcatggaatgctaaatgctgaggccctggcagccatcttgaacgacctatttggtggagtggtgtatgccgggattgacacagataagcacaagtatcccattggttctggtcgtgtgactttcaataaccaacggagttacctgaaagcagtcagcgctgcttttgtggagatcaaaaccaccaagttcacaaagaaggttcagattgacccctacctagaagattctctgtgtcatatctgcagttctcagcctggtcctttcttctgtcgagatcaggtctgcttcaaatacttctgccggagctgctggcactggcggcacagcatggagggcctgcgccaccacagccccctgatgcggaaccagaagaaccgagattccagctagaggagctggccttgcccagtggcctgtggcgcccaaagctggcaggtcaggcaagcagcctgcaccaccctgccactggcgaccagggagctggcttcccaaggacaagggaaaattgtagtcacctttgcacttgctg

SEQ ID NO: 124710 - DNA, 2009 bp, Homo sapiens
  Payload ID: 4490
  Gene Symbol: CPEB1
  Gene Name: cytoplasmic polyadenylation element binding protein 1
  ENST ID: ENST00000616959
  CDS Start-End: 18-1712
attttcccttctaggctatgcctgagtgcctgtggacacagggtgtactgcaggaagttctgaacagctatttctgtggcagcattattctctcgaccctgccatgggaggtcccaggtgggcatgcttcccgtatctgcttgcttctccttgcaacaggggagaacaagcaggtggagtgctaccagctgagtccaggtttgagcagcctgcctgacttccaggactctgaagaaacagttacaagcaggatgcttttcccaacctctgcgcaagaatcttcccgtggcctcccagatgcaaatgacttgtgccttggcctgcagtccctcagtctgacaggctgggaccgaccctggagcacccaggactcagattcctcagcccagagcagcacacactcggtactgagcatgctccataacccactgggaaatgtcctaggaaaaccccccttgagcttcctgcctctggatccccttgggtctgacttggtggacaagtttccagcaccctcagttagaggatcacgcctggacacccggcccatcctggactctcgatctagcagcccctctgactcagacaccagtggcttcagctctggatcagatcatctctcagatttgatttcaagccttcgcatttctccacctctgcccttcctgtctctgtcagggggtggtcccagagaccctttaaagatgggggtagggtctcggatggaccaagagcaagctgctcttgctgcagtcactccctccccaaccagtgcttcaaagagatggccaggagcttctgtgtggccatcctgggacctcctcgaagctcccaaagaccccttcagcatagagagagaggccaggctgcaccgacaagctgcagctgtgaatgaagccacctgtacctggagtggccagcttcctccccggaactataagaaccccatctactcttgcaaggtgtttctaggaggtgttccttgggatattacagaagctggattagttaacaccttccgtgtttttggctctttgagtgtggagtggcctggtaaggatggcaagcatccccggtgtcctcccaaagggtatgtgtatctggtcttcgaactagagaagtctgtccgatccttgcttcaggcttgctctcatgacccgctgagcccagatggcctgagtgaatattatttcaagatgtccagccgaaggatgcgctgcaaggaggtgcaggtgatcccctgggtattagccgacagtaactttgtccggagcccatctcagaggcttgaccccagcaggacggtgtttgtcggtgctctgcatggaatgctaaatgctgaggccctggcagccatcttgaacgacctatttggtggagtggtgtatgccgggattgacacagataagcacaagtatcccattggttctggtcgtgtgactttcaataaccaacggagttacctgaaagcagtcagcgctgcttttgtggagatcaaaaccaccaagttcacaaagaaggttcagattgacccctacctagaagattctctgtgtcatatctgcagttctcagcctggtcctttcttctgtcgagatcaggtctgcttcaaatacttctgccggagctgctggcactggcggcacagcatggagggcctgcgccaccacagccccctgatgcggaaccagaagaaccgagattccagctagaggagctggccttgcccagtggcctgtggcgcccaaagctggcaggtcaggcaagcagcctgcaccaccctgccactggcgaccagggagctggcttcccaaggacaagggaaaattgtagtcacctttgcacttgctgaatctgtctttgtttctgcactaattaatgcacattgagttttgtcaggttttgttttcagggggtgtaccaagggcaaggaccctctggcttaccctccaagcgactctgtagttttcccagattttagttcctcattttgcagatgaaaagcgggg

SEQ ID NO: 124711 - DNA, 2220 bp, Homo sapiens
  Payload ID: 4490
  Gene Symbol: CPEB1
  Gene Name: cytoplasmic polyadenylation element binding protein 1
  Uniprot ID: Q9BZB8
  ENST ID: ENST00000617522
  CDS Start-End: 526-1986
tctgtggagagccccacgacggcggcggtcgcggcacctttaaggtggagggctcaagcccctcgtgcggcttcccaatcctgggcaggtcacgtggcttcacaccttcgcttggcgccggagagggagtctcgggggcggggctggccaggtagtgtggcgcgagggcggaagactggcggggcttcgtgcccgggagacccgccgggctggcggcattgaggaagaagaagcaggaaggataaaagattgctgggacaaccaggaagcacctgctctctccacgtgtagtaatgccaatatctttcgaaggataaatgccatattggataattctctggatttcagtagagtctgcactacacctataaaccgaggaattcatgatcatttgccagatgcagtcgtgattggcactgtaaagggtctccaatttgatgtactgtttaaggaacttctgcagaccccaatttgaacagtgtagtgtcagacttccaggactctgaagaaacagttacaagcaggatgcttttcccaacctctgcgcaagaatcttcccgtggcctcccagatgcaaatgacttgtgccttggcctgcagtccctcagtctgacaggctgggaccgaccctggagcacccaggactcagattcctcagcccagagcagcacacactcggtactgagcatgctccataacccactgggaaatgtcctaggaaaaccccccttgagcttcctgcctctggatccccttgggtctgacttggtggacaagtttccagcaccctcagttagaggatcacgcctggacacccggcccatcctggactctcgatctagcagcccctctgactcagacaccagtggcttcagctctggatcagatcatctctcagatttgatttcaagccttcgcatttctccacctctgcccttcctgtctctgtcagggggtggtcccagagaccctttaaagatgggggtagggtctcggatggaccaagagcaagctgctcttgctgcagtcactccctccccaaccagtgcttcaaagagatggccaggagcttctgtgtggccatcctgggacctcctcgaagctcccaaagaccccttcagcatagagagagaggccaggctgcaccgacaagctgcagctgtgaatgaagccacctgtacctggagtggccagcttcctccccggaactataagaaccccatctactcttgcaaggtgtttctaggaggtgttccttgggatattacagaagctggattagttaacaccttccgtgtttttggctctttgagtgtggagtggcctggtaaggatggcaagcatccccggtgtcctcccaaagggtatgtgtatctggtcttcgaactagagaagtctgtccgatccttgcttcaggcttgctctcatgacccgctgagcccagatggcctgagtgaatattatttcaagatgtccagccgaaggatgcgctgcaaggaggtgcaggtgatcccctgggtattagccgacagtaactttgtccggagcccatctcagaggcttgaccccagcaggacggtgtttgtcggtgctctgcatggaatgctaaatgctgaggccctggcagccatcttgaacgacctatttggtggagtggtgtatgccgggattgacacagataagcacaagtatcccattggttctggtcgtgtgactttcaataaccaacggagttacctgaaagcagtcagcgctgcttttgtggagatcaaaaccaccaagttcacaaagaaggttcagattgacccctacctagaagattctctgtgtcatatctgcagttctcagcctggtcctttcttctgtcgagatcaggtctgcttcaaatacttctgccggagctgctggcactggcggcacagcatggagggcctgcgccaccacagccccctgatgcggaaccagaagaaccgagattccagctagaggagctggccttgcccagtggcctgtggcgcccaaagctggcaggtcaggcaagcagcctgcaccaccctgccactggcgaccagggagctggcttcccaaggacaagggaaaattgtagtcacctttgcacttgctgaatctgtctttgtttctgcactaattaatgcacattgagttttgtcaggttttgttttcagggggtgtaccaagggcaaggaccctctggcttac

SEQ ID NO: 124712 - DNA, 4882 bp, Homo sapiens
  Payload ID: 4490
  Gene Symbol: CPEB1
  Gene Name: cytoplasmic polyadenylation element binding protein 1
  ENST ID: ENST00000614918
  CDS Start-End: 1727-3493
gtgggaggagcacttgagcccaggagtttcaagttcagcctgggcaacacagcgagacctcctctctgcaggttataaatctttgcatcttagccttcatgaagttgccttcctgaaattgagaatcagcttagaaatctacagttgtgaaaagggccttgtgtgtcactggatttaacagttctcaatggcaccactctagagagcttgggaaaacaaccttgtaggattgtgtattttggtcgtcttcacagtttgcagagggtaccaatcttcaagaacttgaggctgacgtgaggctcaagtttgtccctttaaggtcatcctgcagagttggtaaaactgtaaatgctcttggtcattctcatgctcacttggattttagtaggccaaacaaaatgacattgggcctcttcttgttttgttttgatgtgaccagcttatgagatattaagtgccagtttcattacttggtctgtttttgttttccgcaagataattgaggataatagaactgatgaggcaggctccccttaaaaaactcaatctgtcaaccaatatttcattgcttcttatgttgggcattggctgtggagagtgagggagaccggagtgaagaatggtacctacatttctgctttgggcatctggtggatggtggtgttatttaccgagatagggaataccaaaagaatagtttttgtgtaagggttcatgattttttatatatatatataggagttcttttttcattcggtaatgtcttacccatcttctcatgccagttaataaagttgtatgtactaataatgaccacatagagttgtataacttaatcagtttgggtggttttaccactgttggtacttacctctcttgtattcaataattagtgtttgcagatacaaattagcagctactgtatgccatgcaaaatgctttacatatgtcatcaaaaagttggtatcctttttccatttcacaaatggggaaactgagggatagaggttaagtaactgtgatatcacacagccaataaatggcagaatgaaaatttttaaacagctgtattgacataaaatctacataccctaaagttcacctttaatgtacagttcattggtttttagtccagttgactcttggacagtgtgggagttaggaggaccaacccccacagtcaaatatctatgtataactttgactcccccaaaacttgactaatagcctgctgttgaccggaagccttaccgataacataaacagttgatcacatgttttgtatgttacatgtattttataccgtattcttacgataaagtaggctagagaaaaaatgttactagaaaatcataagagaaaatatatttactgttcattaagtggaagtgaatcataaagatcttcatatttactgttttcacattgagcaggccgaggaagaggaaggattgattggtcttgctctctcaggggtggcaaaggtggaaggatgtggagcggatgtaaggagaagcaggcacagtcagtgtaactttacagaaataatttctgtctgactttttgctttttcatttctgtaaaaatgtttctatgtggtaccaatcctaattccaccatttgcgttagtttcagtgcctgtgtaatagaagggtctgtattgtaaaagaagtcaaaagcagccttgaataatcggaacccttttgccagatcatctaatgtcaatatgttttctggcattgctacttcaacatcgtcttccatgtctggcactggtttggagcactcatctctatcagattgtcttctgctaattcctctggaagaagaagcaggaaggataaaagattgctgggacaaccaggaagcacctgctctctccacgtgtagtaatgccaatatctttcgaaggataaatgccatattggataattctctggatttcagtagagtctgcactacacctataaaccgaggaattcatgatcatttgccagacttccaggactctgaagaaacagttacaagcaggatgcttttcccaacctctgcgcaagaatcttcccgtggcctcccagatgcaaatgacttgtgccttggcctgcagtccctcagtctgacaggctgggaccgaccctggagcacccaggactcagattcctcagcccagagcagcacacactcggtactgagcatgctccataacccactgggaaatgtcctaggaaaaccccccttgagcttcctgcctctggatccccttgggtctgacttggtggacaagtttccagcaccctcagttagaggatcacgcctggacacccggcccatcctggactctcgatctagcagcccctctgactcagacaccagtggcttcagctctggatcagatcatctctcagatttgatttcaagccttcgcatttctccacctctgcccttcctgtctctgtcagggggtggtcccagagaccctttaaagatgggggtagggtctcggatggaccaagagcaagctgctcttgctgcagtcactccctccccaaccagtgcttcaaagagatggccaggagcttctgtgtggccatcctgggacctcctcgaagctcccaaagaccccttcagcatagagagagaggccaggctgcaccgacaagctgcagctgtgaatgaagccacctgtacctggagtggccagcttcctccccggaactataagaaccccatctactcttgcaaggtgtttctaggaggtgttccttgggatattacagaagctggattagttaacaccttccgtgtttttggctctttgagtgtggagtggcctggtaaggatggcaagcatccccggtgtcctcccaaagggtatgtgtatctggtcttcgaactagagaagtctgtccgatccttgcttcaggcttgctctcatgacccgctgagcccagatggcctgagtgaatattatttcaagatgtccagccgaaggatgcgctgcaaggaggtgcaggtgatcccctgggtattagccgacagtaactttgtccggagcccatctcagaggcttgaccccagcaggacggtgtttgtcggtgctctgcatggaatgctaaatgctgaggccctggcagccatcttgaacgacctatttggtggagtggtgtatgccgggattgacacagataagcacaagtatcccattggttctggtcgtgtgactttcaataaccaacggagttacctgaaagcagtcagcgctgcttttgtggagatcaaaaccaccaagttcacaaagaaggttcagattgacccctacctagaagattctctgtgtcatatctgcagttctcagcctggtcctttcttctgtcgagatcaggtctgcttcaaatacttctgccggagctgctggcactggcggcacagcatggagggcctgcgccaccacagccccctgatgcggaaccagaagaaccgagattccagctagaggagctggccttgcccagtggcctgtggcgcccaaagctggcaggtcaggcaagcagcctgcaccaccctgccactggcgaccagggagctggcttcccaaggacaagggaaaattgtagtcacctttgcacttgctgaatctgtctttgtttctgcactaattaatgcacattgagttttgtcaggttttgttttcagggggtgtaccaagggcaaggaccctctggcttaccctccaagcgactctgtagttttcccagattttagttcctcattttgcagatgaaaagcggggaaaaaaaaaaaaaaaaaaaaaactacgtgtccagaaggtattgaggtattgacacggatgcctacacctaggtttatttattaaaagcgcttttttacattccttgcaatactgatggtgatgatgcgcaggtctcattggtttcattcttgcagttgccatacagtgcctttccatttatttaacccccacctgaacggcataaactgagtgttcagctggtgttttttactgtaaacaataaggagactttgctcttcatttaaaccaaaatcatatttcatattttacgctcgagggtttttaccggttcctttttacactccttaaaacagtttttaagtcgtttggaacaagatattttttctttcctggcagcttttaacattatagcaaatttgtgtctgggggactgctggtcactgtttctcacagttgcaaatcaaggcatttgcaaccaagaaaaaaaaaattttttgttttatttgaaactggaccggataaacggtgtttgagcggctgctgtatatagttttaaatggtttattgcacctccttaagttgcacttatgtgggggggtggggttgatagaagtttttaatcacaaagtcacaggacttttttcttttgtaactgagctaaaaagggctgcttttcggtgggggcagatgaaggctcacaggagccctttctcttagagggggcaagtacccttcccttatatctttaatttgaggaatgtatgagataacagttgcagttgactgaaatgccactggaatttgaaaacttgacttttttttctttcctttttttttttttttttttttttaaaaagaaacaaaaaacccacaaaaactacttgcccctcctagggaagctgtgtgccaaagaaccagtgtcataacccctccctcctgctgagctgacgttgcattgttgcatatcccagctactctgtgggttttgtgaagctgtgtgtgaagtctctacctcattgtagtatatgcaggcaagactgcactctcctacagatgtgtggagtaagctgtggtgtagtttttttggcacataataaacacgttgcagca

SEQ ID NO: 124713 - DNA, 2459 bp, Homo sapiens
  Payload ID: 4490
  Gene Symbol: CPEB1
  Gene Name: cytoplasmic polyadenylation element binding protein 1
  Uniprot ID: Q9BZB8
  ENST ID: ENST00000616775
  CDS Start-End: 226-1701
agccggctgatgtcactggcagcgggaagcatcagcagcctgatcacatgctggcccagtctgtaatgcagacgggataggggtgtgtgtgtgaggggagggggcctgtatggcaactgctcttgccccagcgtccccaaaagtgcagaggcagcggctgcagcatccagccagcttggatgtctggcctacttccaggactctgaagaaacagttacaagcaggatgcttttcccaacctctgcgcaagaatcttcccgtggcctcccagatgcaaatgacttgtgccttggcctgcagtccctcagtctgacaggctgggaccgaccctggagcacccaggactcagattcctcagcccagagcagcacacactcggtactgagcatgctccataacccactgggaaatgtcctaggaaaaccccccttgagcttcctgcctctggatccccttgggtctgacttggtggacaagtttccagcaccctcagttagaggatcacgcctggacacccggcccatcctggactctcgatctagcagcccctctgactcagacaccagtggcttcagctctggatcagatcatctctcagatttgatttcaagccttcgcatttctccacctctgcccttcctgtctctgtcagggggtggtcccagagaccctttaaagatgggggtagggtctcggatggaccaagagcaagctgctcttgctgcagtcactccctccccaaccagtgcttcaaagagatggccaggagcttctgtgtggccgtcctgggacctcctcgaagctcccaaagaccccttcagcatagagagagaggccaggctgcaccgacaagctgcagctgtgaatgaagccacctgtacctggagtggccagcttcctccccggaactataagaaccccatctactcttgcaaggtgtttctaggaggtgttccttgggatattacagaagctggattagttaacaccttccgtgtttttggctctttgagtgtggagtggcctggtaaggatggcaagcatccccggtgtcctcccaaaggtaatatgcctaaagggtatgtgtatctggtcttcgaactagagaagtctgtccgatccttgcttcaggcttgctctcatgacccgctgagcccagatggcctgagtgaatattatttcaagatgtccagccgaaggatgcgctgcaaggaggtgcaggtgatcccctgggtattagccgacagtaactttgtccggagcccatctcagaggcttgaccccagcaggacggtgtttgtcggtgctctgcatggaatgctaaatgctgaggccctggcagccatcttgaacgacctatttggtggagtggtgtatgccgggattgacacagataagcacaagtatcccattggttctggtcgtgtgactttcaataaccaacggagttacctgaaagcagtcagcgctgcttttgtggagatcaaaaccaccaagttcacaaagaaggttcagattgacccctacctagaagattctctgtgtcatatctgcagttctcagcctggtcctttcttctgtcgagatcaggtctgcttcaaatacttctgccggagctgctggcactggcggcacagcatggagggcctgcgccaccacagccccctgatgcggaaccagaagaaccgagattccagctagaggagctggccttgcccagtggcctgtggcgcccaaagctggcaggtcaggcaagcagcctgcaccaccctgccactggcgaccagggagctggcttcccaaggacaagggaaaattgtagtcacctttgcacttgctgaatctgtctttgtttctgcactaattaatgcacattgagttttgtcaggttttgttttcagggggtgtaccaagggcaaggaccctctggcttaccctccaagcgactctgtagttttcccagattttagttcctcattttgcagatgaaaagcggggaaaaaaaaaaaaaaaaaaaaaactacgtgtccagaaggtattgaggtattgacacggatgcctacacctaggtttatttattaaaagcgcttttttacattccttgcaatactgatggtgatgatgcgcaggtctcattggtttcattcttgcagttgccatacagtgcctttccatttatttaacccccacctgaacggcataaactgagtgttcagctggtgttttttactgtaaacaataaggagactttgctcttcatttaaaccaaaatcatatttcatattttacgctcgagggtttttaccggttcctttttacactccttaaaacagtttttaagtcgtttggaacaagatattttttctttcctggcagcttttaacattatagcaaatttgtgtctgggggactgctggtcactgtttctcacagttgcaaatcaaggcatttgcaaccaa

SEQ ID NO: 124714 - DNA, 1919 bp, Homo sapiens
  Payload ID: 4490
  Gene Symbol: CPEB1
  Gene Name: cytoplasmic polyadenylation element binding protein 1
  Uniprot ID: Q9BZB8
  ENST ID: ENST00000619696
  CDS Start-End: 162-1622
aatgcagacgggataggggtgtgtgtgtgaggggagggggcctgtatggcaactgctcttgccccagcgtccccaaaagtgcagaggcagcggctgcagcatccagccagcttggatgtctggcctacttccaggactctgaagaaacagttacaagcaggatgcttttcccaacctctgcgcaagaatcttcccgtggcctcccagatgcaaatgacttgtgccttggcctgcagtccctcagtctgacaggctgggaccgaccctggagcacccaggactcagattcctcagcccagagcagcacacactcggtactgagcatgctccataacccactgggaaatgtcctaggaaaaccccccttgagcttcctgcctctggatccccttgggtctgacttggtggacaagtttccagcaccctcagttagaggatcacgcctggacacccggcccatcctggactctcgatctagcagcccctctgactcagacaccagtggcttcagctctggatcagatcatctctcagatttgatttcaagccttcgcatttctccacctctgcccttcctgtctctgtcagggggtggtcccagagaccctttaaagatgggggtagggtctcggatggaccaagagcaagctgctcttgctgcagtcactccctccccaaccagtgcttcaaagagatggccaggagcttctgtgtggccgtcctgggacctcctcgaagctcccaaagaccccttcagcatagagagagaggccaggctgcaccgacaagctgcagctgtgaatgaagccacctgtacctggagtggccagcttcctccccggaactataagaaccccatctactcttgcaaggtgtttctaggaggtgttccttgggatattacagaagctggattagttaacaccttccgtgtttttggctctttgagtgtggagtggcctggtaaggatggcaagcatccccggtgtcctcccaaagggtatgtgtatctggtcttcgaactagagaagtctgtccgatccttgcttcaggcttgctctcatgacccgctgagcccagatggcctgagtgaatattatttcaagatgtccagccgaaggatgcgctgcaaggaggtgcaggtgatcccctgggtattagccgacagtaactttgtccggagcccatctcagaggcttgaccccagcaggacggtgtttgtcggtgctctgcatggaatgctaaatgctgaggccctggcagccatcttgaacgacctatttggtggagtggtgtatgccgggattgacacagataagcacaagtatcccattggttctggtcgtgtgactttcaataaccaacggagttacctgaaagcagtcagcgctgcttttgtggagatcaaaaccaccaagttcacaaagaaggttcagattgacccctacctagaagattctctgtgtcatatctgcagttctcagcctggtcctttcttctgtcgagatcaggtctgcttcaaatacttctgccggagctgctggcactggcggcacagcatggagggcctgcgccaccacagccccctgatgcggaaccagaagaaccgagattccagctagaggagctggccttgcccagtggcctgtggcgcccaaagctggcaggtcaggcaagcagcctgcaccaccctgccactggcgaccagggagctggcttcccaaggacaagggaaaattgtagtcacctttgcacttgctgaatctgtctttgtttctgcactaattaatgcacattgagttttgtcaggttttgttttcagggggtgtaccaagggcaaggaccctctggcttaccctccaagcgactctgtagttttcccagattttagttcctcattttgcagatgaaaagcgggg

SEQ ID NO: 124715 - DNA, 2459 bp, Homo sapiens
  Payload ID: 4490
  Gene Symbol: CPEB1
  Gene Name: cytoplasmic polyadenylation element binding protein 1
  Uniprot ID: Q9BZB8
  ENST ID: ENST00000618449
  CDS Start-End: 226-1701
agccggctgatgtcactggcagcgggaagcatcagcagcctgatcacatgctggcccagtctgtaatgcagacgggataggggtgtgtgtgtgaggggagggggcctgtatggcaactgctcttgccccagcgtccccaaaagtgcagaggcagcggctgcagcatccagccagcttggatgtctggcctacttccaggactctgaagaaacagttacaagcaggatgcttttcccaacctctgcgcaagaatcttcccgtggcctcccagatgcaaatgacttgtgccttggcctgcagtccctcagtctgacaggctgggaccgaccctggagcacccaggactcagattcctcagcccagagcagcacacactcggtactgagcatgctccataacccactgggaaatgtcctaggaaaaccccccttgagcttcctgcctctggatccccttgggtctgacttggtggacaagtttccagcaccctcagttagaggatcacgcctggacacccggcccatcctggactctcgatctagcagcccctctgactcagacaccagtggcttcagctctggatcagatcatctctcagatttgatttcaagccttcgcatttctccacctctgcccttcctgtctctgtcagggggtggtcccagagaccctttaaagatgggggtagggtctcggatggaccaagagcaagctgctcttgctgcagtcactccctccccaaccagtgcttcaaagagatggccaggagcttctgtgtggccatcctgggacctcctcgaagctcccaaagaccccttcagcatagagagagaggccaggctgcaccgacaagctgcagctgtgaatgaagccacctgtacctggagtggccagcttcctccccggaactataagaaccccatctactcttgcaaggtgtttctaggaggtgttccttgggatattacagaagctggattagttaacaccttccgtgtttttggctctttgagtgtggagtggcctggtaaggatggcaagcatccccggtgtcctcccaaaggtaatatgcctaaagggtatgtgtatctggtcttcgaactagagaagtctgtccgatccttgcttcaggcttgctctcatgacccgctgagcccagatggcctgagtgaatattatttcaagatgtccagccgaaggatgcgctgcaaggaggtgcaggtgatcccctgggtattagccgacagtaactttgtccggagcccatctcagaggcttgaccccagcaggacggtgtttgtcggtgctctgcatggaatgctaaatgctgaggccctggcagccatcttgaacgacctatttggtggagtggtgtatgccgggattgacacagataagcacaagtatcccattggttctggtcgtgtgactttcaataaccaacggagttacctgaaagcagtcagcgctgcttttgtggagatcaaaaccaccaagttcacaaagaaggttcagattgacccctacctagaagattctctgtgtcatatctgcagttctcagcctggtcctttcttctgtcgagatcaggtctgcttcaaatacttctgccggagctgctggcactggcggcacagcatggagggcctgcgccaccacagccccctgatgcggaaccagaagaaccgagattccagctagaggagctggccttgcccagtggcctgtggcgcccaaagctggcaggtcaggcaagcagcctgcaccaccctgccactggcgaccagggagctggcttcccaaggacaagggaaaattgtagtcacctttgcacttgctgaatctgtctttgtttctgcactaattaatgcacattgagttttgtcaggttttgttttcagggggtgtaccaagggcaaggaccctctggcttaccctccaagcgactctgtagttttcccagattttagttcctcattttgcagatgaaaagcggggaaaaaaaaaaaaaaaaaaaaaactacgtgtccagaaggtattgaggtattgacacggatgcctacacctaggtttatttattaaaagcgcttttttacattccttgcaatactgatggtgatgatgcgcaggtctcattggtttcattcttgcagttgccatacagtgcctttccatttatttaacccccacctgaacggcataaactgagtgttcagctggtgttttttactgtaaacaataaggagactttgctcttcatttaaaccaaaatcatatttcatattttacgctcgagggtttttaccggttcctttttacactccttaaaacagtttttaagtcgtttggaacaagatattttttctttcctggcagcttttaacattatagcaaatttgtgtctgggggactgctggtcactgtttctcacagttgcaaatcaaggcatttgcaaccaa

SEQ ID NO: 124716 - DNA, 1919 bp, Homo sapiens
  Payload ID: 4490
  Gene Symbol: CPEB1
  Gene Name: cytoplasmic polyadenylation element binding protein 1
  Uniprot ID: Q9BZB8
  ENST ID: ENST00000611163
  CDS Start-End: 162-1622
aatgcagacgggataggggtgtgtgtgtgaggggagggggcctgtatggcaactgctcttgccccagcgtccccaaaagtgcagaggcagcggctgcagcatccagccagcttggatgtctggcctacttccaggactctgaagaaacagttacaagcaggatgcttttcccaacctctgcgcaagaatcttcccgtggcctcccagatgcaaatgacttgtgccttggcctgcagtccctcagtctgacaggctgggaccgaccctggagcacccaggactcagattcctcagcccagagcagcacacactcggtactgagcatgctccataacccactgggaaatgtcctaggaaaaccccccttgagcttcctgcctctggatccccttgggtctgacttggtggacaagtttccagcaccctcagttagaggatcacgcctggacacccggcccatcctggactctcgatctagcagcccctctgactcagacaccagtggcttcagctctggatcagatcatctctcagatttgatttcaagccttcgcatttctccacctctgcccttcctgtctctgtcagggggtggtcccagagaccctttaaagatgggggtagggtctcggatggaccaagagcaagctgctcttgctgcagtcactccctccccaaccagtgcttcaaagagatggccaggagcttctgtgtggccatcctgggacctcctcgaagctcccaaagaccccttcagcatagagagagaggccaggctgcaccgacaagctgcagctgtgaatgaagccacctgtacctggagtggccagcttcctccccggaactataagaaccccatctactcttgcaaggtgtttctaggaggtgttccttgggatattacagaagctggattagttaacaccttccgtgtttttggctctttgagtgtggagtggcctggtaaggatggcaagcatccccggtgtcctcccaaagggtatgtgtatctggtcttcgaactagagaagtctgtccgatccttgcttcaggcttgctctcatgacccgctgagcccagatggcctgagtgaatattatttcaagatgtccagccgaaggatgcgctgcaaggaggtgcaggtgatcccctgggtattagccgacagtaactttgtccggagcccatctcagaggcttgaccccagcaggacggtgtttgtcggtgctctgcatggaatgctaaatgctgaggccctggcagccatcttgaacgacctatttggtggagtggtgtatgccgggattgacacagataagcacaagtatcccattggttctggtcgtgtgactttcaataaccaacggagttacctgaaagcagtcagcgctgcttttgtggagatcaaaaccaccaagttcacaaagaaggttcagattgacccctacctagaagattctctgtgtcatatctgcagttctcagcctggtcctttcttctgtcgagatcaggtctgcttcaaatacttctgccggagctgctggcactggcggcacagcatggagggcctgcgccaccacagccccctgatgcggaaccagaagaaccgagattccagctagaggagctggccttgcccagtggcctgtggcgcccaaagctggcaggtcaggcaagcagcctgcaccaccctgccactggcgaccagggagctggcttcccaaggacaagggaaaattgtagtcacctttgcacttgctgaatctgtctttgtttctgcactaattaatgcacattgagttttgtcaggttttgttttcagggggtgtaccaagggcaaggaccctctggcttaccctccaagcgactctgtagttttcccagattttagttcctcattttgcagatgaaaagcgggg

SEQ ID NO: 124717 - DNA, 3074 bp, Homo sapiens
  Payload ID: 4490
  Gene Symbol: CPEB1
  Gene Name: cytoplasmic polyadenylation element binding protein 1
  ENST ID: ENST00000611031
  CDS Start-End: 1-1686
atggcattgtcactggaagaagaagcaggaaggataaaagattgctgggacaaccaggaagcacctgctctctccacgtgtagtaatgccaatatctttcgaaggataaatgccatattggataattctctggatttcagtagagtctgcactacacctataaaccgaggaattcatgatcatttgccagacttccaggactctgaagaaacagttacaagcaggatgcttttcccaacctctgcgcaagaatcttcccgtggcctcccagatgcaaatgacttgtgccttggcctgcagtccctcagtctgacaggctgggaccgaccctggagcacccaggactcagattcctcagcccagagcagcacacactcggtactgagcatgctccataacccactgggaaatgtcctaggaaaaccccccttgagcttcctgcctctggatccccttgggtctgacttggtggacaagtttccagcaccctcagttagaggatcacgcctggacacccggcccatcctggactctcgatctagcagcccctctgactcagacaccagtggcttcagctctggatcagatcatctctcagatttgatttcaagccttcgcatttctccacctctgcccttcctgtctctgtcagggggtggtcccagagaccctttaaagatgggggtagggtctcggatggaccaagagcaagctgctcttgctgcagtcactccctccccaaccagtgcttcaaagagatggccaggagcttctgtgtggccatcctgggacctcctcgaagctcccaaagaccccttcagcatagagagagaggccaggctgcaccgacaagctgcagctgtgaatgaagccacctgtacctggagtggccagcttcctccccggaactataagaaccccatctactcttgcaaggtgtttctaggaggtgttccttgggatattacagaagctggattagttaacaccttccgtgtttttggctctttgagtgtggagtggcctggtaaggatggcaagcatccccggtgtcctcccaaagggtatgtgtatctggtcttcgaactagagaagtctgtccgatccttgcttcaggcttgctctcatgacccgctgagcccagatggcctgagtgaatattatttcaagatgtccagccgaaggatgcgctgcaaggaggtgcaggtgatcccctgggtattagccgacagtaactttgtccggagcccatctcagaggcttgaccccagcaggacggtgtttgtcggtgctctgcatggaatgctaaatgctgaggccctggcagccatcttgaacgacctatttggtggagtggtgtatgccgggattgacacagataagcacaagtatcccattggttctggtcgtgtgactttcaataaccaacggagttacctgaaagcagtcagcgctgcttttgtggagatcaaaaccaccaagttcacaaagaaggttcagattgacccctacctagaagattctctgtgtcatatctgcagttctcagcctggtcctttcttctgtcgagatcaggtctgcttcaaatacttctgccggagctgctggcactggcggcacagcatggagggcctgcgccaccacagccccctgatgcggaaccagaagaaccgagattccagctagaggagctggccttgcccagtggcctgtggcgcccaaagctggcaggtcaggcaagcagcctgcaccaccctgccactggcgaccagggagctggcttcccaaggacaagggaaaattgtagtcacctttgcacttgctgaatctgtctttgtttctgcactaattaatgcacattgagttttgtcaggttttgttttcagggggtgtaccaagggcaaggaccctctggcttaccctccaagcgactctgtagttttcccagattttagttcctcattttgcagatgaaaagcggggaaaaaaaaaaaaaaaaaaaaaactacgtgtccagaaggtattgaggtattgacacggatgcctacacctaggtttatttattaaaagcgcttttttacattccttgcaatactgatggtgatgatgcgcaggtctcattggtttcattcttgcagttgccatacagtgcctttccatttatttaacccccacctgaacggcataaactgagtgttcagctggtgttttttactgtaaacaataaggagactttgctcttcatttaaaccaaaatcatatttcatattttacgctcgagggtttttaccggttcctttttacactccttaaaacagtttttaagtcgtttggaacaagatattttttctttcctggcagcttttaacattatagcaaatttgtgtctgggggactgctggtcactgtttctcacagttgcaaatcaaggcatttgcaaccaagaaaaaaaaaattttttgttttatttgaaactggaccggataaacggtgtttgagcggctgctgtatatagttttaaatggtttattgcacctccttaagttgcacttatgtgggggggtggggttgatagaagtttttaatcacaaagtcacaggacttttttcttttgtaactgagctaaaaagggctgcttttcggtgggggcagatgaaggctcacaggagccctttctcttagagggggcaagtacccttcccttatatctttaatttgaggaatgtatgagataacagttgcagttgactgaaatgccactggaatttgaaaacttgacttttttttctttcctttttttttttttttttttttttaaaaagaaacaaaaaacccacaaaaactacttgcccctcctagggaagctgtgtgccaaagaaccagtgtcataacccctccctcctgctgagctgacgttgcattgttgcatatcccagctactctgtgggttttgtgaagctgtgtgtgaagtctctacctcattgtagtatatgcaggcaagactgcactctcctacagatgtgtggagtaagctgtggtgtagtttttttggcacataataaacacgttgcagc

SEQ ID NO: 124718 - DNA, 2422 bp, Homo sapiens
  Payload ID: 4490
  Gene Symbol: CPEB1
  Gene Name: cytoplasmic polyadenylation element binding protein 1
  Uniprot ID: Q9BZB8
  ENST ID: ENST00000620182
  CDS Start-End: 680-2140
cggtggggcctccgagccgcactgcggcctccaggcggcctcgagcgtctgtccagacgggagctgaccggacataaaggagcaccggcgcccggaacgtttctttctcacactgccgtcgcacgggagacccgaagccgctggcgctggaagctcacgccccctgcgggtctctttagcacccggcgcgcggtgggggcgcccgggcgggacggggcggggctgctgacggcgtagaccccgtgctctgtggagagccccacgacggcggcggtcgcggcacctttaaggtggagggctcaagcccctcgtgcggcttcccaatcctgggcaggtcacgtggcttcacaccttcgcttggcgccggagagggagtctcgggggcggggctggccaggtagtgtggcgcgagggcggaagactggcggggcttcgtgcccgggagacccgccgggctggcggcattgaggaagaagaagcaggaaggataaaagattgctgggacaaccaggaagcacctgctctctccacgtgtagtaatgccaatatctttcgaaggataaatgccatattggataattctctggatttcagtagagtctgcactacacctataaaccgaggaattcatgatcatttgccagacttccaggactctgaagaaacagttacaagcaggatgcttttcccaacctctgcgcaagaatcttcccgtggcctcccagatgcaaatgacttgtgccttggcctgcagtccctcagtctgacaggctgggaccgaccctggagcacccaggactcagattcctcagcccagagcagcacacactcggtactgagcatgctccataacccactgggaaatgtcctaggaaaaccccccttgagcttcctgcctctggatccccttgggtctgacttggtggacaagtttccagcaccctcagttagaggatcacgcctggacacccggcccatcctggactctcgatctagcagcccctctgactcagacaccagtggcttcagctctggatcagatcatctctcagatttgatttcaagccttcgcatttctccacctctgcccttcctgtctctgtcagggggtggtcccagagaccctttaaagatgggggtagggtctcggatggaccaagagcaagctgctcttgctgcagtcactccctccccaaccagtgcttcaaagagatggccaggagcttctgtgtggccatcctgggacctcctcgaagctcccaaagaccccttcagcatagagagagaggccaggctgcaccgacaagctgcagctgtgaatgaagccacctgtacctggagtggccagcttcctccccggaactataagaaccccatctactcttgcaaggtgtttctaggaggtgttccttgggatattacagaagctggattagttaacaccttccgtgtttttggctctttgagtgtggagtggcctggtaaggatggcaagcatccccggtgtcctcccaaagggtatgtgtatctggtcttcgaactagagaagtctgtccgatccttgcttcaggcttgctctcatgacccgctgagcccagatggcctgagtgaatattatttcaagatgtccagccgaaggatgcgctgcaaggaggtgcaggtgatcccctgggtattagccgacagtaactttgtccggagcccatctcagaggcttgaccccagcaggacggtgtttgtcggtgctctgcatggaatgctaaatgctgaggccctggcagccatcttgaacgacctatttggtggagtggtgtatgccgggattgacacagataagcacaagtatcccattggttctggtcgtgtgactttcaataaccaacggagttacctgaaagcagtcagcgctgcttttgtggagatcaaaaccaccaagttcacaaagaaggttcagattgacccctacctagaagattctctgtgtcatatctgcagttctcagcctggtcctttcttctgtcgagatcaggtctgcttcaaatacttctgccggagctgctggcactggcggcacagcatggagggcctgcgccaccacagccccctgatgcggaaccagaagaaccgagattccagctagaggagctggccttgcccagtggcctgtggcgcccaaagctggcaggtcaggcaagcagcctgcaccaccctgccactggcgaccagggagctggcttcccaaggacaagggaaaattgtagtcacctttgcacttgctgaatctgtctttgtttctgcactaattaatgcacattgagttttgtcaggttttgttttcagggggtgtaccaagggcaaggaccctctggcttaccctccaagcgactctgtagttttcccagattttagttcctcattttgc

SEQ ID NO: 124719 - DNA, 1997 bp, Homo sapiens
  Payload ID: 4490
  Gene Symbol: CPEB1
  Gene Name: cytoplasmic polyadenylation element binding protein 1
  Uniprot ID: Q9BZB8
  ENST ID: ENST00000632526
  CDS Start-End: 303-1763
gaagaagaagcaggaaggataaaagattgctgggacaaccaggaagcacctgctctctccacgtgtagtaatgccaatatctttcgaaggataaatgccatattggataattctctggatttcagtagagtctgcactacacctataaaccgaggaattcatgatcatttgccagatgcagtcgtgattggcactgtaaagggtctccaatttgatgtactgtttaaggaacttctgcagaccccaatttgaacagtgtagtgtcagacttccaggactctgaagaaacagttacaagcaggatgcttttcccaacctctgcgcaagaatcttcccgtggcctcccagatgcaaatgacttgtgccttggcctgcagtccctcagtctgacaggctgggaccgaccctggagcacccaggactcagattcctcagcccagagcagcacacactcggtactgagcatgctccataacccactgggaaatgtcctaggaaaaccccccttgagcttcctgcctctggatccccttgggtctgacttggtggacaagtttccagcaccctcagttagaggatcacgcctggacacccggcccatcctggactctcgatctagcagcccctctgactcagacaccagtggcttcagctctggatcagatcatctctcagatttgatttcaagccttcgcatttctccacctctgcccttcctgtctctgtcagggggtggtcccagagaccctttaaagatgggggtagggtctcggatggaccaagagcaagctgctcttgctgcagtcactccctccccaaccagtgcttcaaagagatggccaggagcttctgtgtggccgtcctgggacctcctcgaagctcccaaagaccccttcagcatagagagagaggccaggctgcaccgacaagctgcagctgtgaatgaagccacctgtacctggagtggccagcttcctccccggaactataagaaccccatctactcttgcaaggtgtttctaggaggtgttccttgggatattacagaagctggattagttaacaccttccgtgtttttggctctttgagtgtggagtggcctggtaaggatggcaagcatccccggtgtcctcccaaagggtatgtgtatctggtcttcgaactagagaagtctgtccgatccttgcttcaggcttgctctcatgacccgctgagcccagatggcctgagtgaatattatttcaagatgtccagccgaaggatgcgctgcaaggaggtgcaggtgatcccctgggtattagccgacagtaactttgtccggagcccatctcagaggcttgaccccagcaggacggtgtttgtcggtgctctgcatggaatgctaaatgctgaggccctggcagccatcttgaacgacctatttggtggagtggtgtatgccgggattgacacagataagcacaagtatcccattggttctggtcgtgtgactttcaataaccaacggagttacctgaaagcagtcagcgctgcttttgtggagatcaaaaccaccaagttcacaaagaaggttcagattgacccctacctagaagattctctgtgtcatatctgcagttctcagcctggtcctttcttctgtcgagatcaggtctgcttcaaatacttctgccggagctgctggcactggcggcacagcatggagggcctgcgccaccacagccccctgatgcggaaccagaagaaccgagattccagctagaggagctggccttgcccagtggcctgtggcgcccaaagctggcaggtcaggcaagcagcctgcaccaccctgccactggcgaccagggagctggcttcccaaggacaagggaaaattgtagtcacctttgcacttgctgaatctgtctttgtttctgcactaattaatgcacattgagttttgtcaggttttgttttcagggggtgtaccaagggcaaggaccctctggcttac

SEQ ID NO: 124720 - DNA, 262 bp, Homo sapiens
  Payload ID: 4490
  Gene Symbol: CPEB1
  Gene Name: cytoplasmic polyadenylation element binding protein 1
  ENST ID: ENST00000631406
  CDS Start-End: 211-262
gaagaagaagcaggaaggataaaagattgctgggacaaccaggaagcacctgctctctccacgtgtagtaatgccaatatctttcgaaggataaatgccatattggataattctctggatttcagtagagtctgcactacacctataaaccgaggaattcatgatcatttgccagacttccaggactctgaagaaacagttacaagcaggatgcttttcccaacctctgcgcaagaatcttcccgtggcctcccagatgcaa

SEQ ID NO: 124721 - DNA, 2776 bp, Homo sapiens
  Payload ID: 4490
  Gene Symbol: CPEB1
  Gene Name: cytoplasmic polyadenylation element binding protein 1
  ENST ID: ENST00000632172
  CDS Start-End: 138-2018
taatgtcaatatgttttctggcattgctacttcaacatcgtcttccatgtctggcactggtttggagcactcatctctatcagattgtcttctgctaattcctctggtatgttaactcttggatttctccaaggtccatgtcttggaaatcttcactcccaacctttttttgtcatatctacagtttctttcatgatttcctgtattggctctgtggtaaatctgtgaagtcatgtacaacatctggaaacagtttttttaagcaggaatttattattttgggcatgatggctttcatggatttttctgtaacaatgatggcattgtcactggaagaagaagcaggaaggataaaagattgctgggacaaccaggaagcacctgctctctccacgtgtagtaatgccaatatctttcgaaggataaatgccatattggataattctctggatttcagtagagtctgcactacacctataaaccgaggaattcatgatcatttgccagacttccaggactctgaagaaacagttacaagcaggatgcttttcccaacctctgcgcaagaatcttcccgtggcctcccagatgcaaatgacttgtgccttggcctgcagtccctcagtctgacaggctgggaccgaccctggagcacccaggactcagattcctcagcccagagcagcacacactcggtactgagcatgctccataacccactgggaaatgtcctaggaaaaccccccttgagcttcctgcctctggatccccttgggtctgacttggtggacaagtttccagcaccctcagttagaggatcacgcctggacacccggcccatcctggactctcgatctagcagcccctctgactcagacaccagtggcttcagctctggatcagatcatctctcagatttgatttcaagccttcgcatttctccacctctgcccttcctgtctctgtcagggggtggtcccagagaccctttaaagatgggggtagggtctcggatggaccaagagcaagctgctcttgctgcagtcactccctccccaaccagtgcttcaaagagatggccaggagcttctgtgtggccgtcctgggacctcctcgaagctcccaaagaccccttcagcatagagagagaggccaggctgcaccgacaagctgcagctgtgaatgaagccacctgtacctggagtggccagcttcctccccggaactataagaaccccatctactcttgcaaggtgtttctaggaggtgttccttgggatattacagaagctggattagttaacaccttccgtgtttttggctctttgagtgtggagtggcctggtaaggatggcaagcatccccggtgtcctcccaaaggtaatatgcctaaagggtatgtgtatctggtcttcgaactagagaagtctgtccgatccttgcttcaggcttgctctcatgacccgctgagcccagatggcctgagtgaatattatttcaagatgtccagccgaaggatgcgctgcaaggaggtgcaggtgatcccctgggtattagccgacagtaactttgtccggagcccatctcagaggcttgaccccagcaggacggtgtttgtcggtgctctgcatggaatgctaaatgctgaggccctggcagccatcttgaacgacctatttggtggagtggtgtatgccgggattgacacagataagcacaagtatcccattggttctggtcgtgtgactttcaataaccaacggagttacctgaaagcagtcagcgctgcttttgtggagatcaaaaccaccaagttcacaaagaaggttcagattgacccctacctagaagattctctgtgtcatatctgcagttctcagcctggtcctttcttctgtcgagatcaggtctgcttcaaatacttctgccggagctgctggcactggcggcacagcatggagggcctgcgccaccacagccccctgatgcggaaccagaagaaccgagattccagctagaggagctggccttgcccagtggcctgtggcgcccaaagctggcaggtcaggcaagcagcctgcaccaccctgccactggcgaccagggagctggcttcccaaggacaagggaaaattgtagtcacctttgcacttgctgaatctgtctttgtttctgcactaattaatgcacattgagttttgtcaggttttgttttcagggggtgtaccaagggcaaggaccctctggcttaccctccaagcgactctgtagttttcccagattttagttcctcattttgcagatgaaaagcggggaaaaaaaaaaaaaaaaaaaaaactacgtgtccagaaggtattgaggtattgacacggatgcctacacctaggtttatttattaaaagcgcttttttacattccttgcaatactgatggtgatgatgcgcaggtctcattggtttcattcttgcagttgccatacagtgcctttccatttatttaacccccacctgaacggcataaactgagtgttcagctggtgttttttactgtaaacaataaggagactttgctcttcatttaaaccaaaatcatatttcatattttacgctcgagggtttttaccggttcctttttacactccttaaaacagtttttaagtcgtttggaacaagatattttttctttcctggcagcttttaacattatagcaaatttgtgtctgggggactgctggtcactgtttctcacagttgcaaatcaaggcatttgcaaccaa

SEQ ID NO: 124722 - DNA, 1559 bp, Homo sapiens
  Payload ID: 4490
  Gene Symbol: CPEB1
  Gene Name: cytoplasmic polyadenylation element binding protein 1
  ENST ID: ENST00000632883
  CDS Start-End: 187-603
ctgatcacatgctggcccagtctgtaatgcagacgggataggggtgtgtgtgtgaggggagggggcctgtatggcaactgctcttgccccagcgtccccaaaagtgcagaggcagcggctgcagcatccagccagcttggatgtctggcctacttccaggactctgaagaaacagttacaagcaggatgcttttcccaacctctgcgcaagaatcttcccgtggcctcccagatgcaaatgacttgtgccttggcctgcagtccctcagtctgacaggctgggaccgaccctggagcacccaggactcagattcctcagcccagagcagcacacactcggtcaagccttcgcatttctccacctctgcccttcctgtctctgtcagggggtggtcccagagaccctttaaagatgggggtagggtctcggatggaccaagagcaagctgctcttgctgcagtcactccctccccaaccagtgcttcaaagagatggccaggagcttctgtgtggccgtcctgggacctcctcgaagctcccaaagaccccttcagcatagagagagaggccaggctgcaccgacaagctgcagctgtgaatgaagccacctgtacctggagtggccagcttcctccccggaactataagaaccccatctactcttgcaaggtgtttctaggaggtgttccttgggatattacagaagctggattagttaacaccttccgtgtttttggctctttgagtgtggagtggcctggtaaggatggcaagcatccccggtgtcctcccaaagggtatgtgtatctggtcttcgaactagagaagtctgtccgatccttgcttcaggcttgctctcatgacccgctgagcccagatggcctgagtgaatattatttcaagatgtccagccgaaggatgcgctgcaaggaggtgcaggtgatcccctgggtattagccgacagtaactttgtccggagcccatctcagaggcttgaccccagcaggacggtgtttgtcggtgctctgcatggaatgctaaatgctgaggccctggcagccatcttgaacgacctatttggtggagtggtgtatgccgggattgacacagataagcacaagtatcccattggttctggtcgtgtgactttcaataaccaacggagttacctgaaagcagtcagcgctgcttttgtggagatcaaaaccaccaagttcacaaagaaggttcagattgacccctacctagaagattctctgtgtcatatctgcagttctcagcctggtcctttcttctgtcgagatcaggtctgcttcaaatacttctgccggagctgctggcactggcggcacagcatggagggcctgcgccaccacagccccctgatgcggaaccagaagaaccgagattccagctagaggagctggccttgcccagtggcctgtggcgcccaaagctggcaggtcaggcaagcagcctgcaccaccctgccactggcgaccagggagctggcttcccaaggacaagggaaaattgtagtcacctttgcacttgctg

SEQ ID NO: 124723 - DNA, 1953 bp, Homo sapiens
  Payload ID: 4490
  Gene Symbol: CPEB1
  Gene Name: cytoplasmic polyadenylation element binding protein 1
  Uniprot ID: Q9BZB8
  ENST ID: ENST00000631674
  CDS Start-End: 211-1671
gaagaagaagcaggaaggataaaagattgctgggacaaccaggaagcacctgctctctccacgtgtagtaatgccaatatctttcgaaggataaatgccatattggataattctctggatttcagtagagtctgcactacacctataaaccgaggaattcatgatcatttgccagacttccaggactctgaagaaacagttacaagcaggatgcttttcccaacctctgcgcaagaatcttcccgtggcctcccagatgcaaatgacttgtgccttggcctgcagtccctcagtctgacaggctgggaccgaccctggagcacccaggactcagattcctcagcccagagcagcacacactcggtactgagcatgctccataacccactgggaaatgtcctaggaaaaccccccttgagcttcctgcctctggatccccttgggtctgacttggtggacaagtttccagcaccctcagttagaggatcacgcctggacacccggcccatcctggactctcgatctagcagcccctctgactcagacaccagtggcttcagctctggatcagatcatctctcagatttgatttcaagccttcgcatttctccacctctgcccttcctgtctctgtcagggggtggtcccagagaccctttaaagatgggggtagggtctcggatggaccaagagcaagctgctcttgctgcagtcactccctccccaaccagtgcttcaaagagatggccaggagcttctgtgtggccgtcctgggacctcctcgaagctcccaaagaccccttcagcatagagagagaggccaggctgcaccgacaagctgcagctgtgaatgaagccacctgtacctggagtggccagcttcctccccggaactataagaaccccatctactcttgcaaggtgtttctaggaggtgttccttgggatattacagaagctggattagttaacaccttccgtgtttttggctctttgagtgtggagtggcctggtaaggatggcaagcatccccggtgtcctcccaaagggtatgtgtatctggtcttcgaactagagaagtctgtccgatccttgcttcaggcttgctctcatgacccgctgagcccagatggcctgagtgaatattatttcaagatgtccagccgaaggatgcgctgcaaggaggtgcaggtgatcccctgggtattagccgacagtaactttgtccggagcccatctcagaggcttgaccccagcaggacggtgtttgtcggtgctctgcatggaatgctaaatgctgaggccctggcagccatcttgaacgacctatttggtggagtggtgtatgccgggattgacacagataagcacaagtatcccattggttctggtcgtgtgactttcaataaccaacggagttacctgaaagcagtcagcgctgcttttgtggagatcaaaaccaccaagttcacaaagaaggttcagattgacccctacctagaagattctctgtgtcatatctgcagttctcagcctggtcctttcttctgtcgagatcaggtctgcttcaaatacttctgccggagctgctggcactggcggcacagcatggagggcctgcgccaccacagccccctgatgcggaaccagaagaaccgagattccagctagaggagctggccttgcccagtggcctgtggcgcccaaagctggcaggtcaggcaagcagcctgcaccaccctgccactggcgaccagggagctggcttcccaaggacaagggaaaattgtagtcacctttgcacttgctgaatctgtctttgtttctgcactaattaatgcacattgagttttgtcaggttttgttttcagggggtgtaccaagggcaaggaccctctggcttaccctccaagcgactctgtagttttcccagattttagttcctcattttgc

SEQ ID NO: 124724 - DNA, 1990 bp, Homo sapiens
  Payload ID: 4490
  Gene Symbol: CPEB1
  Gene Name: cytoplasmic polyadenylation element binding protein 1
  ENST ID: ENST00000632305
  CDS Start-End: 1-1671
gaagaagaagcaggaaggataaaagattgctgggacaaccaggaagcacctgctctctccacgtgtagtaatgccaatatctttcgaaggataaatgccatattggataattctctggatttcagtagagtctgcactacacctataaaccgaggaattcatgatcatttgccagacttccaggactctgaagaaacagttacaagcaggatgcttttcccaacctctgcgcaagaatcttcccgtggcctcccagatgcaaatgacttgtgccttggcctgcagtccctcagtctgacaggctgggaccgaccctggagcacccaggactcagattcctcagcccagagcagcacacactcggtactgagcatgctccataacccactgggaaatgtcctaggaaaaccccccttgagcttcctgcctctggatccccttgggtctgacttggtggacaagtttccagcaccctcagttagaggatcacgcctggacacccggcccatcctggactctcgatctagcagcccctctgactcagacaccagtggcttcagctctggatcagatcatctctcagatttgatttcaagccttcgcatttctccacctctgcccttcctgtctctgtcagggggtggtcccagagaccctttaaagatgggggtagggtctcggatggaccaagagcaagctgctcttgctgcagtcactccctccccaaccagtgcttcaaagagatggccaggagcttctgtgtggccgtcctgggacctcctcgaagctcccaaagaccccttcagcatagagagagaggccaggctgcaccgacaagctgcagctgtgaatgaagccacctgtacctggagtggccagcttcctccccggaactataagaaccccatctactcttgcaaggtgtttctaggaggtgttccttgggatattacagaagctggattagttaacaccttccgtgtttttggctctttgagtgtggagtggcctggtaaggatggcaagcatccccggtgtcctcccaaagggtatgtgtatctggtcttcgaactagagaagtctgtccgatccttgcttcaggcttgctctcatgacccgctgagcccagatggcctgagtgaatattatttcaagatgtccagccgaaggatgcgctgcaaggaggtgcaggtgatcccctgggtattagccgacagtaactttgtccggagcccatctcagaggcttgaccccagcaggacggtgtttgtcggtgctctgcatggaatgctaaatgctgaggccctggcagccatcttgaacgacctatttggtggagtggtgtatgccgggattgacacagataagcacaagtatcccattggttctggtcgtgtgactttcaataaccaacggagttacctgaaagcagtcagcgctgcttttgtggagatcaaaaccaccaagttcacaaagaaggttcagattgacccctacctagaagattctctgtgtcatatctgcagttctcagcctggtcctttcttctgtcgagatcaggtctgcttcaaatacttctgccggagctgctggcactggcggcacagcatggagggcctgcgccaccacagccccctgatgcggaaccagaagaaccgagattccagctagaggagctggccttgcccagtggcctgtggcgcccaaagctggcaggtcaggcaagcagcctgcaccaccctgccactggcgaccagggagctggcttcccaaggacaagggaaaattgtagtcacctttgcacttgctgaatctgtctttgtttctgcactaattaatgcacattgagttttgtcaggttttgttttcagggggtgtaccaagggcaaggaccctctggcttaccctccaagcgactctgtagttttcccagattttagttcctcattttgcagatgaaaagcggggaaaaaaaaaaaaaaaaaaaaaa

SEQ ID NO: 124725 - DNA, 425 bp, Homo sapiens
  Payload ID: 4490
  Gene Symbol: CPEB1
  Gene Name: cytoplasmic polyadenylation element binding protein 1
  ENST ID: ENST00000633271
  CDS Start-End: 319-425
gcattcgtgatgagttcccctgaggtaacaggagaatccccagagggcaggtctaaagcattgccaagtaattcttcctgttgactcctgattttcggtagtattaaggaagaagaagcaggaaggataaaagattgctgggacaaccaggaagcacctgctctctccacgtgtagtaatgccaatatctttcgaaggataaatgccatattggataattctctggatttcagtagagtctgcactacacctataaaccgaggaattcatgatcatttgccagacttccaggactctgaagaaacagttacaagcaggatgcttttcccaacctctgcgcaagaatcttcccgtggcctcccagatgcaaatgacttgtgccttggcctgcagtccctcagtctgacaggctgggaccgaccctg

SEQ ID NO: 124726 - DNA, 554 bp, Homo sapiens; identical to SEQ ID NO: 124701
  Payload ID: 4490
  Gene Symbol: CPEB1
  Gene Name: cytoplasmic polyadenylation element binding protein 1
  ENST ID: ENST00000634018
  CDS Start-End: 213-554

SEQ ID NO: 124727 - DNA, 2009 bp, Homo sapiens
  Payload ID: 4490
  Gene Symbol: CPEB1
  Gene Name: cytoplasmic polyadenylation element binding protein 1
  ENST ID: ENST00000633293
  CDS Start-End: 18-1712
attttcccttctaggctatgcctgagtgcctgtggacacagggtgtactgcaggaagttctgaacagctatttctgtggcagcattattctctcgaccctgccatgggaggtcccaggtgggcatgcttcccgtatctgcttgcttctccttgcaacaggggagaacaagcaggtggagtgctaccagctgagtccaggtttgagcagcctgcctgacttccaggactctgaagaaacagttacaagcaggatgcttttcccaacctctgcgcaagaatcttcccgtggcctcccagatgcaaatgacttgtgccttggcctgcagtccctcagtctgacaggctgggaccgaccctggagcacccaggactcagattcctcagcccagagcagcacacactcggtactgagcatgctccataacccactgggaaatgtcctaggaaaaccccccttgagcttcctgcctctggatccccttgggtctgacttggtggacaagtttccagcaccctcagttagaggatcacgcctggacacccggcccatcctggactctcgatctagcagcccctctgactcagacaccagtggcttcagctctggatcagatcatctctcagatttgatttcaagccttcgcatttctccacctctgcccttcctgtctctgtcagggggtggtcccagagaccctttaaagatgggggtagggtctcggatggaccaagagcaagctgctcttgctgcagtcactccctccccaaccagtgcttcaaagagatggccaggagcttctgtgtggccgtcctgggacctcctcgaagctcccaaagaccccttcagcatagagagagaggccaggctgcaccgacaagctgcagctgtgaatgaagccacctgtacctggagtggccagcttcctccccggaactataagaaccccatctactcttgcaaggtgtttctaggaggtgttccttgggatattacagaagctggattagttaacaccttccgtgtttttggctctttgagtgtggagtggcctggtaaggatggcaagcatccccggtgtcctcccaaagggtatgtgtatctggtcttcgaactagagaagtctgtccgatccttgcttcaggcttgctctcatgacccgctgagcccagatggcctgagtgaatattatttcaagatgtccagccgaaggatgcgctgcaaggaggtgcaggtgatcccctgggtattagccgacagtaactttgtccggagcccatctcagaggcttgaccccagcaggacggtgtttgtcggtgctctgcatggaatgctaaatgctgaggccctggcagccatcttgaacgacctatttggtggagtggtgtatgccgggattgacacagataagcacaagtatcccattggttctggtcgtgtgactttcaataaccaacggagttacctgaaagcagtcagcgctgcttttgtggagatcaaaaccaccaagttcacaaagaaggttcagattgacccctacctagaagattctctgtgtcatatctgcagttctcagcctggtcctttcttctgtcgagatcaggtctgcttcaaatacttctgccggagctgctggcactggcggcacagcatggagggcctgcgccaccacagccccctgatgcggaaccagaagaaccgagattccagctagaggagctggccttgcccagtggcctgtggcgcccaaagctggcaggtcaggcaagcagcctgcaccaccctgccactggcgaccagggagctggcttcccaaggacaagggaaaattgtagtcacctttgcacttgctgaatctgtctttgtttctgcactaattaatgcacattgagttttgtcaggttttgttttcagggggtgtaccaagggcaaggaccctctggcttaccctccaagcgactctgtagttttcccagattttagttcctcattttgcagatgaaaagcgggg

SEQ ID NO: 124728 - DNA, 5612 bp, Homo sapiens; identical to SEQ ID NO: 122574
  Payload ID: 4491
  Gene Symbol: CPEB2
  Gene Name: cytoplasmic polyadenylation element binding protein 2
  ENST ID: ENST00000259997
  CDS Start-End: 50-1843

SEQ ID NO: 124729 - DNA, 2013 bp, Homo sapiens; identical to SEQ ID NO: 122569
  Payload ID: 4491
  Gene Symbol: CPEB2
  Gene Name: cytoplasmic polyadenylation element binding protein 2
  Uniprot ID: Q7Z5Q1
  ENST ID: ENST00000345451
  CDS Start-End: 88-1767

SEQ ID NO: 124730 - DNA, 5524 bp, Homo sapiens; identical to SEQ ID NO: 122572
  Payload ID: 4491
  Gene Symbol: CPEB2
  Gene Name: cytoplasmic polyadenylation element binding protein 2
  Uniprot ID: Q7Z5Q1
  ENST ID: ENST00000382395
  CDS Start-End: 50-1753

SEQ ID NO: 124731 - DNA, 5509 bp, Homo sapiens; identical to SEQ ID NO: 122571
  Payload ID: 4491
  Gene Symbol: CPEB2
  Gene Name: cytoplasmic polyadenylation element binding protein 2
  Uniprot ID: Q7Z5Q1
  ENST ID: ENST00000382401
  CDS Start-End: 50-1738

SEQ ID NO: 124732 - DNA, 6797 bp, Homo sapiens; identical to SEQ ID NO: 122570
  Payload ID: 4491
  Gene Symbol: CPEB2
  Gene Name: cytoplasmic polyadenylation element binding protein 2
  Uniprot ID: Q7Z5Q1
  ENST ID: ENST00000442003
  CDS Start-End: 1-3024

SEQ ID NO: 124733 - DNA, 635 bp, Homo sapiens; identical to SEQ ID NO: 122568
  Payload ID: 4491
  Gene Symbol: CPEB2
  Gene Name: cytoplasmic polyadenylation element binding protein 2
  ENST ID: ENST00000509684
  CDS Start-End: 1-504

SEQ ID NO: 124734 - DNA, 2103 bp, Homo sapiens; identical to SEQ ID NO: 122567
  Payload ID: 4491
  Gene Symbol: CPEB2
  Gene Name: cytoplasmic polyadenylation element binding protein 2
  Uniprot ID: Q7Z5Q1
  ENST ID: ENST00000507071
  CDS Start-End: 88-1857

SEQ ID NO: 124735 - DNA, 6878 bp, Homo sapiens; identical to SEQ ID NO: 122573
  Payload ID: 4491
  Gene Symbol: CPEB2
  Gene Name: cytoplasmic polyadenylation element binding protein 2
  Uniprot ID: Q7Z5Q1
  ENST ID: ENST00000538197
  CDS Start-End: 1-3105

SEQ ID NO: 124736 - DNA, 4851 bp, Homo sapiens
  Payload ID: 4492
  Gene Symbol: CPEB3
  Gene Name: cytoplasmic polyadenylation element binding protein 3
  Uniprot ID: Q8NE35
  ENST ID: ENST00000265997
  CDS Start-End: 174-2270
gtctccactagaggctgcacagcccgcccggaccaacgcctccgcgcctgccgccgtctggccggcgccctcccgtttccttcctccagggggaaaaaatgtctttcgggccgctttccaggaagcagcaggatgcgccgctccactgtcggtagcaacaagctgcgcaaaccatgcaggatgatttactgatggacaaaagcaaaacccagccccagccccagcagcagcagcggcagcagcagcagccccaacctgagtccagcgtatccgaagccccgtccacgcccctctcctcagagacccccaagccggaggaaaacagcgcagtgccggccctcagcccagccgctgcccccccggcccccaacggcccggacaagatgcagatggaatcaccgctcctgccaggcttgagtttccatcagcctcctcagcagccgccgccgcctcaggagcccgcggcaccgggcgcgtcgctgtcgccgtccttcggcagcacctggtccacgggcaccaccaacgcggtagaggacagcttcttccaggggatcaccccagtcaacgggaccatgctcttccagaacttcccgcaccatgtcaacccagtcttcggaggcactttctccccgcagatcggcctggcgcagacccagcaccaccagcagccgccgccgcctgcgcccgcgccgcagccggcacagccagcgcagccaccacaggcgcagcccccgcagcagcgccgctcacccgccagccccagccaggcgccctacgcgcagaggagcgccgccgcggcgtacggccaccagcccatcatgaccagcaagccgtcctcgtcttcggcggttgcagccgctgctgccgcagccgccgcctcgtcggcctcgtccagctggaacacgcaccaaagcgtgaatgcagcctggagcgcaccgtccaacccctggggcggcctgcaggcgggccgggaccctcgccgggcggtcggtgtgggcgtgggtgtgggtgtcggggtgccttccccgctcaaccccatctcgccgctcaaaaagcccttctccagcaacgtgatcgcgccgcccaagttccctcgcgcggcccctctcacttccaagtcctggatggaggataacgctttccggaccgataatggtaacaatctgttgccatttcaggaccggagtaggccctatgatacttttaacttgcactcgttggagaactccttaatggatatgataaggactgatcatgaacctctgaaaggtaaacactaccctcccagtggcccaccaatgagtttcgctgatataatgtggaggaatcattttgcaggacgcatggggataaatttccatcatccaggaacagataatattatggcacttaacaatgccttcctggatgatagccatggtgatcaagccttgtcatctggcttaagttctcccactcgctgtcaaaatggggaacgagtagaacgctactctagaaaggtgtttgttggaggacttcctcctgatattgatgaagatgagatcactgccagctttcgcaggtttggacctctcgtagtagactggcctcacaaagctgaaagcaagtcttattttcctcctaaaggctatgcctttctgctgttccaagaggaaagctcagtacaagctttgatagatgcctgcctagaagaagatgggaaactctacctgtgtgtgtcaagccccaccatcaaggacaagccagtgcaaattcgaccatggaacctaagtgacagtgactttgtaatggatggttctcagcctttggaccccagaaaaactatctttgttgggggagttccacgaccccttcgagctgttgaactggcaatgatcatggaccgtttgtacggtggtgtctgctatgctggcattgatacggacccagagctgaagtaccccaaaggtgctggccgcgtggcattctccaatcagcagagttacattgcagccatcagcgctcgttttgtgcagcttcagcacaatgacattgacaaacgggttgaagtaaagccatatgtgctggatgatcagatgtgtgatgagtgccagggcacacgctgtggtgggaagtttgccccgttcttctgtgccaacgtcacctgtctgcagtattactgtgaatactgctgggcgagcatacattcccgagccgggcgggagttccacaaaccgctggtgaaggagggaggcgaccgccctcgtcacgtcccgttccgctggagctgagccacgggccgacccagccacaagtactggagtagataacaaggagggaaaagagagggcactgcctcagggcttacagtgttctggaaatctgtgcattcgttctcgatttttaaagaagaattgggtctttttattattattattattatttacagtcatattactgaactcagtgtccagtataatgcagaattgcagagtgtagaatggtactgatttgcactttgattcacacctttgtctgcttggtaccttaattttttatacctgatttgtcactcgtgacagtatgtagactgccattctcatcagcggccgtcaggctactgtctgtgattcttttgtttgttgttgtggtgttgttctgattgttttgaactggagcatgcacttattttcagaaacttagagagttgcccctaggacaagacttaccaaaggtaatactcgtgagtaggtggcagatgtagcaaaaacttcacaacaattcagcaatcattagctcgggtcacttagagtaaggataacccttcatgaaaataagcctttagttgctctctattttgacttgtaaggatacctcataagctggatcttttatttttccttcatgtttgatttttgttttgccgaggattttggttagatcttttagtattatgtaaatttatgctgcaatagcttttgctgctattaaaatggtattattaataccataatactctattcaggctaggatatcaattaaacacaaaaacccaacaacacacttttgtgattttagggatagagtcagctgccgaacggagatcagaatagacttcagaaagcttcggtggaaggtcactatttctgactgcatgtttacttaatcaggttgctgcatgcaataaattttatatccaatgtctagtataaaacgttcccacaatgcacaaattaagaatctatataagctataaaaatactcattttttaaaaaaagtttttttcattcaaagaattggtaattgaccggaggaaggcatgcctcaataaatggaatgctctgaatgggaagagcccataacagaatgacctatattacaaccgatataaaacctaggtgtaggatattcttcaagcaaatttgtggatggtagatgaagtactttgcggtgctctgttatatattgtgaaatttattttatatagtaaagtgattatgtctaactgtgatcaaacttaactgtttaaagcctctgtcagacattaatgaacttgacagttcataactgatatattataaactaacacatgagctcttagttacaatctcttagtgcttgcaccattttacatagcttcagaccttgtccagaaaaccaaagagctcatcttagcttacaaacactaagaatatatacaggatatagagataagttgtcagattgacaaactaggcacatttttaagaaagttgtgtaatggtgatgctaaagaaatgtctgtacaaaataagatggcctgggcagagttggttgtctgagtgagaaactaactacttaattccctggatttatcctgttaagcttgagtagaatgaaggcctgctagcactagcgtggtctagaatgaaggcctgctagcactagcgtggacatttttctagcattcacccttgggctgcagatagtaatatataaacacacacaatgattgcaagactatgtaaatctttttttaatcttcttcctatgttttggaattctggggacaatctgactggatatgacactgcagaatagatttaagtcgctgtgttttctgtgctgtgatgtccttgtactgtcttaagttagtgttgcttgtttttgttttgttctcccatgtttagttgcaattactggctctcaagctatagtttgttttcaaaaaggaaaaacaaaatagttttttactggattaaaaatgcttattttagaatcctcccctttttgaggctttttggtaataattgcttttttccagcccaggtgtggttttgtttgtttttttctatgtttgtgggttttttttcatctgtacaagaaattttgttatgcactactactttttgtattctagacagttttcaaaagttggcagatttttttttttgtttttaaggaaaaaggcatgctttctgactgacatgatcttttgcaatacctcaattttgaaatataggaaagaaaatgatattttctaagtaagtttattcagaaaaatatatattaatttaattctgcaagaaaatgatttaacagatgggtaactttatttttttcatgcttatttgtgttttttgaaaatgaagaagttagagctttataactataatattaaagatcatatctaacctacagaaatctacctaattatgtgaaagaagcaaaactttttgaagaagcacccctctttcatgtattaaaataacactgagatttttttaaaagctggaagattgtacagcataaagctaaagtgaaggcaaaaaacattgtcctgaagaataggttacaaaaaataaactccatttggtgctgaaagttgtgaa

SEQ ID NO: 124737 - DNA, 7664 bp, Homo sapiens
  Payload ID: 4492
  Gene Symbol: CPEB3
  Gene Name: cytoplasmic polyadenylation element binding protein 3
  Uniprot ID: Q8NE35
  ENST ID: ENST00000412050
  CDS Start-End: 90-2144
cataatcaacctgaaagaagaaaataaatactgtatacttttaaattttatcgattcttaaaaactggacactcaaagctgcgcaaaccatgcaggatgatttactgatggacaaaagcaaaacccagccccagccccagcagcagcagcggcagcagcagcagccccaacctgagtccagcgtatccgaagccccgtccacgcccctctcctcagagacccccaagccggaggaaaacagcgcagtgccggccctcagcccagccgctgcccccccggcccccaacggcccggacaagatgcagatggaatcaccgctcctgccaggcttgagtttccatcagcctcctcagcagccgccgccgcctcaggagcccgcggcaccgggcgcgtcgctgtcgccgtccttcggcagcacctggtccacgggcaccaccaacgcggtagaggacagcttcttccaggggatcaccccagtcaacgggaccatgctcttccagaacttcccgcaccatgtcaacccagtcttcggaggcactttctccccgcagatcggcctggcgcagacccagcaccaccagcagccgccgccgcctgcgcccgcgccgcagccggcacagccagcgcagccaccacaggcgcagcccccgcagcagcgccgctcacccgccagccccagccaggcgccctacgcgcagaggagcgccgccgcggcgtacggccaccagcccatcatgaccagcaagccgtcctcgtcttcggcggttgcagccgctgctgccgcagccgccgcctcgtcggcctcgtccagctggaacacgcaccaaagcgtgaatgcagcctggagcgcaccgtccaacccctggggcggcctgcaggcgggccgggaccctcgccgggcggtcggtgtgggcgtgggtgtgggtgtcggggtgccttccccgctcaaccccatctcgccgctcaaaaagcccttctccagcaacgtgatcgcgccgcccaagttccctcgcgcggcccctctcacttccaagtcctggatggaggataacgctttccggaccgataatggtaacaatctgttgccatttcaggaccggagtaggccctatgatacttttaacttgcactcgttggagaactccttaatggatatgataaggactgatcatgaacctctgaaaggacgcatggggataaatttccatcatccaggaacagataatattatggcacttaacagtcgatcttctctctttccctttgaagatgccttcctggatgatagccatggtgatcaagccttgtcatctggcttaagttctcccactcgctgtcaaaatggggaacgagtagaacgctactctagaaaggtgtttgttggaggacttcctcctgatattgatgaagatgagatcactgccagctttcgcaggtttggacctctcgtagtagactggcctcacaaagctgaaagcaagtcttattttcctcctaaaggctatgcctttctgctgttccaagaggaaagctcagtacaagctttgatagatgcctgcctagaagaagatgggaaactctacctgtgtgtgtcaagccccaccatcaaggacaagccagtgcaaattcgaccatggaacctaagtgacagtgactttgtaatggatggttctcagcctttggaccccagaaaaactatctttgttgggggagttccacgaccccttcgagctgttgaactggcaatgatcatggaccgtttgtacggtggtgtctgctatgctggcattgatacggacccagagctgaagtaccccaaaggtgctggccgcgtggcattctccaatcagcagagttacattgcagccatcagcgctcgttttgtgcagcttcagcacaatgacattgacaaacgggttgaagtaaagccatatgtgctggatgatcagatgtgtgatgagtgccagggcacacgctgtggtgggaagtttgccccgttcttctgtgccaacgtcacctgtctgcagtattactgtgaatactgctgggcgagcatacattcccgagccgggcgggagttccacaaaccgctggtgaaggagggaggcgaccgccctcgtcacgtcccgttccgctggagctgagccacgggccgacccagccacaagtactggagtagataacaaggagggaaaagagagggcactgcctcagggcttacagtgttctggaaatctgtgcattcgttctcgatttttaaagaagaattgggtctttttattattattattattatttacagtcatattactgaactcagtgtccagtataatgcagaattgcagagtgtagaatggtactgatttgcactttgattcacacctttgtctgcttggtaccttaattttttatacctgatttgtcactcgtgacagtatgtagactgccattctcatcagcggccgtcaggctactgtctgtgattcttttgtttgttgttgtggtgttgttctgattgttttgaactggagcatgcacttattttcagaaacttagagagttgcccctaggacaagacttaccaaaggtaatactcgtgagtaggtggcagatgtagcaaaaacttcacaacaattcagcaatcattagctcgggtcacttagagtaaggataacccttcatgaaaataagcctttagttgctctctattttgacttgtaaggatacctcataagctggatcttttatttttccttcatgtttgatttttgttttgccgaggattttggttagatcttttagtattatgtaaatttatgctgcaatagcttttgctgctattaaaatggtattattaataccataatactctattcaggctaggatatcaattaaacacaaaaacccaacaacacacttttgtgattttagggatagagtcagctgccgaacggagatcagaatagacttcagaaagcttcggtggaaggtcactatttctgactgcatgtttacttaatcaggttgctgcatgcaataaattttatatccaatgtctagtataaaacgttcccacaatgcacaaattaagaatctatataagctataaaaatactcattttttaaaaaaagtttttttcattcaaagaattggtaattgaccggaggaaggcatgcctcaataaatggaatgctctgaatgggaagagcccataacagaatgacctatattacaaccgatataaaacctaggtgtaggatattcttcaagcaaatttgtggatggtagatgaagtactttgcggtgctctgttatatattgtgaaatttattttatatagtaaagtgattatgtctaactgtgatcaaacttaactgtttaaagcctctgtcagacattaatgaacttgacagttcataactgatatattataaactaacacatgagctcttagttacaatctcttagtgcttgcaccattttacatagcttcagaccttgtccagaaaaccaaagagctcatcttagcttacaaacactaagaatatatacaggatatagagataagttgtcagattgacaaactaggcacatttttaagaaagttgtgtaatggtgatgctaaagaaatgtctgtacaaaataagatggcctgggcagagttggttgtctgagtgagaaactaactacttaattccctggatttatcctgttaagcttgagtagaatgaaggcctgctagcactagcgtggtctagaatgaaggcctgctagcactagcgtggacatttttctagcattcacccttgggctgcagatagtaatatataaacacacacaatgattgcaagactatgtaaatctttttttaatcttcttcctatgttttggaattctggggacaatctgactggatatgacactgcagaatagatttaagtcgctgtgttttctgtgctgtgatgtccttgtactgtcttaagttagtgttgcttgtttttgttttgttctcccatgtttagttgcaattactggctctcaagctatagtttgttttcaaaaaggaaaaacaaaatagttttttactggattaaaaatgcttattttagaatcctcccctttttgaggctttttggtaataattgcttttttccagcccaggtgtggttttgtttgtttttttctatgtttgtgggttttttttcatctgtacaagaaattttgttatgcactactactttttgtattctagacagttttcaaaagttggcagatttttttttttgtttttaaggaaaaaggcatgctttctgactgacatgatcttttgcaatacctcaattttgaaatataggaaagaaaatgatattttctaagtaagtttattcagaaaaatatatattaatttaattctgcaagaaaatgatttaacagatgggtaactttatttttttcatgcttatttgtgttttttgaaaatgaagaagttagagctttataactataatattaaagatcatatctaacctacagaaatctacctaattatgtgaaagaagcaaaactttttgaagaagcacccctctttcatgtattaaaataacactgagatttttttaaaagctggaagattgtacagcataaagctaaagtgaaggcaaaaaacattgtcctgaagaataggttacaaaaaataaactccatttggtgctgaaagttgtgaatagatggtggaaactactttcccttaatttgtatatttctaatcaagtgttgattgtgcgcgactgaccaggattgtgaaagagttcttctgtttgtatttttttaaagagaacttttttagtttattaaattataacatgttcccttttgttttgtaaataaatgtgcccccaagttgttaatgttatattaaaagagagggtccttcaaaaaaattattttttaaaacacagaggtgttctgacctgcaacttgactgggaagcccctgggtaacacaggtcctgctgtggcctttccttggtgtgacacttgaactagtcgattttttgaaggctataacctaacctcgactatttgttgttatgtgcaatactgtttgtactgtttgtataaaaaatagaaaaaaaaaagaaaagaaaaaaggcataaatctttattgcagatttattttcattgcaaactttagacattgtgattcactgaaatcatttttctactgtcaaatatgtaccttttcttcatgctggtattttttcaatagtaatgtagcctttgtactgagacaaattttcattgttatttttagaaagattttttgctaagaaaaaaattaaacatatttacatatttttcattttatttcgtattttctttaaggagtgctttctcaatcattaatagagttgtttctgggagggactttcatatctggtcaatgtcataatattattttgtatttttattggaataaattaattttatgatgctaattctttaaaagtttatttttttcattttcagttatttttgaagctaaaacctttgtaatattgttactaaagtgtctagttttttgaaatgcaaagctttatgtattaacttgctgatgtggtttacaatagtgtgacaacgatgaaaatgcttggttatgtaaagtgattggaaatgtaatggataattgggtaataaaatgacagaatgagcagaacatgtgagattttgagaagccttttcctttatcacagtggtttagtgtaagactagggatgtcacagtgcagttctctagggatgtcacggtggatttatacaacaccaggtgcagccaaacctgtggccctgagaatgaagtcacccaaccgaagtaccactgggtttaaaatctggctaagtcaacagaatgtttcattgctttttcccctctaactcgtcattatgtcgtgtgtgtgtgtgtgtgtgtgagagagagagagagagagagagagaaaaactgccaccaactgctgtccttgtgtgagacagtgcctttctcccaggccgaatcttttatgtgcactgacagtggtgatatcggagtcatacaggaagttgctaagaggacacggctttcgtggtgtactgcagacctcacctgcagggtctcactcatgctgcctccctgtaaggctcagttggtggcactgaggaagcacactcggatgtcaccactgtctgtggaccctgactatgtgtcgggttgcatcttcctccacacccatgcctgcttcctgttctggtgccccttgcctttcattgtggcaactgcgtgcatgatctgtctgcctttctgctgctgcttttccaacaccctcctcacctggaagctgggcagttaaggcacagtcattaatgtgtcattgcaatagcacctacagtcaaagcaaaaactacaactgcaaaactggtgttgcgtaaacagaacagccaatgacttgatccagatagatgatatgtttctactagtggttgatggcctctttcagctccatcgctatggaggcgaggttcatcaataactcagagaaacttgtgtccagagttggtcttgggtatgctctatgtattcagttttgtaaataatatatagattagatcaagttgtgatgtaaaattttaactcaaattgggtactactggttggaattttacattaactacaaataaatgattaggaacagaagaaaagtggaaaattcttgcttagtggtataaagattatgcttagatttctgcctatatcttgtgttttatagcttgttagtgaggcatgggctaatgcagaatgtactgcatttatgcaattagcaaataactgctagttttcattttatctattatattagcaacaaaaatggcatttaactgggtaaagctcctacctaaatatttgagtattgtgacatctctacttgcaaggtttgagtgaaagattagtcacagattagtgaaaaaaatgtatctttttgttaaaactggcttatttgaatggattgttgcttttcactagcttgtatggtatgtcagctaacatttgtttttttttttcttttataataaccaaacttctctatctcagctgcaatagtgttccatcttaccacagagtgttttataattaatgctgttgactttataccccaaaatgggtcaagaagtggctacatgattaggggatgtttaaatttgtatgacgacaaagttaattgcaacaagtagaaaacttgggtgctaacacaggataacttctgctctttttctttcctggatatagttctgttggggtataaagtattaggtatttgtattttttgctgtcaaaataatggacttaacttttagagtgttcacagctaggatctctgtatttgtttttcaactaacaactaattttaaatgtattgtatcttttattacctgttctcttagattgttttttgctagtaacccttactcagcttctgcctttggggcttggactaatattgcttgtatggaactacagtactgtgactaaacatggagctcaatgcagctactgcttacaactgcttaaactttgtagtttggacttcatttttttctgtaataacaacttattaaatctagttgtatgaagta

SEQ ID NO: 124738 - DNA, 5789 bp, Homo sapiens
  Payload ID: 4492
  Gene Symbol: CPEB3
  Gene Name: cytoplasmic polyadenylation element binding protein 3
  Uniprot ID: Q8NE35
  ENST ID: ENST00000614585
  CDS Start-End: 123-2219
acagttgtcaaagtgcttttgccagagcggtcacataatcaacctgaaagaagaaaataaatactgtatacttttaaattttatcgattcttaaaaactggacactcaaagctgcgcaaaccatgcaggatgatttactgatggacaaaagcaaaacccagccccagccccagcagcagcagcggcagcagcagcagccccaacctgagtccagcgtatccgaagccccgtccacgcccctctcctcagagacccccaagccggaggaaaacagcgcagtgccggccctcagcccagccgctgcccccccggcccccaacggcccggacaagatgcagatggaatcaccgctcctgccaggcttgagtttccatcagcctcctcagcagccgccgccgcctcaggagcccgcggcaccgggcgcgtcgctgtcgccgtccttcggcagcacctggtccacgggcaccaccaacgcggtagaggacagcttcttccaggggatcaccccagtcaacgggaccatgctcttccagaacttcccgcaccatgtcaacccagtcttcggaggcactttctccccgcagatcggcctggcgcagacccagcaccaccagcagccgccgccgcctgcgcccgcgccgcagccggcacagccagcgcagccaccacaggcgcagcccccgcagcagcgccgctcacccgccagccccagccaggcgccctacgcgcagaggagcgccgccgcggcgtacggccaccagcccatcatgaccagcaagccgtcctcgtcttcggcggttgcagccgctgctgccgcagccgccgcctcgtcggcctcgtccagctggaacacgcaccaaagcgtgaatgcagcctggagcgcaccgtccaacccctggggcggcctgcaggcgggccgggaccctcgccgggcggtcggtgtgggcgtgggtgtgggtgtcggggtgccttccccgctcaaccccatctcgccgctcaaaaagcccttctccagcaacgtgatcgcgccgcccaagttccctcgcgcggcccctctcacttccaagtcctggatggaggataacgctttccggaccgataatggtaacaatctgttgccatttcaggaccggagtaggccctatgatacttttaacttgcactcgttggagaactccttaatggatatgataaggactgatcatgaacctctgaaaggtaaacactaccctcccagtggcccaccaatgagtttcgctgatataatgtggaggaatcattttgcaggacgcatggggataaatttccatcatccaggaacagataatattatggcacttaacaatgccttcctggatgatagccatggtgatcaagccttgtcatctggcttaagttctcccactcgctgtcaaaatggggaacgagtagaacgctactctagaaaggtgtttgttggaggacttcctcctgatattgatgaagatgagatcactgccagctttcgcaggtttggacctctcgtagtagactggcctcacaaagctgaaagcaagtcttattttcctcctaaaggctatgcctttctgctgttccaagaggaaagctcagtacaagctttgatagatgcctgcctagaagaagatgggaaactctacctgtgtgtgtcaagccccaccatcaaggacaagccagtgcaaattcgaccatggaacctaagtgacagtgactttgtaatggatggttctcagcctttggaccccagaaaaactatctttgttgggggagttccacgaccccttcgagctgttgaactggcaatgatcatggaccgtttgtacggtggtgtctgctatgctggcattgatacggacccagagctgaagtaccccaaaggtgctggccgcgtggcattctccaatcagcagagttacattgcagccatcagcgctcgttttgtgcagcttcagcacaatgacattgacaaacgggttgaagtaaagccatatgtgctggatgatcagatgtgtgatgagtgccagggcacacgctgtggtgggaagtttgccccgttcttctgtgccaacgtcacctgtctgcagtattactgtgaatactgctgggcgagcatacattcccgagccgggcgggagttccacaaaccgctggtgaaggagggaggcgaccgccctcgtcacgtcccgttccgctggagctgagccacgggccgacccagccacaagtactggagtagataacaaggagggaaaagagagggcactgcctcagggcttacagtgttctggaaatctgtgcattcgttctcgatttttaaagaagaattgggtctttttattattattattattatttacagtcatattactgaactcagtgtccagtataatgcagaattgcagagtgtagaatggtactgatttgcactttgattcacacctttgtctgcttggtaccttaattttttatacctgatttgtcactcgtgacagtatgtagactgccattctcatcagcggccgtcaggctactgtctgtgattcttttgtttgttgttgtggtgttgttctgattgttttgaactggagcatgcacttattttcagaaacttagagagttgcccctaggacaagacttaccaaaggtaatactcgtgagtaggtggcagatgtagcaaaaacttcacaacaattcagcaatcattagctcgggtcacttagagtaaggataacccttcatgaaaataagcctttagttgctctctattttgacttgtaaggatacctcataagctggatcttttatttttccttcatgtttgatttttgttttgccgaggattttggttagatcttttagtattatgtaaatttatgctgcaatagcttttgctgctattaaaatggtattattaataccataatactctattcaggctaggatatcaattaaacacaaaaacccaacaacacacttttgtgattttagggatagagtcagctgccgaacggagatcagaatagacttcagaaagcttcggtggaaggtcactatttctgactgcatgtttacttaatcaggttgctgcatgcaataaattttatatccaatgtctagtataaaacgttcccacaatgcacaaattaagaatctatataagctataaaaatactcattttttaaaaaaagtttttttcattcaaagaattggtaattgaccggaggaaggcatgcctcaataaatggaatgctctgaatgggaagagcccataacagaatgacctatattacaaccgatataaaacctaggtgtaggatattcttcaagcaaatttgtggatggtagatgaagtactttgcggtgctctgttatatattgtgaaatttattttatatagtaaagtgattatgtctaactgtgatcaaacttaactgtttaaagcctctgtcagacattaatgaacttgacagttcataactgatatattataaactaacacatgagctcttagttacaatctcttagtgcttgcaccattttacatagcttcagaccttgtccagaaaaccaaagagctcatcttagcttacaaacactaagaatatatacaggatatagagataagttgtcagattgacaaactaggcacatttttaagaaagttgtgtaatggtgatgctaaagaaatgtctgtacaaaataagatggcctgggcagagttggttgtctgagtgagaaactaactacttaattccctggatttatcctgttaagcttgagtagaatgaaggcctgctagcactagcgtggtctagaatgaaggcctgctagcactagcgtggacatttttctagcattcacccttgggctgcagatagtaatatataaacacacacaatgattgcaagactatgtaaatctttttttaatcttcttcctatgttttggaattctggggacaatctgactggatatgacactgcagaatagatttaagtcgctgtgttttctgtgctgtgatgtccttgtactgtcttaagttagtgttgcttgtttttgttttgttctcccatgtttagttgcaattactggctctcaagctatagtttgttttcaaaaaggaaaaacaaaatagttttttactggattaaaaatgcttattttagaatcctcccctttttgaggctttttggtaataattgcttttttccagcccaggtgtggttttgtttgtttttttctatgtttgtgggttttttttcatctgtacaagaaattttgttatgcactactactttttgtattctagacagttttcaaaagttggcagatttttttttttgtttttaaggaaaaaggcatgctttctgactgacatgatcttttgcaatacctcaattttgaaatataggaaagaaaatgatattttctaagtaagtttattcagaaaaatatatattaatttaattctgcaagaaaatgatttaacagatgggtaactttatttttttcatgcttatttgtgttttttgaaaatgaagaagttagagctttataactataatattaaagatcatatctaacctacagaaatctacctaattatgtgaaagaagcaaaactttttgaagaagcacccctctttcatgtattaaaataacactgagatttttttaaaagctggaagattgtacagcataaagctaaagtgaaggcaaaaaacattgtcctgaagaataggttacaaaaaataaactccatttggtgctgaaagttgtgaatagatggtggaaactactttcccttaatttgtatatttctaatcaagtgttgattgtgcgcgactgaccaggattgtgaaagagttcttctgtttgtatttttttaaagagaacttttttagtttattaaattataacatgttcccttttgttttgtaaataaatgtgcccccaagttgttaatgttatattaaaagagagggtccttcaaaaaaattattttttaaaacacagaggtgttctgacctgcaacttgactgggaagcccctgggtaacacaggtcctgctgtggcctttccttggtgtgacacttgaactagtcgattttttgaaggctataacctaacctcgactatttgttgttatgtgcaatactgtttgtactgtttgtataaaaaatagaaaaaaaaaagaaaagaaaaaaggcataaatctttattgcagatttattttcattgcaaactttagacattgtgattcactgaaatcatttttctactgtcaaatatgtaccttttcttcatgctggtattttttcaatagtaatgtagcctttgtactgagacaaattttcattgttatttttagaaagattttttgctaagaaaaaaattaaacatatttacatatttttcattttatttcgtattttctttaaggagtgctttctcaatcattaatagagttgtttctgggagggactttcatatctggtcaatgtcataatattattttgtatttttattggaataaattaattttatgatgctaattctttaaaagtttatttttttcattttcagttatttttgaagctaaaacctttgtaatattgttactaaagtgtctagttttttgaaatgcaaagctttatgtattaacttgctgatgtggtttacaatagtgtgacaacgatgaaaatgcttggttatgtaaagtgattggaaatgtaatggataattgggtaataaaatgacagaatgagcag

SEQ ID NO: 124739 - DNA, 9483 bp, Homo sapiens
  Payload ID: 4493
  Gene Symbol: CPEB4
  Gene Name: cytoplasmic polyadenylation element binding protein 4
  Uniprot ID: Q17RY0
  ENST ID: ENST00000265085
  CDS Start-End: 1455-3644
agtgctacccccacccctccctcttcgaaccggaagtgtctctgggtctttccagctggttgtcatttcactcggctcggtcctgaggagaaggactcagccgcggctgcgggacccgggcaccgggaggcggtggcggcggcggcggcggcagcagcggcgacagcagaggaggaagaggaggaagaaggaaagaaaaagaagaaccaggaggagtcctcaacaacgacagcggggactgcgggaccagggtaaagcggcgacggcggcgacggcccagcaaccgtgaggagaaacaaaagccttctaaattatagtttaaaaaaaaattctgggggaaaagagagagaaagccgaggggggaggcccttctcctttaaaataactacggtagtgggtttttcctttttttcctcttttttccctctctgcggagaatcgaactgagggaactgaacaaaccgcccctgggtcccatgagggaaaaaaaccccggagccgcagagaggggaagaggcagaaaccgcaggaccttccaggtcgccccctcggtccccgcacccccaggccgcccgctcaccctcgtcgagtctcgctaatccctcctgatcgcgacccccgcaagagggagaaacgggtgtttccaacccctttcatgggggagaggaagccgcggggagcccaggaacagcgaccgcagcaagatctgcacccggagcctcaggaacagccccagaggccaaaactgcaccctgcgaaagagcagaaaacaggaccaggaacagcagaaacctccctgcaatcatctttccattagtcaatgctgatttcctctcccgaaaccaggaattcacttcccaccccagataacctaatataatctatatatataaatatataatatataatgttcttaaattattcctgatttttttttaaccaagctgccaagaaaagaacgtattcccctcttagtcctattctaatttttatgtgagtgaatctaaactgctgaggaaaaccatatgtgattgttaaattatatatatctatatttttactccgcgcaaggcttattcttctacatccatagatgcttgagaagctctgtttttgtcattcatgtacattttcctttggaaaaagaaagcgcctattttactaaccaaagacttgatttttaccctcttcatttttattccctcctaaaaataagcccaattggatccaagtcaatgttttaagagatttttttaagagttgttttttctttcagagaccagaattccaaatcagaacaatttaaggtgataagctgcgatctttgagctagctataaataagacatttcaagcaagcaagcaaacaacttaaatttggggtagaggaaaaaaaaggcgtgagacatcaggttgtcattttttattgtgagattctgctcctaaagataataaatgggggattacgggtttggagtgctagtgcaaagcaatactgggaataaatctgcttttccagtcagattccatccacatctgcagcctccacaccatcaccaaaatgccacccccagccctgctgcttttataaataataacacagctgccaatggcagcagtgctgggtcagcttggctttttcctgctccagctacccataacattcaggatgagatcttggggtcagaaaaagcaaaaagtcagcaacaggaacagcaagaccccttagaaaagcagcagctttccccaagtccaggtcaggaagctggaatactgcctgaaacagagaaggcaaaatcagaagaaaatcaaggggacaattcttcggaaaatggcaatgggaaggagaaaataaggatcgaatctccagtgttgacagggtttgattatcaagaagccactgggctaggtacttcaacccaacccttgacatctagcgcatcgtctcttactggtttcagtaactggtcagcagcgatagcgccttcctcctctacaataatcaatgaagatgcaagtttctttcaccagggaggggtccctgctgcttcggctaataacggtgctctgttgtttcaaaatttcccccatcatgtcagccctggctttggaggcagcttctctcctcagatcgggcctctctcacagcaccacccacatcaccctcatttccagcatcatcacagccagcatcagcagcaaaggaggtctcctgccagtccccatcccccacccttcacacatagaaatgctgcttttaaccagctgcctcatttggcgaataatcttaacaaacccccctctccgtggagcagctaccagagtccgtcaccaacaccctcctcttcctggagcccgggcggtggtggatatggtggctggggaggttcccaaggccgagatcaccgcagagggctgaatggtggaataacgcccctgaactccatctcgcctttgaagaaaaattttgcaagcaatcatattcagctccagaagtatgctcgccccagctctgcctttgcacctaaatcctggatggaagatagcttgaacagggctgacaacatttttccttttccggatcgccccaggacattcgacatgcactcactggagagttcactcattgacataatgagagctgaaaatgataccattaaaggtcgtctaaactattcatatccaggatccgatagctctctgcttattaatgcaaggacatatgggcgaaggagaggtcagtcttcactgtttccaatggaagatggattcttggatgatggccgtggggatcagcctcttcatagtggcctgggttcacctcactgcttcagtcaccagaatggggaaagagtggaacgatattctcgaaaggtgtttgtaggcggattgcctccagacattgatgaagatgagatcacagctagttttcgtcgctttggccctctgattgtggattggcctcataaagctgagagcaaatcctattttcctcctaaaggctatgcattcctgctgtttcaagatgaaagctctgtgcaggctctcattgatgcatgcattgaagaagatggaaaactctacctttgtgtatcaagtcccactatcaaggataagccagtccagattcggccttggaatctcagtgacagtgactttgtgatggatggttcacagccacttgacccacgaaaaactatatttgttggtggtgttcctcgaccattacgagctgtggagcttgcgatgataatggatcggctatatggaggtgtgtgctacgctgggattgataccgaccctgagctaaaatacccaaaaggagctgggagagttgcgttctctaatcaacagagttacatagctgctatcagtgcccgctttgttcagctgcagcatggagagatagataaacgggtggaagttaagccatatgtcttggatgatcagctgtgtgatgaatgtcagggggcccgttgtggggggaaatttgctccatttttctgtgctaatgttacctgtctgcagtattactgtgaatattgctgggctgctatccattctcgtgctggcagggaattccacaagcccctggtgaaggaaggcggtgaccgccctcggcatatttcattccgctggaactaaaggataactgcagtgctcattttcaggcctcagaataagtgcactcttctgttcattctgaccccttcctcaacctcttcacgctggcatgtccttttgtagcagtctgtaacttaactatagtataatgaaaagaatgacctataatataggtgttttgtagattcttgtgtcactgcaaacaatatgaactcctttttcgtattgccatcgggttgcatggaagttttattctcttgttttgctggaaaccaagaggatccaaacttcctgcaacattttcttagaggagagagagaaatattaaaagagaaatgaaacaatagagtattttgggtttttaattaaattattgttaataatataacatataagaatacttttattaaaataaccatgcaacaataacactatcggtctatctgacagtttttcccccagggaagtgcttttgccttttcctttcttttttttttttttttcatcttttttgtctctctcttttttccatccctttttaatttttttaacagcaatggaggaagttaacaatttttaatggaaagagcatgttagagcaaacaaatgcataagcaagactgagcagcattataattaattttcagggttttgaggctgaacataatttcattatccctcaaaaagttaccaccacatcagaaaaaataaaaaaaaaatagtaaagtaggcagagctaggtttattttctcttaaacaatttttaaaattcagaatgtaaaaattgggtaaatttactactgaggggagtgcacttatttatttaacttacttatctggtcaaagccccaggaaacctaccaaagctagaattaatgacaactggtgggaaacctagcatttcctctcctgaagaataaatgtataaatgttatttttgatgtttatatataaactctatatcctaatttactaatactcatcagatgtcagcctttgctctccattttgacgttaaaaaacaacaacagatctagagatacctcaaggatatcatttttgattttgtgttacagtacacttgtagccaaaactggaagacaaaaccaatatataatttggctgctgattggcttacttttagatttaaagttactttgggtatcctgtaatttagttgtaacatagaaaatgaaaaaacagttaaaaaaagtgaagtagttgcaaagtgttttgcactgttgaactaagtaactgtgtaaatctgtgcaaaggtacgtatgtttatcttactcttcctataaactaaaataacattacagtttccgaatttagcatgggacatagtcagtgtttgaagtgccaacttcatcaagtaatgcatgctttattataaataaaattctagctttgaaaggcgttatgtgttgaacagtatgcttcaggggtaaatttaaaatagtctcttgaagccctagtcatggaagtaacttttattttaattgacattctcttattaaatgccctatccatcattaaaaggtttattatcagtgggcaaaacatgaaataatatgatcgaatggcaatcttgctagttgcgctacctaacagtaccatcttggatccttcaaaaccaaagacttgccccagcactgctgtggaaccacctggcttatgacccctatggatgatctttaggaaaagcagccctttacttttaatacaggctttaatgaactatacctgttaagttccaaaggtcaaaatggaggcatttgctgtctaatattcaaacatagaaagggagctgcttttaaagaattccctgcaaatactgaaagcagtcatgcgaatggagggtgctcttgtgtagctggtcagggacttttttttcttttctcctgaactacatgattctaattggaatgttcatttgcctctttttactcttttaaatgcttgtaggtggcttggggtgtgctatcgtgctgttcctactcagtaaacaggtgtgatgagttaacaagaaataacactgtttgagaactagctttgaataataatttttccctttgtacatgacctgctgaatttcggtacagtgtttttgtagctaacttattttgtcatgcacataatgtatatttgttatgcactacttttgtatatcttgtttttccaacagtgaacatttttaggcacacttttcactgacgggatatctctttatgcaatacctcaatttttcatattgcaaagagtagctttttgtacttttattactgagagatcttcatatacttcattttttaatataaataattttaataaattttattttcttatattctgctttttatacatttcagtgctctgcatacattttaaattatgaatgtcgtgcactggcaatgctattttagagtctgcagagaagagaaagcatgttgcttaaacatccttccccagcaccagctattggtgtacctataatttaagaaatagtctatgtaaagtcacaaattaatgaaaaaaattcgcatgaaaatgacagataacactgtagttcctaaaaaaaaaattaaatgcataagcataaggtagaaattaaaataacaaaattgtctacagcttcttactaagtttttaaaattattcataaaatgcagacatttttggtgaatgtttagccatttttaatattaataaattgatgttaagtgtttgattcagagatgtctgctcttttaaattatatataaggaaaaaaaatagcctgccttgggacaggtgtgtaatgttagtgtgcatgactaatgtaagaaattgttattctactaatatttacttgtgattgtgtgacaagtgtgtttacagattattggttacacttcaatttacagggcataaacaatgattatctattactctgaactttatgattacatgttcttcagattacatgggattgtagttgggagttaccatgtaactcaaacataattaacatgtaattagtttacagattgtagggcatcacttcaattcaccaagcatgtagttctagcgcactagcatggcgccagccatgtacttacaatgtagttacagagtaattacatggtgatttttgcaatgtaaaataaagtgtttctgattattttctatgtaaaggaaccctctcctttccccttctggtccctgcgctttggtataatatatatacttctccatacacagacctctgcagaatgcaaaataaaacttgcagtgaatgaatttagcattttatgagagtgctgttggaaagacttgataattcaccccttttgttttgaagagttgaatcttctgttaaaaggtgatttaaaacttgaatgtgatgaattgtggcaagttaacttcaagttatgtgcaatacttatttcaaacttttgaaagatctttgcagtgtaattctttgtttttaattgcagacatttaaaaatgtcattttctactgttaagagtaatcctctttcttgctggtgtttctaaagaaaagaatcagaaatcaatctttctactaatgtaaatttgagattatttttaaaaatggaataaaagaggttttggtcatttgctttattttattattttaaagctactgtgattgatagcattgtaagaatcgggacaatattgtattcaactgttttattttttatatttttaaaatttaaagtataattagtttttataattttcatcagatttttgttatattttttggaagtgaaacttttagcaagtgggtgtctagtttttactaatccctaattttttttccagtgtattgctcatattatcagaaggaaaagttatttaagtatgtcagttaattgtactacttggctgaatttccatatagtttttactgtgtatggggaggttgtagtatttattatagcattttaaataagggtaattcattttttattaaagtcattttcacgttaagttcctatttttgtatgttctactcttaagttatataacacagttccttttttaaaagagttcatttgttgaagtgctagtgaaaaattaatgttattaaatagtttgcaaatgactatttataccagtatgcatataatttttaaatatttgtaatgtgagatgttgaatgaataaaacttttaactcagatttcttttaatatacttatttctttttaacacaagtagatgatgctttcttgactgggaatgtaacattttaaaatattaggaatatactgttcagctaatgcagcacaaaccaataggaaaaaatcttcagtcatataagtactgtggccagtgtgcattcttatgtaagcctataagcgtcggtgggtggttgtgtctttggcctgtactgttagttcacctgctgcctgccctgcagagttctttttatttgtagccttcaatatgtatacagggagtaagcccaggatctaagcattcagttatcagttgaaggccaaatgcccaacaaaagtgaaaaacccaatgtttagttaataatgaaagtccgtatctgggaggttcagttttgagtctttgtcaatgaatagtcttgatttgtggccacactaccaaagggcttgaaaacaagtctcttttgacttccaattcccagttcctccatagaccttaatgtcataggatacggtgtgtgggattataatctctatggcatgtcaattgaaaatattatctttgatttgatccattaatcatgtggactaccaagtgctgtaatgtgttagtatttatattttaaactgcattctcaaacttttaacataaggatttattataacaaaatataacactgagaatatcctgttttgtcagatttaatatctgttctttcttgagtatagtattctcaagactagaagaggttcttgtcctgagagaaatggactatgagatcttttgcgtctaagttgtctttcccaacaggcagctcttctaactatagagattactgagggtaagggcaggctggacagcttcccctttctctcatctggcaattcccaaaccttacgttgagcattcaatgaagggccttgaggaaaccccagggatgggacactggagatgtgggtggcatttggttatcaagtctataatattcctaggcattctgggatggtttcactattttaagaaaagaaaaaaaagatagcccaagcatatttagtttattttaggaaatgtttatttcaggtaagtgagatatcaatgatatgtgatataacaactctatcttgaaattacataggtgcattgctttgggtgttttaaatcacagaatggtgtgtctggaaagggtgtaagaggcttcctgggctatatttcttcattcactgattgcctaaacctacccaacgaggaaaattctttttatttttatcttttgtttttactgtctaaccagatgaataaacagtggaaattctctaccacactcttaacaatcaagtcatttcataaccccttttggtaatgggtgtttgtgtccacagctagatcagaaagtaagtactttttctagggatttttttttttttttaagtttgggaaatagtttgatcaaaagtcatggggaaagtaatctctgattttaaaaattgaagaatactgaaggtgtcagtgagttagaaatttttaaggagtaattattttctgaaatgtgtaataaccgaataataaacaagacaaaactctaatatttcagactgtgatcttcagaggactaggatagtcctttccacaagaaaaagacaaaaaaaaataaagttttaccattaaataca

SEQ ID NO: 124740 - DNA, 6705 bp, Homo sapiens
  Payload ID: 4493
  Gene Symbol: CPEB4
  Gene Name: cytoplasmic polyadenylation element binding protein 4
  Uniprot ID: Q17RY0
  ENST ID: ENST00000334035
  CDS Start-End: 395-2533
ctccgcgcaaggcttattcttctacatccatagatgcttgagaagctctgtttttgtcattcatgtacattttcctttggaaaaagaaagcgcctattttactaaccaaagacttgatttttaccctcttcatttttattccctcctaaaaataagcccaattggatccaagtcaatgttttaagagatttttttaagagttgttttttctttcagagaccagaattccaaatcagaacaatttaaggtgataagctgcgatctttgagctagctataaataagacatttcaagcaagcaagcaaacaacttaaatttggggtagaggaaaaaaaaggcgtgagacatcaggttgtcattttttattgtgagattctgctcctaaagataataaatgggggattacgggtttggagtgctagtgcaaagcaatactgggaataaatctgcttttccagtcagattccatccacatctgcagcctccacaccatcaccaaaatgccacccccagccctgctgcttttataaataataacacagctgccaatggcagcagtgctgggtcagcttggctttttcctgctccagctacccataacattcaggatgagatcttggggtcagaaaaagcaaaaagtcagcaacaggaacagcaagaccccttagaaaagcagcagctttccccaagtccaggtcaggaagctggaatactgcctgaaacagagaaggcaaaatcagaagaaaatcaaggggacaattcttcggaaaatggcaatgggaaggagaaaataaggatcgaatctccagtgttgacagggtttgattatcaagaagccactgggctaggtacttcaacccaacccttgacatctagcgcatcgtctcttactggtttcagtaactggtcagcagcgatagcgccttcctcctctacaataatcaatgaagatgcaagtttctttcaccagggaggggtccctgctgcttcggctaataacggtgctctgttgtttcaaaatttcccccatcatgtcagccctggctttggaggcagcttctctcctcagatcgggcctctctcacagcaccacccacatcaccctcatttccagcatcatcacagccagcatcagcagcaaaggaggtctcctgccagtccccatcccccacccttcacacatagaaatgctgcttttaaccagctgcctcatttggcgaataatcttaacaaacccccctctccgtggagcagctaccagagtccgtcaccaacaccctcctcttcctggagcccgggcggtggtggatatggtggctggggaggttcccaaggccgagatcaccgcagagggctgaatggtggaataacgcccctgaactccatctcgcctttgaagaaaaattttgcaagcaatcatattcagctccagaagtatgctcgccccagctctgcctttgcacctaaatcctggatggaagatagcttgaacagggctgacaacatttttccttttccggatcgccccaggacattcgacatgcactcactggagagttcactcattgacataatgagagctgaaaatgataccattaaagcaaggacatatgggcgaaggagaggtcagtcttcactgtttccaatggaagatggattcttggatgatggccgtggggatcagcctcttcatagtggcctgggttcacctcactgcttcagtcaccagaatggggaaagagtggaacgatattctcgaaaggtgtttgtaggcggattgcctccagacattgatgaagatgagatcacagctagttttcgtcgctttggccctctgattgtggattggcctcataaagctgagagcaaatcctattttcctcctaaaggctatgcattcctgctgtttcaagatgaaagctctgtgcaggctctcattgatgcatgcattgaagaagatggaaaactctacctttgtgtatcaagtcccactatcaaggataagccagtccagattcggccttggaatctcagtgacagtgactttgtgatggatggttcacagccacttgacccacgaaaaactatatttgttggtggtgttcctcgaccattacgagctgtggagcttgcgatgataatggatcggctatatggaggtgtgtgctacgctgggattgataccgaccctgagctaaaatacccaaaaggagctgggagagttgcgttctctaatcaacagagttacatagctgctatcagtgcccgctttgttcagctgcagcatggagagatagataaacgggtggaagttaagccatatgtcttggatgatcagctgtgtgatgaatgtcagggggcccgttgtggggggaaatttgctccatttttctgtgctaatgttacctgtctgcagtattactgtgaatattgctgggctgctatccattctcgtgctggcagggaattccacaagcccctggtgaaggaaggcggtgaccgccctcggcatatttcattccgctggaactaaaggataactgcagtgctcattttcaggcctcagaataagtgcactcttctgttcattctgaccccttcctcaacctcttcacgctggcatgtccttttgtagcagtctgtaacttaactatagtataatgaaaagaatgacctataatataggtgttttgtagattcttgtgtcactgcaaacaatatgaactcctttttcgtattgccatcgggttgcatggaagttttattctcttgttttgctggaaaccaagaggatccaaacttcctgcaacattttcttagaggagagagagaaatattaaaagagaaatgaaacaatagagtattttgggtttttaattaaattattgttaataatataacatataagaatacttttattaaaataaccatgcaacaataacactatcggtctatctgacagtttttcccccagggaagtgcttttgccttttcctttcttttttttttttttttcatcttttttgtctctctcttttttccatccctttttaatttttttaacagcaatggaggaagttaacaatttttaatggaaagagcatgttagagcaaacaaatgcataagcaagactgagcagcattataattaattttcagggttttgaggctgaacataatttcattatccctcaaaaagttaccaccacatcagaaaaaataaaaaaaaaatagtaaagtaggcagagctaggtttattttctcttaaacaatttttaaaattcagaatgtaaaaattgggtaaatttactactgaggggagtgcacttatttatttaacttacttatctggtcaaagccccaggaaacctaccaaagctagaattaatgacaactggtgggaaacctagcatttcctctcctgaagaataaatgtataaatgttatttttgatgtttatatataaactctatatcctaatttactaatactcatcagatgtcagcctttgctctccattttgacgttaaaaaacaacaacagatctagagatacctcaaggatatcatttttgattttgtgttacagtacacttgtagccaaaactggaagacaaaaccaatatataatttggctgctgattggcttacttttagatttaaagttactttgggtatcctgtaatttagttgtaacatagaaaatgaaaaaacagttaaaaaaagtgaagtagttgcaaagtgttttgcactgttgaactaagtaactgtgtaaatctgtgcaaaggtacgtatgtttatcttactcttcctataaactaaaataacattacagtttccgaatttagcatgggacatagtcagtgtttgaagtgccaacttcatcaagtaatgcatgctttattataaataaaattctagctttgaaaggcgttatgtgttgaacagtatgcttcaggggtaaatttaaaatagtctcttgaagccctagtcatggaagtaacttttattttaattgacattctcttattaaatgccctatccatcattaaaaggtttattatcagtgggcaaaacatgaaataatatgatcgaatggcaatcttgctagttgcgctacctaacagtaccatcttggatccttcaaaaccaaagacttgccccagcactgctgtggaaccacctggcttatgacccctatggatgatctttaggaaaagcagccctttacttttaatacaggctttaatgaactatacctgttaagttccaaaggtcaaaatggaggcatttgctgtctaatattcaaacatagaaagggagctgcttttaaagaattccctgcaaatactgaaagcagtcatgcgaatggagggtgctcttgtgtagctggtcagggacttttttttcttttctcctgaactacatgattctaattggaatgttcatttgcctctttttactcttttaaatgcttgtaggtggcttggggtgtgctatcgtgctgttcctactcagtaaacaggtgtgatgagttaacaagaaataacactgtttgagaactagctttgaataataatttttccctttgtacatgacctgctgaatttcggtacagtgtttttgtagctaacttattttgtcatgcacataatgtatatttgttatgcactacttttgtatatcttgtttttccaacagtgaacatttttaggcacacttttcactgacgggatatctctttatgcaatacctcaatttttcatattgcaaagagtagctttttgtacttttattactgagagatcttcatatacttcattttttaatataaataattttaataaattttattttcttatattctgctttttatacatttcagtgctctgcatacattttaaattatgaatgtcgtgcactggcaatgctattttagagtctgcagagaagagaaagcatgttgcttaaacatccttccccagcaccagctattggtgtacctataatttaagaaatagtctatgtaaagtcacaaattaatgaaaaaaattcgcatgaaaatgacagataacactgtagttcctaaaaaaaaaattaaatgcataagcataaggtagaaattaaaataacaaaattgtctacagcttcttactaagtttttaaaattattcataaaatgcagacatttttggtgaatgtttagccatttttaatattaataaattgatgttaagtgtttgattcagagatgtctgctcttttaaattatatataaggaaaaaaaatagcctgccttgggacaggtgtgtaatgttagtgtgcatgactaatgtaagaaattgttattctactaatatttacttgtgattgtgtgacaagtgtgtttacagattattggttacacttcaatttacagggcataaacaatgattatctattactctgaactttatgattacatgttcttcagattacatgggattgtagttgggagttaccatgtaactcaaacataattaacatgtaattagtttacagattgtagggcatcacttcaattcaccaagcatgtagttctagcgcactagcatggcgccagccatgtacttacaatgtagttacagagtaattacatggtgatttttgcaatgtaaaataaagtgtttctgattattttctatgtaaaggaaccctctcctttccccttctggtccctgcgctttggtataatatatatacttctccatacacagacctctgcagaatgcaaaataaaacttgcagtgaatgaatttagcattttatgagagtgctgttggaaagacttgataattcaccccttttgttttgaagagttgaatcttctgttaaaaggtgatttaaaacttgaatgtgatgaattgtggcaagttaacttcaagttatgtgcaatacttatttcaaacttttgaaagatctttgcagtgtaattctttgtttttaattgcagacatttaaaaatgtcattttctactgttaagagtaatcctctttcttgctggtgtttctaaagaaaagaatcagaaatcaatctttctactaatgtaaatttgagattatttttaaaaatggaataaaagaggttttggtcatttgctttattttattattttaaagctactgtgattgatagcattgtaagaatcgggacaatattgtattcaactgttttattttttatatttttaaaatttaaagtataattagtttttataattttcatcagatttttgttatattttttggaagtgaaacttttagcaagtgggtgtctagtttttactaatccctaattttttttccagtgtattgctcatattatcagaaggaaaagttatttaagtatgtcagttaattgtactacttggctgaatttccatatagtttttactgtgtatggggaggttgtagtatttattatagcattttaaataagggtaattcattttttattaaagtcattttcacgttaagttcctatttttgtatgttctactcttaagttatataacacagttccttttttaaaagagttcatttgttgaagtgctagtgaaaaattaatgttattaaatagtttgcaaatgactatttataccagtatgcatataatttttaaatatttgtaatgtgagatgttgaatgaataaaacttttaactcag

SEQ ID NO: 124741 - DNA, 1416 bp, Homo sapiens
  Payload ID: 4493
  Gene Symbol: CPEB4
  Gene Name: cytoplasmic polyadenylation element binding protein 4
  Uniprot ID: Q17RY0
  ENST ID: ENST00000517880
  CDS Start-End: 128-1096
gagagctagcagtggggtgatttgaaagtcacaagagaaataaatgatttgaaaaaaatctctatgacaagaaactcctaattgggttttgaaaaagtctaaagaagatcgccccaggacattcgacatgcactcactggagagttcactcattgacataatgagagctgaaaatgataccattaaaggtcagtcttcactgtttccaatggaagatggattcttggatgatggccgtggggatcagcctcttcatagtggcctgggttcacctcactgcttcagtcaccagaatggggaaagagtggaacgatattctcgaaaggtgtttgtaggcggattgcctccagacattgatgaagatgagatcacagctagttttcgtcgctttggccctctgattgtggattggcctcataaagctgagagcaaatcctattttcctcctaaaggctatgcattcctgctgtttcaagatgaaagctctgtgcaggctctcattgatgcatgcattgaagaagatggaaaactctacctttgtgtatcaagtcccactatcaaggataagccagtccagattcggccttggaatctcagtgacagtgactttgtgatggatggttcacagccacttgacccacgaaaaactatatttgttggtggtgttcctcgaccattacgagctgtggagcttgcgatgataatggatcggctatatggaggtgtgtgctacgctgggattgataccgaccctgagctaaaatacccaaaaggagctgggagagttgcgttctctaatcaacagagttacatagctgctatcagtgcccgctttgttcagctgcagcatggagagatagataaacgggtggaagttaagccatatgtcttggatgatcagctgtgtgatgaatgtcagggggcccgttgtggggggaaatttgctccatttttctgtgctaatgttacctgtctgcagtattactgtgaatattgctgggctgctatccattctcgtgctggcagggaattccacaagcccctggtgaaggaaggcggtgaccgccctcggcatatttcattccgctggaactaaaggataactgcagtgctcattttcaggcctcagaataagtgcactcttctgttcattctgaccccttcctcaacctcttcacgctggcatgtccttttgtagcagtctgtaacttaactatagtataatgaaaagaatgacctataatataggtgttttgtagattcttgtgtcactgcaaacaatatgaactcctttttcgtattgccatcgggttgcatggaagttttattctcttgttttgctggaaaccaagaggatccaaacttcctgcaacattttcttagaggagagagagaaatattaaaagagaaatgaaa

SEQ ID NO: 124742 - DNA, 2257 bp, Homo sapiens
  Payload ID: 4493
  Gene Symbol: CPEB4
  Gene Name: cytoplasmic polyadenylation element binding protein 4
  ENST ID: ENST00000519835
  CDS Start-End: 204-2123
ttttaagagttgttttttctttcagagaccagaattccaaatcagaacaatttaaggtgataagctgcgatctttgagctagctataaataagacatttcaagcaagcaagcaaacaacttaaatttggggtagaggaaaaaaaaggcgtgagacatcaggttgtcattttttattgtgagattctgctcctaaagataataaatgggggattacgggtttggagtgctagtgcaaagcaatactgggaataaatctgcttttccagtcagattccatccacatctgcagcctccacaccatcaccaaaatgccacccccagccctgctgcttttataaataataacacagctgccaatggcagcagtgctgggtcagcttggctttttcctgctccagctacccataacattcaggatgagatcttggggtcagaaaaagcaaaaagtcagcaacaggaacagcaagaccccttagaaaagcagcagctttccccaagtccaggtcaggaagctggaatactgcctgaaacagagaaggcaaaatcagaagaaaatcaaggggacaattcttcggaaaatggcaatgggaaggagaaaataaggatcgaatctccagtgttgacagggtttgattatcaagaagccactgggctaggtacttcaacccaacccttgacatctagcgcatcgtctcttactggtttcagtaactggtcagcagcgatagcgccttcctcctctacaataatcaatgaagatgcaagtttctttcaccagggaggggtccctgctgcttcggctaataacggtgctctgttgtttcaaaatttcccccatcatgtcagccctggctttggaggcagcttctctcctcagatcgggcctctctcacagcaccacccacatcaccctcatttccagcatcatcacagccagcatcagcagcaaaggaggtctcctgccagtccccatcccccacccttcacacatagaaatgctgcttttaaccagctgcctcatttggcgaataatcttaacaaacccccctctccgtggagcagctaccagagtccgtcaccaacaccctcctcttcctggagcccgggcggtggtggatatggtggctggggaggttcccaaggccgagatcaccgcagagggctgaatggtggaataacgcccctgaactccatctcgcctttgaagaaaaattttgcaagcaatcatattcagctccagaagtatgctcgccccagctctgcctttgcacctaaatcctggatggaagatagcttgaacagggctgacaacatttttccttttccggatcgccccaggacattcgacatgcactcactggagagttcactcattgacataatgagagctgaaaatgataccattaaaggtcagtcttcactgtttccaatggaagatggattcttggatgatggccgtggggatcagcctcttcatagtggcctgggttcacctcactgcttcagtcaccagaatggggaaagagtggaacgatattctcgaaaggtgtttgtaggcggattgcctccagacattgatgaagatgagatcacagctagttttcgtcgctttggccctctgattgtggattggcctcataaagctgagagcaaatcctattttcctcctaaaggctatgcattcctgctgtttcaagatgaaagctctgtgcaggctctcattgatgcatgcattgaagaagatggaaaactctacctttgtgtatcaagtcccactatcaaggataagccagtccagattcggccttggaatctcagtgacagtgactttgtgatggatggttcacagccacttgacccacgaaaaactatatttgttggtggtgttcctcgaccattacgagctgtggagcttgcgatgataatggatcggctatatggaggtgtgtgctacgctgggattgataccgaccctgagctaaaatacccaaaaggagctgggagagttgcgttctctaatcaacagagttacatagctgctatcagtgcccgctttgttcagctgcagcatggagagatagataaacgggtaagccttatactacattttggaaaattctagaaatggtcctctaaatgtgtgattaccaatattagaacgggagcattttatgacaataaagtgacagctgacaattttgcctatagagttaattatggtctataatacatgaaataatgtcctatgaatttctt

SEQ ID NO: 124743 - DNA, 2607 bp, Homo sapiens
  Payload ID: 4493
  Gene Symbol: CPEB4
  Gene Name: cytoplasmic polyadenylation element binding protein 4
  ENST ID: ENST00000520867
  CDS Start-End: 395-2509
ctccgcgcaaggcttattcttctacatccatagatgcttgagaagctctgtttttgtcattcatgtacattttcctttggaaaaagaaagcgcctattttactaaccaaagacttgatttttaccctcttcatttttattccctcctaaaaataagcccaattggatccaagtcaatgttttaagagatttttttaagagttgttttttctttcagagaccagaattccaaatcagaacaatttaaggtgataagctgcgatctttgagctagctataaataagacatttcaagcaagcaagcaaacaacttaaatttggggtagaggaaaaaaaaggcgtgagacatcaggttgtcattttttattgtgagattctgctcctaaagataataaatgggggattacgggtttggagtgctagtgcaaagcaatactgggaataaatctgcttttccagtcagattccatccacatctgcagcctccacaccatcaccaaaatgccacccccagccctgctgcttttataaataataacacagctgccaatggcagcagtgctgggtcagcttggctttttcctgctccagctacccataacattcaggatgagatcttggggtcagaaaaagcaaaaagtcagcaacaggaacagcaagaccccttagaaaagcagcagctttccccaagtccaggtcaggaagctggaatactgcctgaaacagagaaggcaaaatcagaagaaaatcaaggggacaattcttcggaaaatggcaatgggaaggagaaaataaggatcgaatctccagtgttgacagggtttgattatcaagaagccactgggctaggtacttcaacccaacccttgacatctagcgcatcgtctcttactggtttcagtaactggtcagcagcgatagcgccttcctcctctacaataatcaatgaagatgcaagtttctttcaccagggaggggtccctgctgcttcggctaataacggtgctctgttgtttcaaaatttcccccatcatgtcagccctggctttggaggcagcttctctcctcagatcgggcctctctcacagcaccacccacatcaccctcatttccagcatcatcacagccagcatcagcagcaaaggaggtctcctgccagtccccatcccccacccttcacacatagaaatgctgcttttaaccagctgcctcatttggcgaataatcttaacaaacccccctctccgtggagcagctaccagagtccgtcaccaacaccctcctcttcctggagcccgggcggtggtggatatggtggctggggaggttcccaaggccgagatcaccgcagagggctgaatggtggaataacgcccctgaactccatctcgcctttgaagaaaaattttgcaagcaatcatattcagctccagaagtatgctcgccccagctctgcctttgcacctaaatcctggatggaagatagcttgaacagggctgacaacatttttccttttccggatcgccccaggacattcgacatgcactcactggagagttcactcattgacataatgagagctgaaaatgataccattaaaggtcagtcttcactgtttccaatggaagatggattcttggatgatggccgtggggatcagcctcttcatagtggcctgggttcacctcactgcttcagtcaccagaatggggaaagagtggaacgatattctcgaaaggtgtttgtaggcggattgcctccagacattgatgaagatgagatcacagctagttttcgtcgctttggccctctgattgtggattggcctcataaagctgagagcaaatcctattttcctcctaaaggctatgcattcctgctgtttcaagatgaaagctctgtgcaggctctcattgatgcatgcattgaagaagatggaaaactctacctttgtgtatcaagtcccactatcaaggataagccagtccagattcggccttggaatctcagtgacagtgactttgtgatggatggttcacagccacttgacccacgaaaaactatatttgttggtggtgttcctcgaccattacgagctgtggagcttgcgatgataatggatcggctatatggaggtgtgtgctacgctgggattgataccgaccctgagctaaaatacccaaaaggagctgggagagttgcgttctctaatcaacagagttacatagctgctatcagtgcccgctttgttcagctgcagcatggagagatagataaacgggtggaagttaagccatatgtcttggatgatcagctgtgtgatgaatgtcagggggcccgttgtggggggaaatttgctccatttttctgtgctaatgttacctgtctgcagtattactgtgaatattgctgggctgctatccattctcgtgctggcagggaattccacaagcccctggtgaaggaaggcggtgaccgccctcggcatatttcattccgctggaactaaaggataactgcagtgctcattttcaggcctcagaataagtgcactcttctgttcattctgaccccttcctcaacctcttcacgctggcatgtcctttt

SEQ ID NO: 124744 - DNA, 441 bp, Homo sapiens
  Payload ID: 4493
  Gene Symbol: CPEB4
  Gene Name: cytoplasmic polyadenylation element binding protein 4
  ENST ID: ENST00000519152
  CDS Start-End: 1-441
gagatcaccgcagagggctgaatggtggaataacgcccctgaactccatctcgcctttgaagaaaaattttgcaagcaatcatattcagctccagaagtatgctcgccccagctctgcctttgcacctaaatcctggatggaagatagcttgaacagggctgacaacatttttccttttccggatcgccccaggacattcgacatgcactcactggagagttcactcattgacataatgagagctgaaaatgataccattaaaggtcgtctaaactattcatatccaggatccgatagctctctgcttattaatggtcagtcttcactgtttccaatggaagatggattcttggatgatggccgtggggatcagcctcttcatagtggcctgggttcacctcactgcttcagtcaccagaatggggaaagagtggaacgat

SEQ ID NO: 124745 - DNA, 1551 bp, Homo sapiens
  Payload ID: 4493
  Gene Symbol: CPEB4
  Gene Name: cytoplasmic polyadenylation element binding protein 4
  ENST ID: ENST00000522336
  CDS Start-End: 155-1174
gagagcacacgcacacatgtatgaggagagagctagcagtggggtgatttgaaagtcacaagagaaataaatgatttgaaaaaaatctctatgacaagaaactcctaattgggttttgaaaaagtctaaagaagatcgccccaggacattcgacatgcactcactggagagttcactcattgacataatgagagctgaaaatgataccattaaaggtcgtctaaactattcatatccaggatccgatagctctctgcttattaatggtcagtcttcactgtttccaatggaagatggattcttggatgatggccgtggggatcagcctcttcatagtggcctgggttcacctcactgcttcagtcaccagaatggggaaagagtggaacgatattctcgaaaggtgtttgtaggcggattgcctccagacattgatgaagatgagatcacagctagttttcgtcgctttggccctctgattgtggattggcctcataaagctgagagcaaatcctattttcctcctaaaggctatgcattcctgctgtttcaagatgaaagctctgtgcaggctctcattgatgcatgcattgaagaagatggaaaactctacctttgtgtatcaagtcccactatcaaggataagccagtccagattcggccttggaatctcagtgacagtgactttgtgatggatggttcacagccacttgacccacgaaaaactatatttgttggtggtgttcctcgaccattacgagctgtggagcttgcgatgataatggatcggctatatggaggtgtgtgctacgctgggattgataccgaccctgagctaaaatacccaaaaggagctgggagagttgcgttctctaatcaacagagttacatagctgctatcagtgcccgctttgttcagctgcagcatggagagatagataaacgggtggaagttaagccatatgtcttggatgatcagctgtgtgatgaatgtcagggggcccgttgtggggggaaatttgctccatttttctgtgctaatgttacctgtctgcagtattactgtgaatattgctgggctgctatccattctcgtgctggcagggaattccacaagcccctggtgaaggaaggcggtgaccgccctcggcatatttcattccgctggaactaaaggataactgcagtgctcattttcaggcctcagaataagtgcactcttctgttcattctgaccccttcctcaacctcttcacgctggcatgtccttttgtagcagtctgtaacttaactatagtataatgaaaagaatgacctataatataggtgttttgtagattcttgtgtcactgcaaacaatatgaactcctttttcgtattgccatcgggttgcatggaagttttattctcttgttttgctggaaaccaagaggatccaaacttcctgcaacattttcttagaggagagagagaaatattaaaagagaaatgaaacaatagagtattttgggtttttaattaaattattgttaataatataacatataagaa

SEQ ID NO: 124746 - DNA, 3375 bp, Homo sapiens
  Payload ID: 4494
  Gene Symbol: CKAP2
  Gene Name: cytoskeleton associated protein 2
  Uniprot ID: Q8WWK9
  ENST ID: ENST00000258607
  CDS Start-End: 119-2167
ggagacggcagccgcgccgtctgacggcttagccgcggtgcagactgcggcggcggtggtctgaggaagttctatcttggcgctaaagcggagacgcatcccccgacccgaggctacgatgagcacaccggccgtgccccaggacctgcagctgcccccgagtcagagggcgcagtccgcattcaaagagcaaagaagacaaaaactcaaggaacatctgttgagaagaaaaacgctttttgcatacaagcaggaaaatgagatgttatccagtagagatcagagagttgtgacatctgaggaccaagttcaagaagggactaaagtgctgaaacttaaaacaaaaatggctgataaagaaaacatgaagagacctgcagagagcaaaaataatacagtggtggggaaacattgtattcctttaaaaccttcaaatgaactaaccaattcaactgtagtaattgacacacataaacctaaggatagtaatcaaactccgcatttgttactaactgaagatgatccccaaagtcaacatatgacattaagccaggcatttcaccttaaaaacaatagtaaaaagaaacaaatgactacagaaaaacaaaagcaagatgctaacatgcccaagaaacctgtgcttggatcttatcgtggccagattgttcagtctaagattaattcatttagaaaacctctacaagtcaaagatgagagttctgcagcaacaaagaaactttcagccactatacctaaagccacaaaacctcagcctgtaaacaccagcagtgtaacagtgaaaagtaatagatcctccaatatgactgccactactaaatttgtgagcactacatctcagaacacacaacttgtgcgacctcctattagaagtcatcacagtaatacccgggacactgtgaaacaaggcatcagtagaacttctgccaatgttacaatccggaaagggcctcatgaaaaagaactattacaatcaaaaacagctttatctagtgtcaaaaccagttcttctcaaggtataataagaaataagactctatcaagatccatagcatctgaagttatagccaggcctgcttcattgtctaatgataaactgatggaaaagtcagagcccgttgaccagcgaagacatactgcaggaaaagcaattgttgatagtagatcagctcagcccaaagaaacctcggaagagagaaaagctcgtctgagtgagtggaaagctggcaaaggaagagtgctaaaaaggccccctaattcagtagttactcagcatgagcctgcaggacaaaatgaaaaaccagttgggtctttttggactaccatggcagaagaagatgaacaaagattatttactgaaaaagtaaacaacacattttctgaatgcctgaacttgattaatgagggatgtccaaaagaagatatactggtcacactgaatgacctgattaaaaatattccagatgccaaaaagcttgttaagtattggatatgtcttgcacttattgaaccaatcacaagtcctattgaaaatattattgcaatctatgagaaagccattctggcaggggctcagcctattgaagagatgcgacacacgattgtagatattctaacaatgaagagtcaagaaaaagctaatttaggagaaaatatggagaagtcttgtgcaagcaaggaagaagtcaaagaagtcagtattgaagatacaggtgttgatgtagatccagaaaaactggaaatggagagtaaacttcatagaaatttgctatttcaagattgtgaaaaagagcaagacaacaaaacaaaagatccaacccatgatgttaaaacccccaatacagaaacgaggacaagttgcttaattaaatataatgtgtctactacgccatacttgcaaagtgtgaaaaaaaaggtgcagtttgatggaacaaattccgcatttaaagagctgaagtttttaacaccagtgagacgttctcgacgtcttcaagagaaaacttctaaattgccagatatgttaaaagatcattatccttgtgtgtcttcattggaacagctaacggagttgggaagagaaactgatgcttttgtatgccgccctaatgcagcactgtgccgggtgtactatgaggctgatacaacataagagaaataaagctctgttagggaatggggtttttattatttgtggggtgttttgttttgagtagctttatattgctcttaggtctggagttggccatgtacctatgtatcctaagcattcacggcagtgagctcctttactaacattcatgttatggcaagagttgtcctctacattggaaagctaatcctaccttgtcagtttcaaccaactgagttttttctttaagaaaggtaaattttgtcagctagtttactatgttccttgaatataaacaggttataatactaccctgttcactttactaaatataagtacagtaatgatgcataattagaaaatgaggtattctaggtaaaatgtatgtttgccttgacatgtttttaaaagttatgatgtacctccctgcctttaaacagaatacttttttcttttttttggcctttctcagattagtcaaaaattctatagaatgactcacttcgaatactaagacacaggaggtttagcctgctttcttaccaaattcatgttacccagacttgtgttctcttgcgtcccttggactgcctgttgattgatggaaagtgtctgcactgacacttttcgtcagtagtctgtagtttcgtggcctcttttgattataactggggtcaccaagaaggtttacttaattaaataccgcatttctaagagaagatactttgtgtaagaaaagatgccacatttagtggtttaacttttgtaacttcacttgatagtttttaagcaattagaatggagttagggaaagaacatatcatactgaacaaatgtcattctagtttagatagcatttctaagataactgatactaatacttgttttcttccctataacataaaaaacttcactgttaagtcatgtcccttgaaacatgatagttacatacacagttttctctccacacataaataacaccactaaagttgttttgtaaggttccaaactaatatggcatatatcaactctacagtttcaaataaatgactttttaattgtaaaagattagttgaaaaactgtatgaatgtgaagatcacatgcttagtcatttttatgttcattccactttgtatatcttttctatttattgacttctcatgttctagagagtaggacttttattccgtgtacctgatatatatacaattaaaatatctgtgtaatt

SEQ ID NO: 124747 - DNA, 1972 bp, Homo sapiens
  Payload ID: 4494
  Gene Symbol: CKAP2
  Gene Name: cytoskeleton associated protein 2
  Uniprot ID: Q8WWK9
  ENST ID: ENST00000378034
  CDS Start-End: 119-1603
ggagacggcagccgcgccgtctgacggcttagccgcggtgcagactgcggcggcggtggtctgaggaagttctatcttggcgctaaagcggagacgcatcccccgacccgaggctacgatgagcacaccggccgtgccccaggacctgcagctgcccccgagtcagagggcgcagtccgcattcaaagagcaaagaagacaaaaactcaaggaacatctgttgagaagaaaaacgctttttgcatacaagcaggaaaatgagatgttatccagtagagatcagagagttgtgacatctgaggaccaagttcaagaagggactaaagtgctgaaacttaaaacaaaaatggctgataaagaaaacatgaagagacctgcagagagcaaaaataatacagtggtggggaaacattgtattcctttaaaaccttcaaatgaactaaccaattcaactgtagtaattgacacacataaacctaaggatagtaatcaaactccgcatttgttactaactgaagatgatccccaaagtcaacatatgacattaagccaggcatttcaccttaaaaacaatagtaaaaagaaacaaatgactacagaaaaacaaaagcaagatgctaacatgcccaagaaacctgtgcttggatcttatcgtggccagattgttcagtctaagattaattcatttagaaaacctctacaagtcaaagatgagagttctgcagcaacaaagaaactttcagccactatacctaaagccacaaaacctcagcctgtaaacaccagcagtgtaacagtgaaaagtaatagatcctccaatatgactgccactactaaatttgtgagcactacatctcagaacacacaacttgtgcgacctcctattagaagtcatcacagtaatacccgggacactgtgaaacaaggcatcagtagaacttctgccaatgttacaatccggaaagggcctcatgaaaaagaactattacaatcaaaaacagctttatctagtgtcaaaaccagttcttctcaaggtataataagaaataagactctatcaagatccatagcatctgaagttatagccaggcctgcttcattgtctaatgataaactgatggaaaagtcagagcccgttgaccagcgaagacatactgcaggaaaagcaattgttgatagtagatcagctcagcccaaagaaacctcggaagagagaaaagctcgtctgagtgagtggaaagctggcaaaggaagagtgctaaaaaggccccctaattcagtagttactcagcatgagcctgcaggacaaaatgaaaaaccagttgggtctttttggactaccatggcagaagaagatgaacaaagattatttactgaaaaagtaaacaacacattttctgaatgcctgaacttgattaatgagggatgtccaaaagaagatatactggtcacactgaatgacctgattaaaaatattccagatgccaaaaagcttgttaagtattggatatgtcttgcacttattgaaccaatcacaagtcctattgaaaatattattgcaatctatgagaaagccattctggcaggggctcaggtaagataaaaatttactgatctttacaattacagtgtagtagacaattcggaattaatttgaaacacatcacaacataacttgagaaaattttctttgtatatgtagtggtaataaatgtttaaaggctgcaaggattgcattataaaagctgtttgttggctttctaagtcttttattcctgtattgggaataatcagattttagaaaatggatataagctgaaatgtatatttaatgaaactttctgcatgaaatgttttagcatattattgtatgcatttcctggttggaagtttactgggagactgaatgtaatattaaaatttgtttattgaatataaagcaaaagggattaaattcgctttttaaatgtta

SEQ ID NO: 124748 - DNA, 3629 bp, Homo sapiens
  Payload ID: 4494
  Gene Symbol: CKAP2
  Gene Name: cytoskeleton associated protein 2
  Uniprot ID: Q8WWK9
  ENST ID: ENST00000378037
  CDS Start-End: 91-2142
ttagccgcggtgcagactgcggcggcggtggtctgaggaagttctatcttggcgctaaagcggagacgcatcccccgacccgaggctacgatgagcacaccggccgtgccccaggacctgcagctgcccccgagtcagagggcgcagtccgcattcaaagagcaaagaagacaaaaactcaaggaacatctgttgagaagaaaaacgctttttgcatacaagcaggaaaatgagatgttatccagtagtagagatcagagagttgtgacatctgaggaccaagttcaagaagggactaaagtgctgaaacttaaaacaaaaatggctgataaagaaaacatgaagagacctgcagagagcaaaaataatacagtggtggggaaacattgtattcctttaaaaccttcaaatgaactaaccaattcaactgtagtaattgacacacataaacctaaggatagtaatcaaactccgcatttgttactaactgaagatgatccccaaagtcaacatatgacattaagccaggcatttcaccttaaaaacaatagtaaaaagaaacaaatgactacagaaaaacaaaagcaagatgctaacatgcccaagaaacctgtgcttggatcttatcgtggccagattgttcagtctaagattaattcatttagaaaacctctacaagtcaaagatgagagttctgcagcaacaaagaaactttcagccactatacctaaagccacaaaacctcagcctgtaaacaccagcagtgtaacagtgaaaagtaatagatcctccaatatgactgccactactaaatttgtgagcactacatctcagaacacacaacttgtgcgacctcctattagaagtcatcacagtaatacccgggacactgtgaaacaaggcatcagtagaacttctgccaatgttacaatccggaaagggcctcatgaaaaagaactattacaatcaaaaacagctttatctagtgtcaaaaccagttcttctcaaggtataataagaaataagactctatcaagatccatagcatctgaagttatagccaggcctgcttcattgtctaatgataaactgatggaaaagtcagagcccgttgaccagcgaagacatactgcaggaaaagcaattgttgatagtagatcagctcagcccaaagaaacctcggaagagagaaaagctcgtctgagtgagtggaaagctggcaaaggaagagtgctaaaaaggccccctaattcagtagttactcagcatgagcctgcaggacaaaatgaaaaaccagttgggtctttttggactaccatggcagaagaagatgaacaaagattatttactgaaaaagtaaacaacacattttctgaatgcctgaacttgattaatgagggatgtccaaaagaagatatactggtcacactgaatgacctgattaaaaatattccagatgccaaaaagcttgttaagtattggatatgtcttgcacttattgaaccaatcacaagtcctattgaaaatattattgcaatctatgagaaagccattctggcaggggctcagcctattgaagagatgcgacacacgattgtagatattctaacaatgaagagtcaagaaaaagctaatttaggagaaaatatggagaagtcttgtgcaagcaaggaagaagtcaaagaagtcagtattgaagatacaggtgttgatgtagatccagaaaaactggaaatggagagtaaacttcatagaaatttgctatttcaagattgtgaaaaagagcaagacaacaaaacaaaagatccaacccatgatgttaaaacccccaatacagaaacgaggacaagttgcttaattaaatataatgtgtctactacgccatacttgcaaagtgtgaaaaaaaaggtgcagtttgatggaacaaattccgcatttaaagagctgaagtttttaacaccagtgagacgttctcgacgtcttcaagagaaaacttctaaattgccagatatgttaaaagatcattatccttgtgtgtcttcattggaacagctaacggagttgggaagagaaactgatgcttttgtatgccgccctaatgcagcactgtgccgggtgtactatgaggctgatacaacataagagaaataaagctctgttagggaatggggtttttattatttgtggggtgttttgttttgagtagctttatattgctcttaggtctggagttggccatgtacctatgtatcctaagcattcacggcagtgagctcctttactaacattcatgttatggcaagagttgtcctctacattggaaagctaatcctaccttgtcagtttcaaccaactgagttttttctttaagaaaggtaaattttgtcagctagtttactatgttccttgaatataaacaggttataatactaccctgttcactttactaaatataagtacagtaatgatgcataattagaaaatgaggtattctaggtaaaatgtatgtttgccttgacatgtttttaaaagttatgatgtacctccctgcctttaaacagaatacttttttcttttttttggcctttctcagattagtcaaaaattctatagaatgactcacttcgaatactaagacacaggaggtttagcctgctttcttaccaaattcatgttacccagacttgtgttctcttgcgtcccttggactgcctgttgattgatggaaagtgtctgcactgacacttttcgtcagtagtctgtagtttcgtggcctcttttgattataactggggtcaccaagaaggtttacttaattaaataccgcatttctaagagaagatactttgtgtaagaaaagatgccacatttagtggtttaacttttgtaacttcacttgatagtttttaagcaattagaatggagttagggaaagaacatatcatactgaacaaatgtcattctagtttagatagcatttctaagataactgatactaatacttgttttcttccctataacataaaaaacttcactgttaagtcatgtcccttgaaacatgatagttacatacacagttttctctccacacataaataacaccactaaagttgttttgtaaggttccaaactaatatggcatatatcaactctacagtttcaaataaatgactttttaattgtaaaagattagttgaaaaactgtatgaatgtgaagatcacatgcttagtcatttttatgttcattccactttgtatatcttttctatttattgacttctcatgttctagagagtaggacttttattccgtgtacctgatatatatacaattaaaatatctgtgtaattatgttttaatgaagtttatttcaacagatattttatgaaatgcagtttaaccacagtgaatgaattttagctttgcttttgaaatacattgtaagatttgacttgaggtttttgacacttaagtacatgcttaatgatatattttcaaaagtcatcagtctacttacataaactttacctaatttttttcactttaacaaaaacataactatgcccttgttttttcatactttgacccaaaatatgccattttgaaataaaatttaagctttgatacac

SEQ ID NO: 124749 - DNA, 3395 bp, Homo sapiens
  Payload ID: 4494
  Gene Symbol: CKAP2
  Gene Name: cytoskeleton associated protein 2
  Uniprot ID: Q8WWK9
  ENST ID: ENST00000490903
  CDS Start-End: 283-2187
tgcgcctgcgctgggtcctccgcctcttaggtccctagcgaatttctgcagggctggggtcgcatcatgtgttatttccaatttcacagcttctccttcgactttatggaaaccgagggttggttgggtcttcaaaactaatattgttattcccttattctacacacgggaaagcagaagaaagtaattctcatctaacccagttctgagcaaagaagacaaaaactcaaggaacatctgttgagaagaaaaacgctttttgcatacaagcaggaaaatgagatgttatccagtagagatcagagagttgtgacatctgaggaccaagttcaagaagggactaaagtgctgaaacttaaaacaaaaatggctgataaagaaaacatgaagagacctgcagagagcaaaaataatacagtggtggggaaacattgtattcctttaaaaccttcaaatgaactaaccaattcaactgtagtaattgacacacataaacctaaggatagtaatcaaactccgcatttgttactaactgaagatgatccccaaagtcaacatatgacattaagccaggcatttcaccttaaaaacaatagtaaaaagaaacaaatgactacagaaaaacaaaagcaagatgctaacatgcccaagaaacctgtgcttggatcttatcgtggccagattgttcagtctaagattaattcatttagaaaacctctacaagtcaaagatgagagttctgcagcaacaaagaaactttcagccactatacctaaagccacaaaacctcagcctgtaaacaccagcagtgtaacagtgaaaagtaatagatcctccaatatgactgccactactaaatttgtgagcactacatctcagaacacacaacttgtgcgacctcctattagaagtcatcacagtaatacccgggacactgtgaaacaaggcatcagtagaacttctgccaatgttacaatccggaaagggcctcatgaaaaagaactattacaatcaaaaacagctttatctagtgtcaaaaccagttcttctcaaggtataataagaaataagactctatcaagatccatagcatctgaagttatagccaggcctgcttcattgtctaatgataaactgatggaaaagtcagagcccgttgaccagcgaagacatactgcaggaaaagcaattgttgatagtagatcagctcagcccaaagaaacctcggaagagagaaaagctcgtctgagtgagtggaaagctggcaaaggaagagtgctaaaaaggccccctaattcagtagttactcagcatgagcctgcaggacaaaatgaaaaaccagttgggtctttttggactaccatggcagaagaagatgaacaaagattatttactgaaaaagtaaacaacacattttctgaatgcctgaacttgattaatgagggatgtccaaaagaagatatactggtcacactgaatgacctgattaaaaatattccagatgccaaaaagcttgttaagtattggatatgtcttgcacttattgaaccaatcacaagtcctattgaaaatattattgcaatctatgagaaagccattctggcaggggctcagcctattgaagagatgcgacacacgattgtagatattctaacaatgaagagtcaagaaaaagctaatttaggagaaaatatggagaagtcttgtgcaagcaaggaagaagtcaaagaagtcagtattgaagatacaggtgttgatgtagatccagaaaaactggaaatggagagtaaacttcatagaaatttgctatttcaagattgtgaaaaagagcaagacaacaaaacaaaagatccaacccatgatgttaaaacccccaatacagaaacgaggacaagttgcttaattaaatataatgtgtctactacgccatacttgcaaagtgtgaaaaaaaaggtgcagtttgatggaacaaattccgcatttaaagagctgaagtttttaacaccagtgagacgttctcgacgtcttcaagagaaaacttctaaattgccagatatgttaaaagatcattatccttgtgtgtcttcattggaacagctaacggagttgggaagagaaactgatgcttttgtatgccgccctaatgcagcactgtgccgggtgtactatgaggctgatacaacataagagaaataaagctctgttagggaatggggtttttattatttgtggggtgttttgttttgagtagctttatattgctcttaggtctggagttggccatgtacctatgtatcctaagcattcacggcagtgagctcctttactaacattcatgttatggcaagagttgtcctctacattggaaagctaatcctaccttgtcagtttcaaccaactgagttttttctttaagaaaggtaaattttgtcagctagtttactatgttccttgaatataaacaggttataatactaccctgttcactttactaaatataagtacagtaatgatgcataattagaaaatgaggtattctaggtaaaatgtatgtttgccttgacatgtttttaaaagttatgatgtacctccctgcctttaaacagaatacttttttcttttttttggcctttctcagattagtcaaaaattctatagaatgactcacttcgaatactaagacacaggaggtttagcctgctttcttaccaaattcatgttacccagacttgtgttctcttgcgtcccttggactgcctgttgattgatggaaagtgtctgcactgacacttttcgtcagtagtctgtagtttcgtggcctcttttgattataactggggtcaccaagaaggtttacttaattaaataccgcatttctaagagaagatactttgtgtaagaaaagatgccacatttagtggtttaacttttgtaacttcacttgatagtttttaagcaattagaatggagttagggaaagaacatatcatactgaacaaatgtcattctagtttagatagcatttctaagataactgatactaatacttgttttcttccctataacataaaaaacttcactgttaagtcatgtcccttgaaacatgatagttacatacacagttttctctccacacataaataacaccactaaagttgttttgtaaggttccaaactaatatggcatatatcaactctacagtttcaaataaatgactttttaattgtaaaagattagttgaaaaactgtatgaatgtgaagatcacatgcttagtcatttttatgttcattccactttgtatatcttttctatttattgacttctcatgttctagagagtaggacttttattccgtgtacctgatatatatacaattaaaatatctgtgtaatt

SEQ ID NO: 124750 - DNA, 537 bp, Homo sapiens
  Payload ID: 4494
  Gene Symbol: CKAP2
  Gene Name: cytoskeleton associated protein 2
  ENST ID: ENST00000480747
  CDS Start-End: 247-537
agcgaatttctgcagggctggggtcgcatcatgtgttatttccaatttcacagcttctccttcgactttatggaaaccgagggttggttgggtcttcaaaactaatattgttattcccttattctacacacgggaaagcagaagaaagtaattctcatctaacccagttctgagcaaagaagacaaaaactcaaggaacatctgttgagaagaaaaacgctttttgcatacaagcaggaaaatgagatgttatccagtagtagagatcagagagttgtgacatctgaggaccaagttcaagaagggactaaagtgctgaaacttaaaacaaaaatggctgataaagaaaacatgaagagacctgcagagagcaaaaataatacagtggtggggaaacattgtattcctttaaaaccttcaaatgaactaaccaattcaactgtagtaattgacacacataaacctaaggatagtaatcaaactccgcatttgttactaactgaagatgatccccaaagtcaacatatgacattaagc

SEQ ID NO: 124751 - DNA, 579 bp, Homo sapiens
  Payload ID: 4494
  Gene Symbol: CKAP2
  Gene Name: cytoskeleton associated protein 2
  ENST ID: ENST00000468284
  CDS Start-End: 299-579
accaatgggcggagacggcagccgcgccgtctgacggcttagccgcggtgcagactgcggcggcggtggtctgaggaagttctatcttggcgctaaagcggagacgcatcccccgacccgaggctacgatgagcacaccggccgtgccccaggacctgcagctgcccccgagtcagagggcgcagtccgcattcaaagagcaaagaagacaaaaactcaaggaacatctgttgagaagaaaaacgctttttgcatacaagcaggaaaatgagatgttatccaggctgataaagaaaacatgaagagacctgcagagagcaaaaataatacagtggtggggaaacattgtattcctttaaaaccttcaaatgaactaaccaattcaactgtagtaattgacacacataaacctaaggatagtaatcaaactccgcatttgttactaactgaagatgatccccaaagtcaacatatgacattaagccaggcatttcaccttaaaaacaatagtaaaaagaaacaaatgactacagaaaaacaaaagcaagatgctaacatgcccaagaaacctgtgcttgg

SEQ ID NO: 124752 - DNA, 4533 bp, Homo sapiens
  Payload ID: 4495
  Gene Symbol: CKAP2L
  Gene Name: cytoskeleton associated protein 2-like
  Uniprot ID: Q8IYA6
  ENST ID: ENST00000302450
  CDS Start-End: 80-2317
aatgaggacgcgtggacgcgcggcacgccggtcctggctacaggcgcggcgtttgaagaaaaactgtcactgaagagtcatggtggggcccgggcctaccgctgctgccgctgtcgaagagcggcagagaaagcttcaggagtaccttgcagccaagggaaaactgaagagccaaaacaccaagccttatctaaaatccaagaataattgccagaatcaaccaccttctaaatctactattagacccaaaaatgatgttaccaaccatgttgttttgcctgtcaaacctaaaaggtccatcagcattaaactccagcccagaccacctaatactgcagggtcccagaagccgaagttggagccaccaaaacttctgggcaaaaggctgacttcagaatgtgtttcttctaacccatactctaagccttctagcaagagttttcaacagtgtgaagctggatcgtccacaacaggagaactgtcaagaaaacctgtggggtcacttaatatagagcaattgaaaactacaaagcagcagttaacagatcaaggaaatggtaaatgtatagactttatgaataatatccatgttgaaaacgaatctttggataactttctaaaagaaacaaacaaagagaacttgctcgatatcttaacagaacctgagaggaagccagatcctaaattatataccagaagtaagccaaagactgactcttataatcaaaccaagaacagtttagttcctaaacaagccttgggcaaaagttcagttaatagtgctgttctgaaagatagggttaataaacaatttgttggagaaacacaaagcaggactttcccagtaaaatcacagcaactctctagaggagcagatcttgcaagaccaggagtaaaaccctcaaggacggttccctctcactttattcggacccttagtaaagttcagtcatcaaagaaaccagtagtcaagaacatcaaagatataaaggttaataggagtcaatatgaaagaccaaatgaaactaagatacggtcataccctgttactgaacagagagtgaagcacaccaaacccagaacataccccagtttgcttcagggtgaatataacaacagacatccaaacatcaagcaagatcagaagtccagccaagtttgtatacctcagacatcatgtgtactgcaaaagtcaaaagccataagccagaggcctaatttgacagttggcagatttaattcagccattccaagcacccctagcataagaccaaatggaaccagtggtaataaacataacaataatggctttcagcaaaaagcacagactttggactccaagttgaaaaaggctgttccccagaaccattttctgaacaagacagctcccaaaactcaagctgatgtcacaaccgtaaatgggacccaaacaaacccaaatattaaaaagaaggcaacagcagaggatcgaaggaaacaactagaagaatggcagaaatctaagggaaaaacctataaacggcctcctatggaacttaaaacaaaaagaaaagtaataaaggaaatgaatatttcattctggaagagcattgaaaaagaagaggaagaaaagaaagcacaactcgaactgtccagtaaaattaacaacactctgacagaatgtctgaacctcatcgaagggggtgtaccttctaatgaaatacttaacatattgtccagcattcctgaagctgaaaaatttgctaaattctggatctgcaaagcaaagttgttggcaagtaaaggcacctttgatgttattgggctatatgaagaggccattaaaaatggggcaacaccaatacaagagttgcggaaagttgttcttaatatcttgcaagactcaaacagaaccacagaagggattacttctgactctttagttgctgaaactagtataacatcagtggaagagctggccaagaagatggaatctgtgaagtcttgtctttctccaaaagagagggaacaagtcacggcgacaccccgaatagccaaggcagaacagcataattatcctggtatcaaattacagattggtccaatccctagaataaatgggatgccggaagtgcaagacatgaaatttatcactcctgtacggcgttcgtcgaggattgagcgagcagtgtcccgctacccagaaatgctgcaggaacacgatttagtagtggcttctcttgatgaactgttagaagtggaagaaacaaaatgttttatattccgtagaaatgaggcgctgcctgtaacattggggtttcaaacccctgaatcataatttcttgatgctttttttaaaaaaggtgtttcagaaccaacataagacaagaaatattcttgtccaagtgacctggaaaaaaagagaggcatcatggatgcagattatggacgctcaggacttaagtaattcactgggcttactctcaaattttctctccccatgggaaaatctttgctttatgtgtttaagaccagtttgccagttttacagtatacataaatttcaaacttttgaatatttaccctacaactatgataaatatttatactttattgatctactttaatcccaacatagttttttatatcagaaggttggtcccacaatataatgggacttttctttctgcatccaccttagcagagggcaagttctttcatcgtggaagatctgaactttgacgctagcttgacaggctgaatggaccttgacagatggccaagtcaaaacccctcattttacagatgagtttatgctagctgtgcctttgctcagagatcataaatttatgtgtgatctttgactttcatcacagtatccttgtaaatgagagagaattcttgttttttctatgccaggtctcctcagatgaaacacaatcctgaattggcatggtcgtctagcttttatattcaaacctagttttgcatttgttactcagaaacacttcaagtaacaaaaggggggcaggggagaggggtggggagtggacacttgcttcttcagttctttgctcagctagggtatagctggcctgagaaggcagtgcaagccccagagactgttgtaggttgctttttcttcctcctgggcaactatttgtggaaaggttttaccttagtcattatgtaaatataattgtgtagaaaaacctagtcaacacattttaaattttagctttcttaatatttaagtattatcttaaaacaacattaaatttctattagttcctgcttgtttatcttatttattatagaaaaccatgataatggctttgcatagagaattaggagtttgtctaaggatataccagttggctgtcctaagaaacaaggagcattcattaccaaggagaatggactttgatcaaaggtctatcagcctcatccaggaactagatttttttaagggaagcagatctatttctgaaagtcagatttataataaagctcaaaaaactgagctataaacctgtaataccagcagactttcaataagagactcttacaactcaattgtggaaaaactaataattaaaaatgggcaaaggacctgagcagacatttctccaaagaagacataagaaatggccagtaggtatagatatgaaaaggtgttcagcatcattaatcataagaataatgtaaattaaaaccactgtgagctatcacctcacatctataagaatggctattaacaagacatgagataaatgttgatgagattgtggagaaaagagaaccctagtacactgtttgtgggcgtgtagactggggcagccgttatggaaaacggtatggaggctcctaaagaaattaaaaatagaactgttatctgaccctcttctgagtaagtatgtacccaaagaagatgaaatcaccagctgggcgcagtgactcacacctgtaatcccagcactttggagtgggtgaatcacctgaggtcaggagttcaagaccagcttgaccaacatggtgaaaccccgtctctactaaaaatacaaaaagtaggcgggcatggtgacgggcacctgtaatcccagctacttgggaggctgaggcagaagaatcacttgaactcgggaggtggaggttgcagtgagccaaaattgcgtcactgcactccagcctgggttacagagcaagactccatctcaaaaaaaaaaaagatgaaatcatcacctcataaagatatctgcactcacatgtttgtggcagtgttattctcaatagccaagatgtggaaacaacctaaatgcccatcaatggacaaataaagaaaatacggcatatgcatgccgtggaatagtattcatccttggaaaagagggagttcttgccatttgccacaacatagatggacctggagaacattatgctaagtgaaataagccagacccaaggaaaaatactgcatgatctcacatatggaatatttaattttttaagaaagagctcaagtacacagagaaagtgcttaccacagattgggga

SEQ ID NO: 124753 - DNA, 2455 bp, Homo sapiens
  Payload ID: 4495
  Gene Symbol: CKAP2L
  Gene Name: cytoskeleton associated protein 2-like
  ENST ID: ENST00000435431
  CDS Start-End: 20-586
aaactgtcactgaagagtcatggtggggcccgggcctaccgctgctgccgctgtcgaagagcggcagagaaagcttcaggagtaccttgcagccaagggaaaactgaagagccaaaacaccaagccttatctaaaatccaagaataattgccagaatcaaccaccttctaaatctactattagacccaaaaatgatgttaccaaccatgttgttttgcctgtcaaacctaaaaggtccatcagcattaaactccagcccagaccacctaatactgcagggtcccagaagccgaagttggagccaccaaaacttctgggcaaaaggctgacttcagaatgtgtttcttctaacccatactctaagccttctagcaagagttttcaacagtgtgaagctggatcgtccacaacaggagaactgtcaagaaaacctgtggggtcacttaatatagagcaattgaaaactacaaagcagcagttaacagatcaaggaaatgcaaaaagcacagactttggactccaagttgaaaaaggctgttccccagaaccattttctgaacaagacagctcccaaaactcaagctgatgtcacaaccgtaaatgggacccaaacaaacccaaatattaaaaagaaggcaacagcagaggatcgaaggaaacaactagaagaatggcagaaatctaagggaaaaacctataaacggcctcctatggaacttaaaacaaaaagaaaagtaataaaggaaatgaatatttcattctggaagagcattgaaaaagaagaggaagaaaagaaagcacaactcgaactgtccagtaaaattaacaacactctgacagaatgtctgaacctcatcgaagggggtgtaccttctaatgaaatacttaacatattgtccagcattcctgaagctgaaaaatttgctaaattctggatctgcaaagcaaagttgttggcaagtaaaggcacctttgatgttattgggctatatgaagaggccattaaaaatggggcaacaccaatacaagagttgcggaaagttgttcttaatatcttgcaagactcaaacagaaccacagaagggattacttctgactctttagttgctgaaactagtataacatcagtggaagagctggccaagaagatggaatctgtgaagtcttgtctttctccaaaagagagggaacaagtcacggcgacaccccgaatagccaaggcagaacagcataattatcctggtatcaaattacagattggtccaatccctagaataaatgggatgccggaagtgcaagacatgaaatttatcactcctgtacggcgttcgtcgaggattgagcgagcagtgtcccgctacccagaaatgctgcaggaacacgatttagtagtggcttctcttgatgaactgttagaagtggaagaaacaaaatgttttatattccgtagaaatgaggcgctgcctgtaacattggggtttcaaacccctgaatcataatttcttgatgctttttttaaaaaaggtgtttcagaaccaacataagacaagaaatattcttgtccaagtgacctggaaaaaaagagaggcatcatggatgcagattatggacgctcaggacttaagtaattcactgggcttactctcaaattttctctccccatgggaaaatctttgctttatgtgtttaagaccagtttgccagttttacagtatacataaatttcaaacttttgaatatttaccctacaactatgataaatatttatactttattgatctactttaatcccaacatagttttttatatcagaaggttggtcccacaatataatgggacttttctttctgcatccaccttagcagagggcaagttctttcatcgtggaagatctgaactttgacgctagcttgacaggctgaatggaccttgacagatggccaagtcaaaacccctcattttacagatgagtttatgctagctgtgcctttgctcagagatcataaatttatgtgtgatctttgactttcatcacagtatccttgtaaatgagagagaattcttgttttttctatgccaggtctcctcagatgaaacacaatcctgaattggcatggtcgtctagcttttatattcaaacctagttttgcatttgttactcagaaacacttcaagtaacaaaaggggggcaggggagaggggtggggagtggacacttgcttcttcagttctttgctcagctagggtatagctggcctgagaaggcagtgcaagccccagagactgttgtaggttgctttttcttcctcctgggcaactatttgtggaaaggttttaccttagtcattatgtaaatataattgtgtagaaaaacctagtcaacacattttaaattttagctttcttaatatttaagtattatcttaaaacaacattaaatttctattagttcctg

SEQ ID NO: 124754 - DNA, 6532 bp, Homo sapiens
  Payload ID: 4496
  Gene Symbol: CKAP5
  Gene Name: cytoskeleton associated protein 5
  Uniprot ID: Q14008
  ENST ID: ENST00000312055
  CDS Start-End: 127-6045
aataaagaacgaggacactgcggggtgtgcggcggcccaagcggtttcaaacggcttagagcaggccgcttggttctgacccagctgaggaaatactcttaattctaaggaaaacctggaagcacaatgggagatgacagtgagtggttgaaactgccagttgatcagaaatgtgaacacaagctgtggaaagcaaggttaagtgggtatgaagaggccctgaagatcttccagaaaataaaggatgaaaagagcccagagtggtccaaatttttaggattgatcaaaaaatttgtcactgattccaatgcagtggttcaattgaaaggattagaagctgcacttgtttatgttgaaaatgcccatgtagcaggaaaaaccacaggagaagttgtgtcaggtgttgtaagtaaggtgttcaatcaacctaaagctaaagccaaggagctgggcatagagatctgtcttatgtacatagagattgagaaaggagaggctgttcaagaagagctcctgaaaggcttggacaataagaatcccaagatcatagtggcctgtatagagacactgaggaaagccttaagtgaatttggttccaaaatcatcttgcttaagccaattatcaaagtgttgccaaaactctttgagtctcgagagaaggctgttcgagatgaagccaaactaattgctgtggagatttacagatggattcgggatgctctgagacccccattacaaaatataaactctgttcagttgaaagaactagaagaagaatgggtcaaactgccaacaagtgctcctagacctactcgatttcttcgttcccaacaagaactagaagctaaattggaacaacaacagtctgctggtggagatgctgaaggaggtggtgatgatggtgatgaggtgccacaaatagatgcttatgagcttttagaagctgtagaaatcctttccaaacttcccaaagacttttatgacaaaattgaggcaaaaaaatggcaagagagaaaagaggccctggagtctgtagaagtactaataaaaaaccccaaactggaagctggcgattatgcagatttagtaaaagcattaaagaaggttgttggaaaggacaccaatgtcatgttggtggctttggcagcaaaatgtcttactggcctggctgttgggctaaggaagaaatttggacaatatgcaggacatgttgtgccaaccatcttggagaaattcaaagagaagaaacctcaagtggtacaagccctgcaggaggcaattgatgcaatcttccttactaccacactacagaacatcagtgaggatgttttagcagtaatggataataaaaatccaaccatcaagcagcagacatctctttttattgcaagaagtttccgccactgcactgcttctaccctgccaaagagcttgctaaagcccttttgtgctgcactacttaagcacatcaatgattctgctcctgaagtcagagatgccgcatttgaagcattgggtactgctttgaaggtggttggcgagaaagcagtaaacccattcctagctgatgtggacaaactcaagcttgataagatcaaagaatgttcagaaaaggtagaactgatacatggtaagaaagctggactagctgctgataagaaggaattcaaacctctgcctggaaggactgctgcttcaggggctgcaggagataaggacacaaaggacatttctgcacccaaaccaggacctctaaaaaaggcacctgctgctaaggctggtgggccaccaaaaaaggggaaaccagctgcaccaggaggcgcagggaatactggaaccaagaacaagaaaggactggagactaaagaaatagtggagcctgagctctcgatagaagtatgtgaagaaaaagcttcagctgttcttccccctacctgtatacagcttcttgacagcagtaactggaaagaaaggctggcttgtatggaagagttccagaaggctgttgagctaatggaccgaactgaaatgccatgccaggcattagtgaggatgctagccaagaaacctggatggaaagaaactaattttcaggtgatgcaaatgaagcttcatatagttgctttgattgcccagaagggaaatttttccaaaacgtcagctcaggttgtattagatggccttgtggacaagattggagatgtgaaatgtgggaacaatgcaaaagaagctatgacagcaatagccgaagcctgtatgttaccatggactgctgaacaggttgtgtcaatggctttctcacaaaagaatcccaaaaatcagtcagaaactctgaattggctatcaaatgccataaaagaatttggtttttctgggttgaatgtcaaagctttcattagcaatgtgaagacagctcttgctgcaacaaacccagctgtgaggactgctgccataaccctgcttggcgtgatgtatctgtatgttggtccctctttgcgaatgttctttgaggatgagaagcctgccctcctatcccagatagatgcagaatttgagaagatgcagggacaaagtccacctgctccaaccagaggaatttccaagcatagcacaagtggtacagatgaaggagaagatggagatgaaccagatgacgggagcaatgatgtcgttgatcttttgccgaggacggagatcagtgataaaatcacttcagagttggtatctaagattggtgataagaattggaagattaggaaagaaggcctagatgaagtggcaggtattattaatgacgcaaaatttatccaaccgaatataggtgaacttccaactgccttgaagggtcgactcaatgattcaaataaaatcttggtacagcaaacgctgaatatcctgcaacaactggcagtagccatgggcccaaatattaagcaacatgtaaaaaatttaggcatccctatcatcacagtccttggagacagcaagaacaatgttcgagctgctgccctagcgactgtgaatgcttgggcagaacagactggcatgaaggaatggctggaaggagaagatctttctgaagagctcaaaaaggaaaatcctttcttgaggcaagagcttctgggctggctggctgagaaactacctactcttcgttccacccctacagaccttatcctttgtgttcctcatctctactcctgcctagaagatcgaaatggagatgtgcgaaagaaggcccaagatgccttgccattcttcatgatgcatttaggatatgaaaaaatggccaaggctactgggaaactaaagccaacttctaaagatcaggtattggccatgctagagaaagccaaagttaacatgccagccaagcctgctccacccactaaagcaacttctaaaccaatgggagggtccgctccagccaaattccagcctgcatcagcacctgctgaagattgtatttccagcagtacagaacccaaacctgatccaaaaaaggccaaagctccaggattatcctctaaagcaaagagtgcacaagggaagaagatgccaagcaaaaccagcttaaaggaggatgaagacaaatccgggcctatttttattgttgttccaaatggaaaagagcaaaggatgaaagatgaaaaaggattgaaggtgctaaagtggaattttactaccccacgggatgaatacattgagcaactaaagactcaaatgtctagctgtgtggctaaatggttacaagatgagatgtttcactcagactttcagcatcataacaaagcccttgctgttatggttgatcacttggagagtgaaaaagaaggagttattggttgcctggatcttatcttaaagtggcttaccctgaggttttttgacaccaatacaagcgtcctgatgaaagcactagaatatttaaaattgctcttcaccttgctaagtgaagaagaatatcatcttactgagaatgaagcatcttccttcatcccctatcttgtcgtcaaggttggagaaccaaaggatgtcattcgtaaagatgttcgtgccatcctgaaccggatgtgccttgtctacccagctagcaagatgtttccctttatcatggaaggaaccaaatccaaaaactctaagcagagagcagagtgcctggaagagctgggatgtctggttgagtcctatggcatgaatgtttgccaaccaaccccaggaaaagccttaaaggaaatagctgttcacataggagaccgtgacaatgctgtacgcaatgctgcactcaacaccattgtaacggtgtacaatgtacatggggatcaggtgttcaaactgattggaaatctttctgaaaaggatatgagcatgctcgaggagaggattaagcggtcagcaaagagaccctctgctgcaccaataaaacaggtggaagagaaacctcagcgtgcacagaacataagctccaatgccaacatgttacgcaagggaccagctgaggacatgtcttccaaactcaaccaagcccgaagcatgagtgggcatcctgaggcagcccagatggtccgccgagaattccagctggatctagatgagattgagaatgacaatggtacagtccgatgtgaaatgccagaacttgttcagcacaaactggatgacatttttgagccagtccttattcctgaacccaagatccgggctgtttctccacacttcgatgacatgcacagtaatacagcatccacaatcaatttcattatctcccaagtagccagtggtgacatcaacacaagtatccaagctctgacacagctgtttcagatagagagccttgcccgggaggcctccactggagtactaaaagacctaatgcatggcctcatcaccttaatgctggattctcggattgaagatcttgaggaaggacaacaggtcatccgctctgtgaacctcttggtggtgaaggttctggagaagtcagaccagaccaacatcctgagtgccctacttgttttgctccaagacagcctgctagcaacagccagttctcccaaattctcagagcttgttatgaagtgtctctggagaatggttcgactgttgcctgataccatcaatagcattaacctagacagaattcttctggatatccacattttcatgaaggtcttccccaaagagaaactgaagcaatgcaaaagtgaatttcccataaggaccctaaagaccctgctacacaccttatgcaaattaaaagggcccaagatcctggaccacctaacgatgatcgacaacaaaaacgagtctgagctggaggcccatctctgccggatgatgaagcacagtatggaccagactgggagcaagtctgataaggaaacagaaaagggagcatctcgaatagatgaaaaatcatcaaaggccaaagtgaatgatttcttagctgagatttttaagaagattggctctaaagaaaacactaaagagggactagcagagttatatgaatataagaagaaatactcagatgctgacattgaaccatttctgaaaaattcctcacagttcttccagagctatgtcgaaagaggccttcgggtgattgagatggagagggagggcaaaggtcgtatttccacttcaacaggcatctcccctcagatggaagtcacatgtgtgcccacgcccacaagcacagtgtcctccataggtaacacaaatggggaagaagtggggccatctgtctacttggaaaggctaaagatcctccgacagcgatgtggtctggacaacacaaagcaagatgaccgacctcctttgacctctttgctctccaaaccagcagttcctactgtcgcctcttccacagacatgctccacagcaaactctctcagctccgggagtcacgggagcagcaccagcattcagacctggattctaaccagactcactcttcaggaactgtgacctcctcctcctccacagctaacatagacgacttgaaaaaaagactggagagaataaagagcagtcgcaaatgaagctgccccactcccccggcaccctgcagctttagtttactaaactagaagtcctcatagtttaaaatggcctcagcaggcctagtgtatacaaactggttgtatgtatcatgccgtggagctagggggaggagtcattgtggcacaagtatttgtacatactctgcttctctctgtcagcgtcctgctgctctagaagactgtccgtggatgagtttagtgtacagacttgtaaacagctgccccctctctgctcagtctagttcccagatccttttcttttctttttaattgctcatttgtaaaattgtcctaatctttcctagctttttaatagttaatattagaaactctttaatagttttcctttcagtttgtgagctcttctctgtcgccctgaagggtcactgtattctgtatgaatgcatggcatgatacaactaatttaagagtcttttataaataaagtttgcattaactatacctg

SEQ ID NO: 124755 - DNA, 6428 bp, Homo sapiens
  Payload ID: 4496
  Gene Symbol: CKAP5
  Gene Name: cytoskeleton associated protein 5
  Uniprot ID: Q14008
  ENST ID: ENST00000354558
  CDS Start-End: 27-5945
aattctaaggaaaacctggaagcacaatgggagatgacagtgagtggttgaaactgccagttgatcagaaatgtgaacacaagctgtggaaagcaaggttaagtgggtatgaagaggccctgaagatcttccagaaaataaaggatgaaaagagcccagagtggtccaaatttttaggattgatcaaaaaatttgtcactgattccaatgcagtggttcaattgaaaggattagaagctgcacttgtttatgttgaaaatgcccatgtagcaggaaaaaccacaggagaagttgtgtcaggtgttgtaagtaaggtgttcaatcaacctaaagctaaagccaaggagctgggcatagagatctgtcttatgtacatagagattgagaaaggagaggctgttcaagaagagctcctgaaaggcttggacaataagaatcccaagatcatagtggcctgtatagagacactgaggaaagccttaagtgaatttggttccaaaatcatcttgcttaagccaattatcaaagtgttgccaaaactctttgagtctcgagagaaggctgttcgagatgaagccaaactaattgctgtggagatttacagatggattcgggatgctctgagacccccattacaaaatataaactctgttcagttgaaagaactagaagaagaatgggtcaaactgccaacaagtgctcctagacctactcgatttcttcgttcccaacaagaactagaagctaaattggaacaacaacagtctgctggtggagatgctgaaggaggtggtgatgatggtgatgaggtgccacaaatagatgcttatgagcttttagaagctgtagaaatcctttccaaacttcccaaagacttttatgacaaaattgaggcaaaaaaatggcaagagagaaaagaggccctggagtctgtagaagtactaataaaaaaccccaaactggaagctggcgattatgcagatttagtaaaagcattaaagaaggttgttggaaaggacaccaatgtcatgttggtggctttggcagcaaaatgtcttactggcctggctgttgggctaaggaagaaatttggacaatatgcaggacatgttgtgccaaccatcttggagaaattcaaagagaagaaacctcaagtggtacaagccctgcaggaggcaattgatgcaatcttccttactaccacactacagaacatcagtgaggatgttttagcagtaatggataataaaaatccaaccatcaagcagcagacatctctttttattgcaagaagtttccgccactgcactgcttctaccctgccaaagagcttgctaaagcccttttgtgctgcactacttaagcacatcaatgattctgctcctgaagtcagagatgccgcatttgaagcattgggtactgctttgaaggtggttggcgagaaagcagtaaacccattcctagctgatgtggacaaactcaagcttgataagatcaaagaatgttcagaaaaggtagaactgatacatggtaagaaagctggactagctgctgataagaaggaattcaaacctctgcctggaaggactgctgcttcaggggctgcaggagataaggacacaaaggacatttctgcacccaaaccaggacctctaaaaaaggcacctgctgctaaggctggtgggccaccaaaaaaggggaaaccagctgcaccaggaggcgcagggaatactggaaccaagaacaagaaaggactggagactaaagaaatagtggagcctgagctctcgatagaagtatgtgaagaaaaagcttcagctgttcttccccctacctgtatacagcttcttgacagcagtaactggaaagaaaggctggcttgtatggaagagttccagaaggctgttgagctaatggaccgaactgaaatgccatgccaggcattagtgaggatgctagccaagaaacctggatggaaagaaactaattttcaggtgatgcaaatgaagcttcatatagttgctttgattgcccagaagggaaatttttccaaaacgtcagctcaggttgtattagatggccttgtggacaagattggagatgtgaaatgtgggaacaatgcaaaagaagctatgacagcaatagccgaagcctgtatgttaccatggactgctgaacaggttgtgtcaatggctttctcacaaaagaatcccaaaaatcagtcagaaactctgaattggctatcaaatgccataaaagaatttggtttttctgggttgaatgtcaaagctttcattagcaatgtgaagacagctcttgctgcaacaaacccagctgtgaggactgctgccataaccctgcttggcgtgatgtatctgtatgttggtccctctttgcgaatgttctttgaggatgagaagcctgccctcctatcccagatagatgcagaatttgagaagatgcagggacaaagtccacctgctccaaccagaggaatttccaagcatagcacaagtggtacagatgaaggagaagatggagatgaaccagatgacgggagcaatgatgtcgttgatcttttgccgaggacggagatcagtgataaaatcacttcagagttggtatctaagattggtgataagaattggaagattaggaaagaaggcctagatgaagtggcaggtattattaatgacgcaaaatttatccaaccgaatataggtgaacttccaactgccttgaagggtcgactcaatgattcaaataaaatcttggtacagcaaacgctgaatatcctgcaacaactggcagtagccatgggcccaaatattaagcaacatgtaaaaaatttaggcatccctatcatcacagtccttggagacagcaagaacaatgttcgagctgctgccctagcgactgtgaatgcttgggcagaacagactggcatgaaggaatggctggaaggagaagatctttctgaagagctcaaaaaggaaaatcctttcttgaggcaagagcttctgggctggctggctgagaaactacctactcttcgttccacccctacagaccttatcctttgtgttcctcatctctactcctgcctagaagatcgaaatggagatgtgcgaaagaaggcccaagatgccttgccattcttcatgatgcatttaggatatgaaaaaatggccaaggctactgggaaactaaagccaacttctaaagatcaggtattggccatgctagagaaagccaaagttaacatgccagccaagcctgctccacccactaaagcaacttctaaaccaatgggagggtccgctccagccaaattccagcctgcatcagcacctgctgaagattgtatttccagcagtacagaacccaaacctgatccaaaaaaggccaaagctccaggattatcctctaaagcaaagagtgcacaagggaagaagatgccaagcaaaaccagcttaaaggaggatgaagacaaatccgggcctatttttattgttgttccaaatggaaaagagcaaaggatgaaagatgaaaaaggattgaaggtgctaaagtggaattttactaccccacgggatgaatacattgagcaactaaagactcaaatgtctagctgtgtggctaaatggttacaagatgagatgtttcactcagactttcagcatcataacaaagcccttgctgttatggttgatcacttggagagtgaaaaagaaggagttattggttgcctggatcttatcttaaagtggcttaccctgaggttttttgacaccaatacaagcgtcctgatgaaagcactagaatatttaaaattgctcttcaccttgctaagtgaagaagaatatcatcttactgagaatgaagcatcttccttcatcccctatcttgtcgtcaaggttggagaaccaaaggatgtcattcgtaaagatgttcgtgccatcctgaaccggatgtgccttgtctacccagctagcaagatgtttccctttatcatggaaggaaccaaatccaaaaactctaagcagagagcagagtgcctggaagagctgggatgtctggttgagtcctatggcatgaatgtttgccaaccaaccccaggaaaagccttaaaggaaatagctgttcacataggagaccgtgacaatgctgtacgcaatgctgcactcaacaccattgtaacggtgtacaatgtacatggggatcaggtgttcaaactgattggaaatctttctgaaaaggatatgagcatgctcgaggagaggattaagcggtcagcaaagagaccctctgctgcaccaataaaacaggtggaagagaaacctcagcgtgcacagaacataagctccaatgccaacatgttacgcaagggaccagctgaggacatgtcttccaaactcaaccaagcccgaagcatgagtgggcatcctgaggcagcccagatggtccgccgagaattccagctggatctagatgagattgagaatgacaatggtacagtccgatgtgaaatgccagaacttgttcagcacaaactggatgacatttttgagccagtccttattcctgaacccaagatccgggctgtttctccacacttcgatgacatgcacagtaatacagcatccacaatcaatttcattatctcccaagtagccagtggtgacatcaacacaagtatccaagctctgacacagctgtttcagatagagagccttgcccgggaggcctccactggagtactaaaagacctaatgcatggcctcatcaccttaatgctggattctcggattgaagatcttgaggaaggacaacaggtcatccgctctgtgaacctcttggtggtgaaggttctggagaagtcagaccagaccaacatcctgagtgccctacttgttttgctccaagacagcctgctagcaacagccagttctcccaaattctcagagcttgttatgaagtgtctctggagaatggttcgactgttgcctgataccatcaatagcattaacctagacagaattcttctggatatccacattttcatgaaggtcttccccaaagagaaactgaagcaatgcaaaagtgaatttcccataaggaccctaaagaccctgctacacaccttatgcaaattaaaagggcccaagatcctggaccacctaacgatgatcgacaacaaaaacgagtctgagctggaggcccatctctgccggatgatgaagcacagtatggaccagactgggagcaagtctgataaggaaacagaaaagggagcatctcgaatagatgaaaaatcatcaaaggccaaagtgaatgatttcttagctgagatttttaagaagattggctctaaagaaaacactaaagagggactagcagagttatatgaatataagaagaaatactcagatgctgacattgaaccatttctgaaaaattcctcacagttcttccagagctatgtcgaaagaggccttcgggtgattgagatggagagggagggcaaaggtcgtatttccacttcaacaggcatctcccctcagatggaagtcacatgtgtgcccacgcccacaagcacagtgtcctccataggtaacacaaatggggaagaagtggggccatctgtctacttggaaaggctaaagatcctccgacagcgatgtggtctggacaacacaaagcaagatgaccgacctcctttgacctctttgctctccaaaccagcagttcctactgtcgcctcttccacagacatgctccacagcaaactctctcagctccgggagtcacgggagcagcaccagcattcagacctggattctaaccagactcactcttcaggaactgtgacctcctcctcctccacagctaacatagacgacttgaaaaaaagactggagagaataaagagcagtcgcaaatgaagctgccccactcccccggcaccctgcagctttagtttactaaactagaagtcctcatagtttaaaatggcctcagcaggcctagtgtatacaaactggttgtatgtatcatgccgtggagctagggggaggagtcattgtggcacaagtatttgtacatactctgcttctctctgtcagcgtcctgctgctctagaagactgtccgtggatgagtttagtgtacagacttgtaaacagctgccccctctctgctcagtctagttcccagatccttttcttttctttttaattgctcatttgtaaaattgtcctaatctttcctagctttttaatagttaatattagaaactctttaatagttttcctttcagtttgtgagctcttctctgtcgccctgaagggtcactgtattctgtatgaatgcatggcatgatacaactaatttaagagtcttttataaataaagtttgcattaactata

SEQ ID NO: 124756 - DNA, 498 bp, Homo sapiens
  Payload ID: 4496
  Gene Symbol: CKAP5
  Gene Name: cytoskeleton associated protein 5
  ENST ID: ENST00000527333
  CDS Start-End: 1-498
acgcaagggaccagctgaggacatgtcttccaaactcaaaattatgtatcgcacttataggatccaagcccgaagcatgagtgggcatcctgaggcagcccagatggtccgccgagaattccagctggatctagatgagattgagaatgacaatggtacagtccgatgtgaaatgccagaacttgttcagcacaaactggatgacatttttgagccagtccttattcctgaacccaagatccgggctgtttctccacacttcgatgacatgcacagtaatacagcatccacaatcaatttcattatctcccaagtagccagtggtgacatcaacacaagtatccaagctctgacacagctaagactcatctacaacacacacatggcagatgagaaattggagaaggacgagatcatcaagttgtatagctgtatcattggcaacatgatttcgctgtttcagatagagagccttgcccgggaggcctccactggagt

SEQ ID NO: 124757 - DNA, 7121 bp, Homo sapiens
  Payload ID: 4496
  Gene Symbol: CKAP5
  Gene Name: cytoskeleton associated protein 5
  Uniprot ID: Q14008
  ENST ID: ENST00000529230
  CDS Start-End: 48-6146
cccagctgaggaaatactcttaattctaaggaaaacctggaagcacaatgggagatgacagtgagtggttgaaactgccagttgatcagaaatgtgaacacaagctgtggaaagcaaggttaagtgggtatgaagaggccctgaagatcttccagaaaataaaggatgaaaagagcccagagtggtccaaatttttaggattgatcaaaaaatttgtcactgattccaatgcagtggttcaattgaaaggattagaagctgcacttgtttatgttgaaaatgcccatgtagcaggaaaaaccacaggagaagttgtgtcaggtgttgtaagtaaggtgttcaatcaacctaaagctaaagccaaggagctgggcatagagatctgtcttatgtacatagagattgagaaaggagaggctgttcaagaagagctcctgaaaggcttggacaataagaatcccaagatcatagtggcctgtatagagacactgaggaaagccttaagtgaatttggttccaaaatcatcttgcttaagccaattatcaaagtgttgccaaaactctttgagtctcgagagaaggctgttcgagatgaagccaaactaattgctgtggagatttacagatggattcgggatgctctgagacccccattacaaaatataaactctgttcagttgaaagaactagaagaagaatgggtcaaactgccaacaagtgctcctagacctactcgatttcttcgttcccaacaagaactagaagctaaattggaacaacaacagtctgctggtggagatgctgaaggaggtggtgatgatggtgatgaggtgccacaaatagatgcttatgagcttttagaagctgtagaaatcctttccaaacttcccaaagacttttatgacaaaattgaggcaaaaaaatggcaagagagaaaagaggccctggagtctgtagaagtactaataaaaaaccccaaactggaagctggcgattatgcagatttagtaaaagcattaaagaaggttgttggaaaggacaccaatgtcatgttggtggctttggcagcaaaatgtcttactggcctggctgttgggctaaggaagaaatttggacaatatgcaggacatgttgtgccaaccatcttggagaaattcaaagagaagaaacctcaagtggtacaagccctgcaggaggcaattgatgcaatcttccttactaccacactacagaacatcagtgaggatgttttagcagtaatggataataaaaatccaaccatcaagcagcagacatctctttttattgcaagaagtttccgccactgcactgcttctaccctgccaaagagcttgctaaagcccttttgtgctgcactacttaagcacatcaatgattctgctcctgaagtcagagatgccgcatttgaagcattgggtactgctttgaaggtggttggcgagaaagcagtaaacccattcctagctgatgtggacaaactcaagcttgataagatcaaagaatgttcagaaaaggtagaactgatacatggtaagaaagctggactagctgctgataagaaggaattcaaacctctgcctggaaggactgctgcttcaggggctgcaggagataaggacacaaaggacatttctgcacccaaaccaggacctctaaaaaaggcacctgctgctaaggctggtgggccaccaaaaaaggggaaaccagctgcaccaggaggcgcagggaatactggaaccaagaacaagaaaggactggagactaaagaaatagtggagcctgagctctcgatagaagtatgtgaagaaaaagcttcagctgttcttccccctacctgtatacagcttcttgacagcagtaactggaaagaaaggctggcttgtatggaagagttccagaaggctgttgagctaatggaccgaactgaaatgccatgccaggcattagtgaggatgctagccaagaaacctggatggaaagaaactaattttcaggtgatgcaaatgaagcttcatatagttgctttgattgcccagaagggaaatttttccaaaacgtcagctcaggttgtattagatggccttgtggacaagattggagatgtgaaatgtgggaacaatgcaaaagaagctatgacagcaatagccgaagcctgtatgttaccatggactgctgaacaggttgtgtcaatggctttctcacaaaagaatcccaaaaatcagtcagaaactctgaattggctatcaaatgccataaaagaatttggtttttctgggttgaatgtcaaagctttcattagcaatgtgaagacagctcttgctgcaacaaacccagctgtgaggactgctgccataaccctgcttggcgtgatgtatctgtatgttggtccctctttgcgaatgttctttgaggatgagaagcctgccctcctatcccagatagatgcagaatttgagaagatgcagggacaaagtccacctgctccaaccagaggaatttccaagcatagcacaagtggtacagatgaaggagaagatggagatgaaccagatgacgggagcaatgatgtcgttgatcttttgccgaggacggagatcagtgataaaatcacttcagagttggtatctaagattggtgataagaattggaagattaggaaagaaggcctagatgaagtggcaggtattattaatgacgcaaaatttatccaaccgaatataggtgaacttccaactgccttgaagggtcgactcaatgattcaaataaaatcttggtacagcaaacgctgaatatcctgcaacaactggcagtagccatgggcccaaatattaagcaacatgtaaaaaatttaggcatccctatcatcacagtccttggagacagcaagaacaatgttcgagctgctgccctagcgactgtgaatgcttgggcagaacagactggcatgaaggaatggctggaaggagaagatctttctgaagagctcaaaaaggaaaatcctttcttgaggcaagagcttctgggctggctggctgagaaactacctactcttcgttccacccctacagaccttatcctttgtgttcctcatctctactcctgcctagaagatcgaaatggagatgtgcgaaagaaggcccaagatgccttgccattcttcatgatgcatttaggatatgaaaaaatggccaaggctactgggaaactaaagccaacttctaaagatcaggtattggccatgctagagaaagccaaagttaacatgccagccaagcctgctccacccactaaagcaacttctaaaccaatgggagggtccgctccagccaaattccagcctgcatcagcacctgctgaagattgtatttccagcagtacagaacccaaacctgatccaaaaaaggccaaagctccaggattatcctctaaagcaaagagtgcacaagggaagaagatgccaagcaaaaccagcttaaaggaggatgaagacaaatccgggcctatttttattgttgttccaaatggaaaagagcaaaggatgaaagatgaaaaaggattgaaggtgctaaagtggaattttactaccccacgggatgaatacattgagcaactaaagactcaaatgtctagctgtgtggctaaatggttacaagatgagatgtttcactcagactttcagcatcataacaaagcccttgctgttatggttgatcacttggagagtgaaaaagaaggagttattggttgcctggatcttatcttaaagtggcttaccctgaggttttttgacaccaatacaagcgtcctgatgaaagcactagaatatttaaaattgctcttcaccttgctaagtgaagaagaatatcatcttactgagaatgaagcatcttccttcatcccctatcttgtcgtcaaggttggagaaccaaaggatgtcattcgtaaagatgttcgtgccatcctgaaccggatgtgccttgtctacccagctagcaagatgtttccctttatcatggaaggaaccaaatccaaaaactctaagcagagagcagagtgcctggaagagctgggatgtctggttgagtcctatggcatgaatgtttgccaaccaaccccaggaaaagccttaaaggaaatagctgttcacataggagaccgtgacaatgctgtacgcaatgctgcactcaacaccattgtaacggtgtacaatgtacatggggatcaggtgttcaaactgattggaaatctttctgaaaaggatatgagcatgctcgaggagaggattaagcggtcagcaaagagaccctctgctgcaccaataaaacaggtggaagagaaacctcagcgtgcacagaacataagctccaatgccaacatgttacgcaagggaccagctgaggacatgtcttccaaactcaaccaagcccgaagcatgagtgggcatcctgaggcagcccagatggtccgccgagaattccagctggatctagatgagattgagaatgacaatggtacagtccgatgtgaaatgccagaacttgttcagcacaaactggatgacatttttgagccagtccttattcctgaacccaagatccgggctgtttctccacacttcgatgacatgcacagtaatacagcatccacaatcaatttcattatctcccaagtagccagtggtgacatcaacacaagtatccaagctctgacacagatcgatgaggtcctgagacaggaagacaaagctgaagccatgtccggccatattgatcagtttctgatagccacttttatgcagctaagactcatctacaacacacacatggcagatgagaaattggagaaggacgagatcatcaagttgtatagctgtatcattggcaacatgatttcgctgtttcagatagagagccttgcccgggaggcctccactggagtactaaaagacctaatgcatggcctcatcaccttaatgctggattctcggattgaagatcttgaggaaggacaacaggtcatccgctctgtgaacctcttggtggtgaaggttctggagaagtcagaccagaccaacatcctgagtgccctacttgttttgctccaagacagcctgctagcaacagccagttctcccaaattctcagagcttgttatgaagtgtctctggagaatggttcgactgttgcctgataccatcaatagcattaacctagacagaattcttctggatatccacattttcatgaaggtcttccccaaagagaaactgaagcaatgcaaaagtgaatttcccataaggaccctaaagaccctgctacacaccttatgcaaattaaaagggcccaagatcctggaccacctaacgatgatcgacaacaaaaacgagtctgagctggaggcccatctctgccggatgatgaagcacagtatggaccagactgggagcaagtctgataaggaaacagaaaagggagcatctcgaatagatgaaaaatcatcaaaggccaaagtgaatgatttcttagctgagatttttaagaagattggctctaaagaaaacactaaagagggactagcagagttatatgaatataagaagaaatactcagatgctgacattgaaccatttctgaaaaattcctcacagttcttccagagctatgtcgaaagaggccttcgggtgattgagatggagagggagggcaaaggtcgtatttccacttcaacaggcatctcccctcagatggaagtcacatgtgtgcccacgcccacaagcacagtgtcctccataggtaacacaaatggggaagaagtggggccatctgtctacttggaaaggctaaagatcctccgacagcgatgtggtctggacaacacaaagcaagatgaccgacctcctttgacctctttgctctccaaaccagcagttcctactgtcgcctcttccacagacatgctccacagcaaactctctcagctccgggagtcacgggagcagcaccagcattcagacctggattctaaccagactcactcttcaggaactgtgacctcctcctcctccacagctaacatagacgacttgaaaaaaagactggagagaataaagagcagtcgcaaatgaagctgccccactcccccggcaccctgcagctttagtttactaaactagaagtcctcatagtttaaaatggcctcagcaggcctagtgtatacaaactggttgtatgtatcatgccgtggagctagggggaggagtcattgtggcacaagtatttgtacatactctgcttctctctgtcagcgtcctgctgctctagaagactgtccgtggatgagtttagtgtacagacttgtaaacagctgccccctctctgctcagtctagttcccagatccttttcttttctttttaattgctcatttgtaaaattgtcctaatctttcctagctttttaatagttaatattagaaactctttaatagttttcctttcagtttgtgagctcttctctgtcgccctgaagggtcactgtattctgtatgaatgcatggcatgatacaactaatttaagagtcttttataaataaagtttgcattaactatacctgactcccaagatgctccatatcatggagtgttgggcagcaattttttaacttttggtaccagctgggtattcagccagttagagaaaggttaattactgcttacagagcttccctttttcttggctcacagacttggagctgtcttttattcctttggaatggaaggaactctccttccctgctctccacaaacagctcctagggagcagaaaaatctcatccttccttgttttgagattttggtcatgatttccctccaattatcaccagtcgtttcaagaagctcttgggcatcctaccactttgctgaccaaaggcacacaagattgcgcccagagattggctgggcttcagtggttctcacactacaactagatttgtgttcatttgactaatggagtttgggaaatcttagtggtttgctgcttggttgtatgagtctcttttggtccaggctaacagttgcttcacattcagtcagagtaagg

SEQ ID NO: 124758 - DNA, 832 bp, Homo sapiens
  Payload ID: 4496
  Gene Symbol: CKAP5
  Gene Name: cytoskeleton associated protein 5
  ENST ID: ENST00000525896
  CDS Start-End: 1-610
cctgctacacaccttatgcaaattaaaagggcccaagatcctggaccacctaacgatgatcgacaacaaaaacgagtctgagctggaggcccatctctgccggatgatgaagcacagtatggaccagactgggagcaagtctgataaggaaacagaaaagggagcatctcgaatagatgaaaaatcatcaaaggccaaagtgaatgatttcttagctgagatttttaagaagattggctctaaagaaaacactaaagagggactagcagagttatatgaatataagaagaaatactcagatgctgacattgaaccatttctgaaaaattcctcacagttcttccagagctatgtcgaaagaggccttcgggtgattgagatggagagggagggcaaaggtcgtatttccacttcaacaggcatctcccctcagatggaagtcacatgtgtgcccacgcccacaagcacagtgtcctccataggtaacacaaatggggaagaagtggggccatctgtctacttggaaaggctaaagatcctccgacagcgatgtggtctggacaacacaaaggtactgctccttttcttctgtgcagttcagggagggtagtcacaagcaggtccgaggcaggctggcccacagagaagtggcttagtcttgctgtagttctggagctgcatcttgacctgcttgacctgaccttagacaatctctctccttctctcaatagcaagatgaccgacctcctttgacctctttgctctccaaaccagcagttcctactgtcgcctcttccacagacatgctccacagcaaactctctcagctccg

SEQ ID NO: 124759 - DNA, 570 bp, Homo sapiens
  Payload ID: 4496
  Gene Symbol: CKAP5
  Gene Name: cytoskeleton associated protein 5
  ENST ID: ENST00000526876
  CDS Start-End: 1-570
ataagctccaatgccaacatgttacgcaagggaccagctgaggacatgtcttccaaactcaaaattatgtatcgcacttataggatccaagcccgaagcatgagtgggcatcctgaggcagcccagatggtccgccgagaattccagctggatctagatgagattgagaatgacaatggtacagtccgatgtgaaatgccagaacttgttcagcacaaactggatgacatttttgagccagtccttattcctgaacccaagatccgggctgtttctccacacttcgatgacatgcacagtaatacagcatccacaatcaatttcattatctcccaagtagccagtggtgacatcaacacaagtatccaagctctgacacagatcgatgaggtcctgagacaggaagacaaagctgaagccatgtccggccatattgatcagtttctgatagccacttttatgcagctaagactcatctacaacacacacatggcagatgagaaattggagaaggacgagatcatcaagttgtatagctgtatcattggcaacatgatttcgctgtttcag

SEQ ID NO: 124760 - DNA, 582 bp, Homo sapiens
  Payload ID: 4496
  Gene Symbol: CKAP5
  Gene Name: cytoskeleton associated protein 5
  ENST ID: ENST00000526496
  CDS Start-End: 130-582
aatgctgctgccgccgccgccgccgcctgccgggtattcctgctgatcctgctcggaccttagcttccctgacctctccctgcccggggagcgaaatactcttaattctaaggaaaacctggaagcacaatgggagatgacagtgagtggttgaaactgccagttgatcagaaatgtgaacacaagctgtggaaagcaaggttaagtgggtatgaagaggccctgaagatcttccagaaaataaaggatgaaaagagcccagagtggtccaaatttttaggattgatcaaaaaatttgtcactgattccaatgcagtggttcaattgaaaggattagaagctgcacttgtttatgttgaaaatgcccatgtagcaggaaaaaccacaggagaagttgtgtcaggtgttgtaagtaaggtgttcaatcaacctaaagctaaagccaaggagctgggcatagagatctgtcttatgtacatagagattgagaaaggagaggctgttcaagaagagctcctgaaaggcttggacaataagaatcccaagatcatagtggcctgtatagagacactgaggaaagcc

SEQ ID NO: 124761 - DNA, 3093 bp, Homo sapiens
  Payload ID: 4497
  Gene Symbol: CKAP4
  Gene Name: cytoskeleton-associated protein 4
  Uniprot ID: Q07065
  ENST ID: ENST00000378026
  CDS Start-End: 138-1946
gtcctctcgccgctccgacgccagcagcgcccgcgtgccgctcgcccagtcccgggggagcccctgcaagtttcccgggccgcgcgccgcgctcgctcgcctcccagcccgcggcccgagccgccgccgcgcccgccatgccctcggccaaacaaaggggctccaagggcggccacggcgccgcgagcccctcggagaagggtgcccacccgtcgggcggcgcggatgacgtggcgaagaagccgccgccggcgccgcagcagccgccgccgccgcccgcgccgcacccgcagcagcacccgcagcagcacccgcagaaccaggcgcacggcaagggcggccaccgcggcggcggcggcggcggcggcaagtcctcctcctcctcctccgcctccgccgccgctgccgccgccgccgcctcgtcctcggcgtcctgctcgcgcaggctcggcagggcgctcaactttctcttctacctcgccctggtggcggcggccgctttctcgggctggtgcgtccaccacgtcctggaggaggtccagcaggtccggcgcagccaccaggacttctcccggcagagggaggagctgggccagggcttgcagggcgtcgagcagaaggtgcagtctttgcaagccacatttggaacttttgagtccatcttgagaagctcccaacataaacaagacctcacagagaaagctgtgaagcaaggggagagtgaggtcagccggatcagcgaagtgctgcagaaactccagaatgagattctcaaagacctctcggatgggatccatgtggtgaaggacgcccgggagcgggacttcacgtccctggagaacacggtggaggagcggctgacggagctcaccaaatccatcaacgacaacatcgccatcttcacagaagtccagaagaggagccagaaggagatcaatgacatgaaggcaaaggttgcctccctggaagaatctgaggggaacaagcaggatttgaaagccttaaaggaagctgtgaaggagatacagacctcagccaagtccagagagtgggacatggaggccctgagaagtacccttcagactatggagtctgacatctacaccgaggtccgcgagctggtgagcctcaagcaggagcagcaggctttcaaggaggcggccgacacggagcggctcgccctgcaggccctcacggagaagcttctcaggtctgaggagtccgtctcccgcctcccggaggagatccggagactggaggaagagctccgccagctgaagtccgattcccacgggccgaaggaggacggaggcttcagacactcggaagcctttgaggcactccagcaaaagagtcagggactggactccaggctccagcacgtggaggatggggtgctctccatgcaggtggcttctgcgcgccagaccgagagcctggagtccctcctgtccaagagccaggagcacgagcagcgcctggccgccctgcaggggcgcctggaaggcctcgggtcctcagaggcagaccaggatggcctggccagcacggtgaggagcctgggcgagacccagctggtgctctacggtgacgtggaggagctgaagaggagtgtgggcgagctccccagcaccgtggaatcactccagaaggtgcaggagcaggtgcacacgctgctcagtcaggaccaagcccaggccgcccgtctgcctcctcaggacttcctggacagactttcttctctagacaacctgaaagcctcagtcagccaagtggaggcggacttgaaaatgctcaggactgctgtggacagtttggttgcatactcggtcaaaatagaaaccaacgagaacaatctggaatcagccaagggtttactagatgacctgaggaatgatctggataggttgtttgtgaaagtggagaagattcacgaaaaggtctaaatgaattgcgtgtgcagggcgcggatttaaagtccaatttctcatgaccaaaaaatgtgtggttttttcccatgtgtcccctaccccccaatttcttgtcccctcttaaagagcagttgtcaccacctgaacaccaaggcattgtattttcatgcccagttaacttatttacaatatttaagttctctgcttctgcatttggttggtttcctgaagcgcagcccctgtgaataacaggtggcttttcatggatgtctctagtcagagaaaaatgataaaggcttaaattgaggattaacagaagcagattaacctcagaaatcctgtctggctggcagatttcaagtaaaaaaaaaaaaaaggtgggttggggggacccttttctttctagttgtctttaaggaaaattaattttacttttttttttgttctggccgaaatttttatgagatatctctcacttgtcttccactttgaaccggttaaagctcatagctgtcagctctgaatgaggaggggagaagcccctgggtctttctttgaaaggaatccgctgcttgagggctgcctccctcatggtgtgcgtgtcgtttctcttcctgacgcatcttgtgatatcagaggtaactatgcaaagcatccaggcggttctgaatgtgaagcactacacccagcagagtcccggtgccctctgtccccactgccggcccatgttctctctccggaggtcaccaaggaatgcacaggtttcgactaccagaaaggggagtccttgggttctttcaaaaaattcgtgaggagagctgtctacagtggaatagggggtctccctggggaatgcaggccaagtccttttattttaacatgatgtccatgaagaggtttgccgtctgggcagccctgtcggcaaggagcgtgcatactgcgtttgtgtaattgtttgctgtatctcccttccctctgagctgtattgttctttaatggctgtcttgcccttccaaaaaaaattgaaaaaaaaaaaaaaaaaaaaacccgaaaagtaaaaaaaaaaaaaaaaagttttgtttagtttactgtgaaatgaactgtatggcttatttacagtatttttaattcttaataaacacttgagctttgttatgacttt

SEQ ID NO: 124762 - DNA, 573 bp, Homo sapiens
  Payload ID: 4497
  Gene Symbol: CKAP4
  Gene Name: cytoskeleton-associated protein 4
  ENST ID: ENST00000553039
  CDS Start-End: 495-573
atttgaaagcactcctcccacacttgctggtctgttttgttttaatacctgtgcttccccctctggggccctcaacctctcacaaaatggcattgaagctgcttccacacatgactgggtatcttcggccctgggcctcttcaaatcaggcaacttccactggctgtcagggtgatgcatgaaatccctagagaagagaggaaaaggaccacggcagggagcctcctcaagtgggaaccactgagattaactcattatccgttggcagagagggcttctcactctattgcccaggctgatgtgcagtagccattcactggtgagatcatcacgcgctacagcatcaaactcctggcctcaagtgatccccctgcctcagcctccgaagtagctgggattacaggagtgaaacttgtgcacaggaaggcttcccttcctccagagagaacactggaggccactcaccttccagaccaccaaatttaacatcactcatgccagctggaggaggccccagatccctctggccagtgaagttttggttggtgcagtctttgcaagccacatttggaa

SEQ ID NO: 124763 - DNA, 1533 bp, Homo sapiens
  Payload ID: 4498
  Gene Symbol: CIAO1
  Gene Name: cytosolic iron-sulfur assembly component 1
  Uniprot ID: O76071
  ENST ID: ENST00000488633
  CDS Start-End: 220-1239
ccctgccgaggtgaggggagcgactacaactcccagagggtatggcggccgcagcagtgggcagttgagtttccggggcgacccaggtcctccggcggaagcgggagcctctgtcggccgcggaagcctggagtgggcggtacgcagacgcgcgcggtgagacccgctgtctgctcagcggactctgcccgcccccacctccccctgcgtcgggccgacatgaaggactcgctggtgctgctgggccgtgtcccggcgcacccggactcccgctgctggttcctggcctggaaccccgcggggaccctgctggcctcgtgcggcggcgaccggagaatccgcatctggggcacggagggtgacagctggatctgcaagtctgtcctttctgaaggccaccagcgcaccgtgcggaaggtagcctggtccccctgcggtaattacctggcctctgccagctttgatgctaccacttgcatttggaagaagaaccaggatgactttgagtgtgtaaccactctcgagggccatgaaaatgaggtcaagtcagtggcttgggccccatctggcaacctcctggccacttgcagccgagataagagcgtttgggtctgggaagttgatgaagaggatgagtatgaatgtgtcagtgttctcaactcccacacacaggatgtcaagcatgtggtttggcacccaagtcaggagctcttagcttctgccagctatgatgacacagtgaagctgtaccgggaggaagaggatgactgggtatgctgtgccacccttgagggccatgaatccactgtgtggagcttggcctttgacccgagtggccagcgcctggcgtcttgtagtgatgaccgtactgtgcgtatctggcgtcagtatctaccaggcaatgaacaaggggtggcatgcagcggctctgaccccagttggaaatgtatctgtactttgtccggcttccactcaaggaccatttatgacattgcttggtgtcagctgacaggggctctggccacagcttgtggggatgacgcgatccgcgtgtttcaggaggatcccaactcggatccacagcagcccaccttctccctgacagcccacttgcatcaggcccattcccaggatgtcaactgtgtggcctggaaccccaaggagccagggctactggcctcctgcagtgatgatggggaggtggccttctggaagtatcagcggcctgaaggcctctgagctacctcgactttggacagagtaatgactccccagaaaacgtcatataagactttaccagcccctgagaggaccaggaggagcatccttgaccttcatttaacttggctcacttctcttcagacttgggtagaagtgcagagccacagaattgctttccttccccgcctttgacatgaggccttcagtaaagagctacagaacatgagtacattgttataccacagatttttcttgcattagggcacagtgttaaattttttggaggtaaatatactatttataatcactata

SEQ ID NO: 124764 - DNA, 2087 bp, Homo sapiens
  Payload ID: 4499
  Gene Symbol: CTU1
  Gene Name: cytosolic thiouridylase subunit 1
  Uniprot ID: Q7Z7A3
  ENST ID: ENST00000421832
  CDS Start-End: 46-1092
atcccagcactgagttctgcccgggagaagccgacccctcccgcaatgcccgccccgccgtgcgcctcctgccatgctgcacgcgccgccctccgccgtccgctctcgggccaagcgctgtgcggtgcctgcttctgcgccgccttcgaggccgaggtgctgcacacggtgctcgccggccgcctgctgccgcccggcgcggtggtggccgtgggcgcctcgggcggcaaggactccacggtgctggcgcacgtgctgcgcgcgctggcgccgcgcctgggcatctcactgcagctcgtggccgtcgatgagggcatcggtggctaccgggacgcggcgttggcggccgtgcggcgccaggcggcgcgctgggagctgccgctcacggtcgtggcctacgaagacctctttgggggctggacgatggacgccgtggcccgcagcacagccggctccggccgcagccgctcctgctgcaccttctgtggagtgctgcggcgccgggcgctggaggaaggggcgcgccgcgtgggagccacgcacatcgtgacaggtcacaacgccgacgacatggcggagaccgtgctcatgaacttcctacggggcgacgcggggcggctggcccggggcgggggcctgggctctcccggcgaggggggcgccctgccgcgctgccgcccgctgcagttcgcctcgcagaaggaggtggtgctgtacgcgcacttccgccgcctcgactacttctccgaggagtgcgtctacgcgcccgaggccttccgcggccacgcccgggacctgctcaagcgcctggaggcggcgcggccgtccgcggtgctggacctcgtgcactcggccgagcgcctggcgctggccccggccgcgcggcccccgcgccccggcgcctgctcccgctgtggggcgctggccagccgcgcgctctgccaggcctgcgcgctcctggacggcctgaaccgcggccggccccgcctggccatcggcaagggccgccggggtctggacgaggaggcgacgccggggacgcccggggatccggcccggccccccgcctccaaggccgtccccaccttctagcgacttcgggcctcccgccgggatctgatgccgcggggtgggggctgcctgtaaatgacactgtgaataaacccgttaccttacctggccttccatgtggggttgggaaggagacgggggcccattcacctgaaaccctgaagaagctgggaccccagacttcgaggtctcagggaagaagggtctcgaactgggcttcaggctctgagggaggagggggctgggggaccatcctaggtctgagagaggagagggccaggactaagcctagaagaagtgggactggggaccccaggcatctgtggctgaggaaggagggcctggggtcgtggactcctgggtctcagggaggagggggctgaacaccgtgtgattcttgagcgagtggggattggttggggacctcctgcccagggcctctgctggttctgggtgcgctcagcatggtcctgaccctccttgagcatcagattcctgatgtttcctgtttgcccgcagtggggtaagcggagcgtgacttgatggacacacgccattcacagccgccgtcacgatgcctcccttccagcgcttcgtgtgtagcacgcactgcaccctcatttcgtctccaccacggtctcactggctgtagcctgaagtggtaaatggccctaagacacccagtcggaaggggtcacaccgagggctccctccaaagctctcgaatatcacaggtcgtggaattggtcctcccccacccatcccctctcgaatctctcctggtatctctgtcacgggtgaggaggggttggatgcgttccccaaaccttggactctggaggcagggttgtgtgagcctgtcggtgacttagcctctttcatgtcccatttctcctatgaaaatataatcagcccccttcccccccgcccccccatcccccccgcatcaaggcaccactgggaggaaatggaagatcagagaagttgaggtgctcaataaatggtgaccacttgga

SEQ ID NO: 124765 - DNA, 1672 bp, Homo sapiens
  Payload ID: 4500
  Gene Symbol: CTU2
  Gene Name: cytosolic thiouridylase subunit 2 homolog (S. pombe)
  Uniprot ID: Q2VPK5
  ENST ID: ENST00000312060
  CDS Start-End: 49-1506
gccctcgcgctgtcgccgccacagtctgcgacgggacccggcgtgcccatgtgtcaggtgggcgaggactacggggagccggcgcctgaggagccgcccccggcgccgcggcccagccgtgagcagaagtgtgtgaagtgcaaggaagcgcagcccgttgtggtgatacgagccggagatgccttctgcagggactgtttcaaggccttctacgtccacaagttcagagccatgctgggcaagaaccggctcatctttccaggcgagaaggtgctcttggcgtggtctggggggccttcgtccagctccatggtctggcaggttcttgagggcctgagccaagattctgccaaaagactgcgctttgtggcaggagtcatctttgttgacgagggagcagcctgtggccagagcctagaggagagatcaaagaccctggccgaagtgaagcccattctgcaagcaactgggttcccatggcatgtggtggccttagaggaggtgttcagcctgccaccgtcggtgctttggtgctctgcccaggagctggtgggatccgagggggcctacaaggcggccgtggacagcttcctccagcagcagcatgtgctgggggccgggggtggtcctggcccgactcaaggggaggaacagccaccccagcccccgctggacccccagaacctggcaagaccgcctgcccctgcccagactgaggctctttcccaactgttctgctcagtgaggacactgactgccaaggaggagcttctgcagaccctgcggacccacctgatcctccacatggcccgagcccacggctactccaaggtcatgactggggacagctgcacacgcttggctatcaagctcatgaccaacctggcgctgggtcgaggggccttcctggcctgggatacgggcttctcggatgagcggcacggggacgtggtggtggtgcggcccatgcgggaccacaccctgaaggaggtcgctttctacaaccgcctgttctccgttccttctgtcttcacaccagccgtcgacaccaaggcccctgaaaaggccagcatccaccggctgatggaggccttcatcctcaggctgcagacccagttcccctccactgtcagcactgtgtacaggacaagtgagaagctggtgaagggcccccgggatggccctgctgctggcgactccggcccccgctgcctcctctgcatgtgtgccctggacgtcgacgccgctgacagtgccacggcttttggggctcagacctcctcgcgtctctcccagatgcagtcacccatccccctgactgagacccggacacccccggggccctgctgttctccaggggtgggctgggcccagcgctgtggccagggggcctgcaggagggaggacccccaagcctgcattgaggagcagctgtgctacagctgccgcgtgaacatgaaggacttgggcctggggcttgcaggagatccgggactgtctgattgaggacagtgacgacgaggcgggccagagctgagcgtgaggacgtgcttgccgggacagcaggcagtggccacctggtacaccacactggagccggaaggcaaggacgggggactggcctctgattgtccatttgtataaataaaacattttttaattaaaaaaaaaa

SEQ ID NO: 124766 - DNA, 1751 bp, Homo sapiens
  Payload ID: 4500
  Gene Symbol: CTU2
  Gene Name: cytosolic thiouridylase subunit 2 homolog (S. pombe)
  Uniprot ID: Q2VPK5
  ENST ID: ENST00000453996
  CDS Start-End: 69-1616
ctccgacgtcatcggggcgcgccctcgcgctgtcgccgccacagtctgcgacgggacccggcgtgcccatgtgtcaggtgggcgaggactacggggagccggcgcctgaggagccgcccccggcgccgcggcccagccgtgagcagaagtgtgtgaagtgcaaggaagcgcagcccgttgtggtgatacgagccggagatgccttctgcagggactgtttcaaggccttctacgtccacaagttcagagccatgctgggcaagaaccggctcatctttccaggcgagaaggtgctcttggcgtggtctggggggccttcgtccagctccatggtctggcaggttcttgagggcctgagccaagattctgccaaaagactgcgctttgtggcaggagtcatctttgttgacgagggagcagcctgtggccagagcctagaggagagatcaaagaccctggccgaagtgaagcccattctgcaagcaactgggttcccatggcatgtggtggccttagaggaggtgttcagcctgccaccgtcggtgctttggtgctctgcccaggagctggtgggatccgagggggcctacaaggcggccgtggacagcttcctccagcagcagcatgtgctgggggccgggggtggtcctggcccgactcaaggggaggaacagccaccccagcccccgctggacccccagaacctggcaagaccgcctgcccctgcccagactgaggctctttcccaactgttctgctcagtgaggacactgactgccaaggaggagcttctgcagaccctgcggacccacctgatcctccacatggcccgagcccacggctactccaaggtcatgactggggacagctgcacacgcttggctatcaagctcatgaccaacctggcgctgggtcgaggggccttcctggcctgggatacgggcttctcggatgagcggcacggggacgtggtggtggtgcggcccatgcgggaccacaccctgaaggaggtcgctttctacaaccgcctgttctccgttccttctgtcttcacaccagccgtcgacaccaaggcccctgaaaaggccagcatccaccggctgatggaggccttcatcctcaggctgcagacccagttcccctccactgtcagcactgtgtacaggacaagtgagaagctggtgaagggcccccgggatggccctgctgctggcgactccggcccccgctgcctcctctgcatgtgtgccctggacgtcgacgccgctgacagtgccacggcttttggggctcagacctcctcgcgtctctcccagatgcagtcacccatccccctgactgagacccggacacccccggggccctgctgttctccaggggtgggctgggcccagcgctgtggccagggggcctgcaggagggaggacccccaagcctgcattgaggagcagctgtgctacagctgccgcgtgaacatgaaggacttgccctcactggaccccctgccgccgtacatcctggctgaggcccagctccgcacacagagggcctggggcttgcaggagatccgggactgtctgattgaggacagtgacgacgaggcgggccagagctgagcgtgaggacgtgcttgccgggacagcaggcagtggccacctggtacaccacactggagccggaaggcaaggacgggggactggcctctgattgtccatttgtataaataaaacattttttaattaaaaaaaaaa

SEQ ID NO: 124767 - DNA, 1586 bp, Homo sapiens
  Payload ID: 4500
  Gene Symbol: CTU2
  Gene Name: cytosolic thiouridylase subunit 2 homolog (S. pombe)
  ENST ID: ENST00000564105
  CDS Start-End: 49-258
gccctcgcgctgtcgccgccacagtctgcgacgggacccggcgtgcccatgtgtcaggtgggcgaggactacggggagccggcgcctgaggagccgcccccggcgccgcggcccagccgtgagcagaagtgtgtgaagtgcaaggaagcgcagcccgttgtggtgatacgagccggagatgccttctgcaggtgctcttggcgtggtctggggggccttcgtccagctccatggtctggcaggttcttgagggcctgagccaagattctgccaaaagactgcgctttgtggcaggagtcatctttgttgacgagggagcagcctgtggccagagcctagaggagagatcaaagaccctggccgaagtgaagcccattctgcaagcaactgggttcccatggcatgtggtggccttagaggaggtgttcagcctgccaccgtcggtgctttggtgctctgcccaggagctggtgggatccgagggggcctacaaggcggccgtggacagcttcctccagcagcagcatgtgctgggggccgggggtggtcctggcccgactcaaggggaggaacagccaccccagcccccgctggacccccagaacctggcaagaccgcctgcccctgcccagactgaggctctttcccaactgttctgctcagtgaggacactgactgccaaggaggagcttctgcagaccctgcggacccacctgatcctccacatggcccgagcccacggctactccaaggtcatgactggggacagctgcacacgcttggctatcaagctcatgaccaacctggcgctgggtcgaggggccttcctggcctgggatacgggcttctcggatgagcggcacggggacgtggtggtggtgcggcccatgcgggaccacaccctgaaggaggtcgctttctacaaccgcctgttctccgttccttctgtcttcacaccagccgtcgacaccaaggcccctgaaaaggccagcatccaccggctgatggaggccttcatcctcaggctgcagacccagttcccctccactgtcagcactgtgtacaggacaagtgagaagctggtgaagggcccccgggatggccctgctgctggcgactccggcccccgctgcctcctctgcatgtgtgccctggacgtcgacgccgctgacagtgccacggcttttggggctcagacctcctcgcgtctctcccagatgcagtcacccatccccctgactgagacccggacacccccggggccctgctgttctccaggggtgggctgggcccagcgctgtggccagggggcctgcaggagggaggacccccaagcctgcattgaggagcagctgtgctacagctgccgcgtgaacatgaaggacttgccctcactggaccccctgccgccgtacatcctggctgaggcccagctccgcacacagagggcctggggcttgcaggagatccgggactgtctgattgaggacagtgacgacgaggcgggccagagctgagcgtgaggacgtgcttgccgggacagcaggcagtggccacctggtacaccacactggagccggaaggca

SEQ ID NO: 124768 - DNA, 931 bp, Homo sapiens
  Payload ID: 4500
  Gene Symbol: CTU2
  Gene Name: cytosolic thiouridylase subunit 2 homolog (S. pombe)
  ENST ID: ENST00000564921
  CDS Start-End: 663-931
cgcggcccaggtaagagctggcggccggacccgccaggccgcccctcgccttcccgccgcactcctgccccgaagggtcccggccgggcttgctccgggaagccccgcgtggagagcgggacctcgctccctagcactcggggaatgcctgtcaagcggtgacggccacctagaaggggacttactccactggctcgcgcctctcatcctagcagccactggggacggctctgccgctgacagtgctgtccttattcggagagaactggtgccgtgaagctgtctcgcctccccgtgtcagccttgggagactgaaaagcggcctttatgtgccccctgagccggcttttctaggctaaacatccccccagagcctttgtttttcttgaagtttggacagaacacaagcctgggtttgtgtgtgtaccgaggtgcctttctctgacccaactcagggtgagaaacaggagctgtctccccaaagcccactaggcgtggggaagatgtgatctgtgtttctctcttctcccccctcccatctccaaagccgtgagcagaagtgtgtgaagtgcaaggaagcgcagcccgttgtggtgatacgagccggagatgccttctgcagggactgtttcaaggccttctacgtccacaagttcagagccatgctgggcaagaaccggctcatctttccaggcgagaaggtgctcttggcgtggtctggggggccttcgtccagctccatggtctggcaggttcttgagggcctgagccaagattctgccaaaagactgcgctttgtggcaggagtcatctttgttgacgagggagcagcctgtggccagagcctagaggagagatcaaagaccctggccgaagtgaagcccattctgcaagcaactgggttcccatggcatgtggtggccttagagga

SEQ ID NO: 124769 - DNA, 452 bp, Homo sapiens
  Payload ID: 4500
  Gene Symbol: CTU2
  Gene Name: cytosolic thiouridylase subunit 2 homolog (S. pombe)
  ENST ID: ENST00000567316
  CDS Start-End: 1-327
tgctgttctccaggggtgggctgggcccagcgctgtggccagggggcctgcaggagggaggacccccaagcctgcattgaggagcagctgtgctacagctgccgcgtgaacatgaaggacttgccctcactggaccccctgccgccgtacatcctggctgaggcccagctccgcacacagaggtactggggcccacactgccgtggcgcgtgggtaaggggcctcggggctggtgcccactgcagctttctctctagggcctggggcttgcaggagatccgggactgtctgattgaggacagtgacgacgaggcgggccagagctgagcgtgaggacgtgcttgccgggacagcaggcagtggccacctggtacaccacactggagccggaaggcaaggacgggggactggcctctgattgtccatttgtataaataaaacattttttaatt

SEQ ID NO: 124770 - DNA, 1905 bp, Homo sapiens
  Payload ID: 4500
  Gene Symbol: CTU2
  Gene Name: cytosolic thiouridylase subunit 2 homolog (S. pombe)
  ENST ID: ENST00000567949
  CDS Start-End: 10-1770
ggcgtgcccatgtgtcaggtgggcgaggactacggggagccggcgcctgaggagccgcccccggcgccgcggcccagccgtgagcagaagtgtgtgaagtgcaaggaagcgcagcccgttgtggtgatacgagccggagatgccttctgcagggactgtttcaaggccttctacgtccacaagttcagagccatgctgggcaagaaccggctcatctttccaggcgagaaggtgctcttggcgtggtctggggggccttcgtccagctccatggtctggcaggttcttgagggcctgagccaagattctgccaaaagactgcgctttgtggcaggagtcatctttgttgacgaacgaactcctggggtgttgactgtagcgctgaggtcagccgcaagagagaaacccctgcccaaaggaaaatggccgacaccccacagctccgccaggaagcaccgccctgcggagcgaggcctcgaagggttttcccaggtggaggtggccctgcagcctgccctgcctggctcctctctgagccctgactctttctgcctgggtttttcagagggagcagcctgtggccagagcctagaggagagatcaaagaccctggccgaagtgaagcccattctgcaagcaactgggttcccatggcatgtggtggccttagaggaggtgttcagcctgccaccgtcggtgctttggtgctctgcccaggagctggtgggatccgagggggcctacaaggcggccgtggacagcttcctccagcagcagcatgtgctgggggccgggggtggtcctggcccgactcaaggggaggaacagccaccccagcccccgctggacccccagaacctggcaagaccgcctgcccctgcccagactgaggctctttcccaactgttctgctcagtgaggacactgactgccaaggaggagcttctgcagaccctgcggacccacctgatcctccacatggcccgagcccacggctactccaaggtcatgactggggacagctgcacacgcttggctatcaagctcatgaccaacctggcgctgggtcgaggggccttcctggcctgggatacgggcttctcggatgagcggcacggggacgtggtggtggtgcggcccatgcgggaccacaccctgaaggaggtcgctttctacaaccgcctgttctccgttccttctgtcttcacaccagccgtcgacaccaaggcccctgaaaaggccagcatccaccggctgatggaggccttcatcctcaggctgcagacccagttcccctccactgtcagcactgtgtacaggacaagtgagaagctggtgaagggcccccgggatggccctgctgctggcgactccggcccccgctgcctcctctgcatgtgtgccctggacgtcgacgccgctgacagtgccacggcttttggggctcagacctcctcgcgtctctcccagatgcagtcacccatccccctgactgagacccggacacccccggggccctgctgttctccaggggtgggctgggcccagcgctgtggccagggggcctgcaggagggaggacccccaagcctgcattgaggagcagctgtgctacagctgccgcgtgaacatgaaggacttgccctcactggaccccctgccgccgtacatcctggctgaggcccagctccgcacacagagggcctggggcttgcaggagatccgggactgtctgattgaggacagtgacgacgaggcgggccagagctgagcgtgaggacgtgcttgccgggacagcaggcagtggccacctggtacaccacactggagccggaaggcaaggacgggggactggcctctgattgtccatttgtataaataaaacattttttaattaaaaaaaaaa

SEQ ID NO: 124771 - DNA, 2469 bp, Homo sapiens
  Payload ID: 4501
  Gene Symbol: CRTAM
  Gene Name: cytotoxic and regulatory T cell molecule
  Uniprot ID: O95727
  ENST ID: ENST00000227348
  CDS Start-End: 48-1229
agaatctagaggaagttgacaaaggtgccacagcagcacagcacagtatgtggtggagagttctcagcttgctggcatggttccccttgcaagaggcctctctgactaaccacacagaaaccatcaccgtggaggaaggccagacgctcactctaaagtgtgtcacttctctgaggaagaactcctccctccagtggctgaccccctcagggttcaccatttttttaaatgagtatcctgctttaaaaaattccaaataccagcttcttcatcactcggccaatcagctctccatcactgtgcctaacgtaaccctgcaagatgaaggcgtgtacaagtgcttacattacagcgactctgtaagcacaaaggaagtgaaagtgattgtgctggcaactcctttcaagccaatcctggaagcttcagttatcagaaagcaaaatggagaagaacatgttgtactcatgtgctccaccatgagaagcaagccccctccgcagataacctggctacttgggaatagcatggaagtgtccggtggaacgctccatgaatttgaaactgatgggaagaaatgtaatactaccagcactctcataatccacacttatggcaaaaattcaacggtggactgcattatccgacacagaggcctgcaagggagaaaactagtagcacccttccggtttgaagatttggttactgatgaagagacagcttcagatgctctggagagaaactctctatcctctcaagacccacagcagcccaccagtactgtctcagtaacggaagattctagtacatcggagattgacaaggaagagaaagaacaaaccactcaagatcctgacttgaccaccgaagcaaatcctcagtatttaggactggcaagaaagaaaagtggcatcctgctgctcacgctggtgtccttcctcattttcatactcttcatcatagtccagctcttcatcatgaagctgaggaaagcacatgtgatatggaagaaagaaaacgaagtttcagaacacacactagaaagttacagatcaaggtcaaataatgaagaaacatcatctgaagagaaaaatggccaatcttcccaccctatgcgttgcatgaactacatcacaaagttgtactcagaagcaaaaacaaagaggaaggaaaatgtacaacattcaaaattagaagaaaagcacatccaagtaccagagagtattgtgtagtgctctctgcaatggaacatgtgatttcagggttgccgcagtgtcacctcagtggaccagcctgggggaaggagcttaattgctgagacattaataatgacctcttagtgcaatgcaagatggtgtcctcggataatgatctgccccggagctagggcagcaacatgaggaccaaaccatgcacataaagcttgtagtttaaaaaagaaaagcaaaaaaataattatgcctgacactacttcagagcaggaggattctacgaagccttggggatcagggtcagtgtgagcagctaacatcctacctcaaatggaacaggattttttgatgctttgctctaatggaactgtttaaaaaatttttttttctttttaatattttcttctggtcacaaaataaagaaatttgggatgcaaagtacctaaagatctctgatcctaagaagttacttctggccaggcgcggtggctcatgcctgtaatcctagcactttgggaggctgaggtaggcagatcacttgaggtcaggagttggagaccagcctggccaacatagtgaaaccccgtctctactaaaaatgcaaaaattagccaggcgtagtggtgcgcacctgtagtctcagatacttgggaggctgagggtggagaatcgcttgaacctgggaggtggagattgcagtgagtcaagatctcaccactgcactccagcctgggcaacagagggagactctgtctcaaaaaaaaagaagttacttccaagacagacttttaagatgtaaccagcacaaagcaatgtcagggaggagtgatacatgacaataaatgagtcagatgagcaagaaggccccagaacccatgccccaaggcacaaagaggagctcagggtaggcccaaagattcgaattccttagattactaaatcacatgagcggaccttgtctgtcagataagatttttacctggaaattccatgaccaatacatgtgcaaaagaaaatgatgggttgaatttactgattattgacctaatggatggctttttaaaatgttttaataaaaagcagaatagatgtttgtttttctagtggttataccaagttatacttcctgttttcacgtgtgaaagtaacatgggacatgcctttcttttccgatcagtttatttaagctatacagcaaactttggcatttatgtggagcatttctcattgttggaatctgaataaaccaattacaaaataa

SEQ ID NO: 124772 - DNA, 1929 bp, Homo sapiens
  Payload ID: 4501
  Gene Symbol: CRTAM
  Gene Name: cytotoxic and regulatory T cell molecule
  Uniprot ID: O95727
  ENST ID: ENST00000533709
  CDS Start-End: 107-691
aaaaaccagagcaggagccacagaacacacagttctggggtttctgcacaacctctacaagcaggtagccgctaaatatattctccaatctcttttactgagcacaatgtgggtaaaactgctctctatagtagcagaattttgtttttcccctttcctagttactgatgaagagacagcttcagatgctctggagagaaactctctatcctctcaagacccacagcagcccaccagtactgtctcagtaacggaagattctagtacatcggagattgacaaggaagagaaagaacaaaccactcaagatcctgacttgaccaccgaagcaaatcctcagtatttaggactggcaagaaagaaaagtggcatcctgctgctcacgctggtgtccttcctcattttcatactcttcatcatagtccagctcttcatcatgaagctgaggaaagcacatgtgatatggaagaaagaaaacgaagtttcagaacacacactagaaagttacagatcaaggtcaaataatgaagaaacatcatctgaagagaaaaatggccaatcttcccaccctatgcgttgcatgaactacatcacaaagttgtactcagaagcaaaaacaaagaggaaggaaaatgtacaacattcaaaattagaagaaaagcacatccaagtaccagagagtattgtgtagtgctctctgcaatggaacatgtgatttcagggttgccgcagtgtcacctcagtggaccagcctgggggaaggagcttaattgctgagacattaataatgacctcttagtgcaatgcaagatggtgtcctcggataatgatctgccccggagctagggcagcaacatgaggaccaaaccatgcacataaagcttgtagtttaaaaaagaaaagcaaaaaaataattatgcctgacactacttcagagcaggaggattctacgaagccttggggatcagggtcagtgtgagcagctaacatcctacctcaaatggaacaggattttttgatgctttgctctaatggaactgtttaaaaaatttttttttctttttaatattttcttctggtcacaaaataaagaaatttgggatgcaaagtacctaaagatctctgatcctaagaagttacttctggccaggcgcggtggctcatgcctgtaatcctagcactttgggaggctgaggtaggcagatcacttgaggtcaggagttggagaccagcctggccaacatagtgaaaccccgtctctactaaaaatgcaaaaattagccaggcgtagtggtgcgcacctgtagtctcagatacttgggaggctgagggtggagaatcgcttgaacctgggaggtggagattgcagtgagtcaagatctcaccactgcactccagcctgggcaacagagggagactctgtctcaaaaaaaaagaagttacttccaagacagacttttaagatgtaaccagcacaaagcaatgtcagggaggagtgatacatgacaataaatgagtcagatgagcaagaaggccccagaacccatgccccaaggcacaaagaggagctcagggtaggcccaaagattcgaattccttagattactaaatcacatgagcggaccttgtctgtcagataagatttttacctggaaattccatgaccaatacatgtgcaaaagaaaatgatgggttgaatttactgattattgacctaatggatggctttttaaaatgttttaataaaaagcagaatagatgtttgtttttctagtggttataccaagttatacttcctgttttcacgtgtgaaagtaacatgggacatgcctttcttttccgatcagtttatttaagctatacagcaaactttggcatttatgtggagcatttctcattgttggaatctgaataaaccaattacaaaat

SEQ ID NO: 124773 - DNA, 525 bp, Homo sapiens
  Payload ID: 4502
  Gene Symbol: CTLA4
  Gene Name: cytotoxic T-lymphocyte-associated protein 4
  Uniprot ID: P16410
  ENST ID: ENST00000295854
  CDS Start-End: 1-525
atggcttgccttggatttcagcggcacaaggctcagctgaacctggctaccaggacctggccctgcactctcctgttttttcttctcttcatccctgtcttctgcaaagcaatgcacgtggcccagcctgctgtggtactggccagcagccgaggcatcgccagctttgtgtgtgagtatgcatctccaggcaaagccactgaggtccgggtgacagtgcttcggcaggctgacagccaggtgactgaagtctgtgcggcaacctacatgatggggaatgagttgaccttcctagatgattccatctgcacgggcacctccagtggaaatcaagtgaacctcactatccaaggactgagggccatggacacgggactctacatctgcaaggtggagctcatgtacccaccgccatactacctgggcataggcaacggaacccagatttatgtaattgctaaagaaaagaagccctcttacaacaggggtctatgtgaaaatgcccccaacagagccagaatgtga

SEQ ID NO: 124774 - DNA, 1977 bp, Homo sapiens
  Payload ID: 4502
  Gene Symbol: CTLA4
  Gene Name: cytotoxic T-lymphocyte-associated protein 4
  Uniprot ID: P16410
  ENST ID: ENST00000302823
  CDS Start-End: 158-829
gccttctgtgtgtgcacatgtgtaatacatatctgggatcaaagctatctatataaagtccttgattctgtgtgggttcaaacacatttcaaagcttcaggatcctgaaaggttttgctctacttcctgaagacctgaacaccgctcccataaagccatggcttgccttggatttcagcggcacaaggctcagctgaacctggctaccaggacctggccctgcactctcctgttttttcttctcttcatccctgtcttctgcaaagcaatgcacgtggcccagcctgctgtggtactggccagcagccgaggcatcgccagctttgtgtgtgagtatgcatctccaggcaaagccactgaggtccgggtgacagtgcttcggcaggctgacagccaggtgactgaagtctgtgcggcaacctacatgatggggaatgagttgaccttcctagatgattccatctgcacgggcacctccagtggaaatcaagtgaacctcactatccaaggactgagggccatggacacgggactctacatctgcaaggtggagctcatgtacccaccgccatactacctgggcataggcaacggaacccagatttatgtaattgatccagaaccgtgcccagattctgacttcctcctctggatccttgcagcagttagttcggggttgtttttttatagctttctcctcacagctgtttctttgagcaaaatgctaaagaaaagaagccctcttacaacaggggtctatgtgaaaatgcccccaacagagccagaatgtgaaaagcaatttcagccttattttattcccatcaattgagaaaccattatgaagaagagagtccatatttcaatttccaagagctgaggcaattctaacttttttgctatccagctatttttatttgtttgtgcatttggggggaattcatctctctttaatataaagttggatgcggaacccaaattacgtgtactacaatttaaagcaaaggagtagaaagacagagctgggatgtttctgtcacatcagctccactttcagtgaaagcatcacttgggattaatatggggatgcagcattatgatgtgggtcaaggaattaagttagggaatggcacagcccaaagaaggaaaaggcagggagcgagggagaagactatattgtacacaccttatatttacgtatgagacgtttatagccgaaatgatcttttcaagttaaattttatgccttttatttcttaaacaaatgtatgattacatcaaggcttcaaaaatactcacatggctatgttttagccagtgatgctaaaggttgtattgcatatatacatatatatatatatatatatatatatatatatatatatatatatatatatatatattttaatttgatagtattgtgcatagagccacgtatgtttttgtgtatttgttaatggtttgaatataaacactatatggcagtgtctttccaccttgggtcccagggaagttttgtggaggagctcaggacactaatacaccaggtagaacacaaggtcatttgctaactagcttggaaactggatgaggtcatagcagtgcttgattgcgtggaattgtgctgagttggtgttgacatgtgctttggggcttttacaccagttcctttcaatggtttgcaaggaagccacagctggtggtatctgagttgacttgacagaacactgtcttgaagacaatggcttactccaggagacccacaggtatgaccttctaggaagctccagttcgatgggcccaattcttacaaacatgtggttaatgccatggacagaagaaggcagcaggtggcagaatggggtgcatgaaggtttctgaaaattaacactgcttgtgtttttaactcaatattttccatgaaaatgcaacaacatgtataatatttttaattaaataaaaatctgtggtggtcgtttt

SEQ ID NO: 124775 - DNA, 969 bp, Homo sapiens
  Payload ID: 4502
  Gene Symbol: CTLA4
  Gene Name: cytotoxic T-lymphocyte-associated protein 4
  ENST ID: ENST00000427473
  CDS Start-End: 146-559
tctcttactatatgtgaaaaaaatgaaggacatgggggaagtgtgacttgccccaaatcacatatttcatggtagagccaggtcttctgtttgtcatatcagtgttcttcctgccacaaccatcttgaagaatctatttctcacaatgcacgtggcccagcctgctgtggtactggccagcagccgaggcatcgccagctttgtgtgtgagtatgcatctccaggcaaagccactgaggtccgggtgacagtgcttcggcaggctgacagccaggtgactgaagtctgtgcggcaacctacatgatggggaatgagttgaccttcctagatgattccatctgcacgggcacctccagtggaaatcaagtgaacctcactatccaaggactgagggccatggacacgggactctacatctgcaaggtggagctcatgtacccaccgccatactacctgggcataggcaacggaacccagatttatgtaattgctaaagaaaagaagccctcttacaacaggggtctatgtgaaaatgcccccaacagagccagaatgtgaaaagcaatttcagccttattttattcccatcaattgagaaaccattatgaagaagagagtccatatttcaatttccaagagctgaggcaattctaacttttttgctatccagctatttttatttgtttgtgcatttggggggaattcatctctctttaatataaagttggatgcggaacccaaattacgtgtactacaatttaaagcaaaggagtagaaagacagagctgggatgtttctgtcacatcagctccactttcagtgaaagcatcacttgggattaatatggggatgcagcattatgatgtgggtcaaggaattaagttagggaatggcacagcccaaagaaggaaaaggcagggagcgagggagaagactatattgtacacaccttatatttacgtatgaga

SEQ ID NO: 124776 - DNA, 277 bp, Homo sapiens
  Payload ID: 4502
  Gene Symbol: CTLA4
  Gene Name: cytotoxic T-lymphocyte-associated protein 4
  Uniprot ID: P16410
  ENST ID: ENST00000472206
  CDS Start-End: 1-240
atggcttgccttggatttcagcggcacaaggctcagctgaacctggctaccaggacctggccctgcactctcctgttttttcttctcttcatccctgtcttctgcaaagcaatgcacgtggcccagcctgctgtggtactggccagcagccgaggcatcgccagctttgtgtctaaagaaaagaagccctcttacaacaggggtctatgtgaaaatgcccccaacagagccagaatgtgaaaagcaatttcagccttattttattcccatcaattga

SEQ ID NO: 124777 - DNA, 2229 bp, Homo sapiens
  Payload ID: 4503
  Gene Symbol: DBP
  Gene Name: D site of albumin promoter (albumin D-box) binding protein
  Uniprot ID: Q10586
  ENST ID: ENST00000222122
  CDS Start-End: 445-1422
ttgctttggccacgcctcaaggcggccgcctcctcctgccccctcctccgcccctccgcgcacacctctcggtgcagattgcaaagcgccttccgttgcgagagctgcagattttgcaagagccaggctcgcccaccttgtagaaggagcgccttgagtcccctctcaccctcggttgcaaagagccgaccgcttgatctggacaccccctcgcccagattgcatgatctcccgggaccctcttgagttgcacgtttctgcaccgaggacctcaaatccccgtcgctcctaggatttgcagcgttctggatactggagggttgcaggctacactcgcccgcccctgggcagacactcgtccaaaccactggagtgtgctggtgactggcaggccagcccttcgcctctccatgaacccgtgagcctgggggcaggtgccaggcgatggcgcggcctgtgagcgacaggaccccggcccctctgctgctgggcggcccggccgggacaccccctggcgggggagcgctgcttgggttgcggagccttctgcaggggaccagcaagcccaaagagccggccagctgtctcctgaaggaaaaggagcgcaaggcggccctgcctgcagccacaacccctgggccaggcctggagactgcgggcccggcggatgccccggctggggcagtggtgggcggagggtccccgcgggggcgcccggggccggtgcccgccccgggtctgttggcgccactgctgtgggagcgcacgctgccgttcggcgatgtggagtacgtagacctggacgccttcctgctggagcacgggctcccgcccagcccgccgccccccggtggcccgtcgccggagccgtcgcccgcgcggacgcccgcaccctccccagggccgggttcgtgcggctcggcttccccccgctcctctcctgggcacgcccccgcccgggctgccctcgggaccgccagcggccaccgcgcaggcctgacctctcgggacacacccagccctgtggacccagacaccgtggaggtgttgatgacctttgaacccgacccagctgatcttgccctatcaagcattcctggccacgagacctttgaccctcgaagacatcgcttctcagaagaggaacttaagccccagccaatcatgaagaaggcaagaaaaatccaggtgccggaggagcagaaggatgagaaatactggagccggcggtacaagaacaacgaggcagccaagcggtcccgtgacgcccggcggctcaaggagaaccagatatcggtgcgggcggccttcctggagaaggagaacgccctgctgcggcaggaagttgtggccgtgcgccaggagctgtcccactaccgcgccgtgctgtcccgataccaggcccagcacggggccctgtgaggctgccccacatccccacctggcggagctctcctccgccttgctgagacttacgccctgttcccttcctgccctgtggcccacgggccggccagctgggtgccccagggacgtgataatgcagataaatacatttatatttttaagaaaaagcgagcctcccccctcccttgcgggggcggggagggttctctgtgtgtgtccccggcacgtcagggaccctatcctcccaccgcctccgttaacacgatcctgaataaatcttgagaaccccagagccagctgttgtggaagaagagggcagctccctggcatactggctgcagcccgtgggcagctccgggctgtcgtccatagagggcaggcgctgctggaagtgctggagtctgagtcctcccgcgggctgtcggatggaggaagggcagaaggtctgagaggaatgaagcgactgcctttattgcatagaccttttcaattgctttttagattggggacggaggacgcgcatgagacgaacaggggatatgaatttccccgcccccacccgcggggagaggaacattagtgcaaatcctagcgccggccccggggaacctgcccctcctgggctgattggccagctaaatggaggcaccggagtggatggggcgaggctgcgggccctgaccggccgactcactgaggcctaccccagccagtacattccaggtcctgtcattgggcgacgcgtaaaatagactccgccctcagccatcctggccgggtaggagcaggtggcaagcgtcaggactgagccctgccccgtaa

SEQ ID NO: 124778 - DNA, 1489 bp, Homo sapiens
  Payload ID: 4503
  Gene Symbol: DBP
  Gene Name: D site of albumin promoter (albumin D-box) binding protein
  ENST ID: ENST00000601104
  CDS Start-End: 370-1158
agattgcaaagcgccttccgttgcgagagctgcagattttgcaagagccaggctcgcccaccttgtagaaggagcgccttgagtcccctctcaccctcggttgcaaagagccgaccgcttgatctggacaccccctcgcccagattgcatgatctcccgggaccctcttgagttgcacgtttctgcaccgaggacctcaaatccccgtcgctcctaggatttgcagcgttctggatactggagggttgcaggctacactcgcccgcccctgggcagacactcgtccaaaccactggagtgtgctggtgactggcaggccagcccttcgcctctccatgaacccgtgagcctgggggcaggtgccaggcgatggcgcggcctgtgagcgacaggaccccggcccctctgctgctgggcggcccggccgggacaccccctggcgggggagcgctgcttgggttgcggagccttctgcaggggaccagcaagcccaaagagccggccagctgtctcctgaaggaaaaggagcgcaaggcggccctgcctgcagccacaacccctgggccaggcctggagactgcgggcccggcggatgccccggctggggcagtggtgggcggagggtccccgcgggggcgcccggggccggtgcccgccccgggtctgttggcgccactgctgtgggagcgcacgctgccgttcggcgatgtggagtacgtagacctggacgccttcctgctggagcacgggctcccgcccagcccgccgccccccggtggcccgtcgccggagccgtcgcccgcgcggacgcccgcaccctccccagggccgggttcgtgcggctcggcttccccccgctcctctcctgggcacgcccccgcccgggctgccctcgggaccgccagcggccaccgcgcaggcctgacctctcgggacacacccagccctgtggacccagacaccgtggaggtgttgatgacctttgaacccgacccagctgatcttgccctatcaagcattcctggccacgagacctttgaccctcgaagacatcgcttctcagaagaggaacttaagccccagccaatcatgaagaaggcaagaaaaatccaggtgccggaggagcagaaggtgagcagagctggatgtgggagatagacttggctggagacatgccccacagccagggaggggccttttctcacagtcaagcctgggcttctccttgggattagtgctcagcctctcctggcctgcagccacagattagtcctccttggccacggggcacaagggggcaggggcctgaggtttataaagacagtgtcaactgggcgaggggcctcactcgtgtaatcccagcattttagggggctgaggcaggaggatctcttgagctcgggagttcaagaccagcctgggcaacatggcaaaaccccatttctacaagccacttgggaggctgaggtgggaggactgcttgtgcctg

SEQ ID NO: 124779 - DNA, 709 bp, Homo sapiens
  Payload ID: 4503
  Gene Symbol: DBP
  Gene Name: D site of albumin promoter (albumin D-box) binding protein
  ENST ID: ENST00000599385
  CDS Start-End: 186-557
gccgggggaacgtgagggcgccgatggcgggggcctgggaggaagggaggaggagggaagcaggcgtcagcacgtgactcggccctgaacctgtgtccttagctggccccggctggctggtgcttaaaggcctgacctctcgggacacacccagccctgtggacccagacaccgtggaggtgttgatgacctttgaacccgacccagctgatcttgccctatcaagcattcctggccacgagacctttgaccctcgaagacatcgcttctcagaagaggaacttaagccccagccaatcatgaagaaggcaagaaaaatccaggtgccggaggagcagaaggatgagaaatactggagccggcggtacaagaacaacgaggcagccaagcggtcccgtgacgcccggcggctcaaggagaaccagatatcggtgcgggcggccttcctggagaaggagaacgccctgctgcggcaggaagttgtggccgtgcgccaggagctgtcccactaccgcgccgtgctgtcccgataccaggcccagcacggggccctgtgaggctgccccacatccccacctggcggagctctcctccgccttgctgagacttacgccctgttcccttcctgccctgtggcccacgggccggccagctgggtgccccagggacgtgataatgcagataaatacatttatatttttaagaaaaa

SEQ ID NO: 124780 - DNA, 712 bp, Homo sapiens
  Payload ID: 4503
  Gene Symbol: DBP
  Gene Name: D site of albumin promoter (albumin D-box) binding protein
  ENST ID: ENST00000593500
  CDS Start-End: 235-606
ggctggctggtgcttaaaggtacaggcgcctcctttcgaaccaatcttctggaaccttagagcagcttctcctcctctttccagcgagtagctcttagactctaacttgagagcttttcagtgcagtagattctttttctctggacagtctggggtctaagcttaggtcgtggattcggcctgacctctcgggacacacccagccctgtggacccagacaccgtggaggtgttgatgacctttgaacccgacccagctgatcttgccctatcaagcattcctggccacgagacctttgaccctcgaagacatcgcttctcagaagaggaacttaagccccagccaatcatgaagaaggcaagaaaaatccaggtgccggaggagcagaaggatgagaaatactggagccggcggtacaagaacaacgaggcagccaagcggtcccgtgacgcccggcggctcaaggagaaccagatatcggtgcgggcggccttcctggagaaggagaacgccctgctgcggcaggaagttgtggccgtgcgccaggagctgtcccactaccgcgccgtgctgtcccgataccaggcccagcacggggccctgtgaggctgccccacatccccacctggcggagctctcctccgccttgctgagacttacgccctgttcccttcctgccctgtggcccacgggccggccagctgggtgcccc

SEQ ID NO: 124781 - DNA, 2617 bp, Homo sapiens
  Payload ID: 4504
  Gene Symbol: D2HGDH
  Gene Name: D-2-hydroxyglutarate dehydrogenase
  Uniprot ID: Q8N465
  ENST ID: ENST00000321264
  CDS Start-End: 210-1775
ttcggccgctgggcggagccgtcaatgcgcaggcgcggcgtcgccccgcccactccggctcggcggctctgggcctgcggcgggcgctgcgggttggagctcgggacgtgatcgtgggcgcgcagccagcggctccctgcccttcccctccgggccctgagtaccggccccccaccaaggaggagcccgaggtctccgtcccggcggcgatgctgccccgtcggcctctggcgtggcccgcgtggctgttgcggggtgctccgggagccgcgggttcttggggtcggccggttggccccctggcccgcagaggctgctgctccgccccggggacccccgaggtgccgctgacccgggagcgctaccccgtgcggcgcttgccgttctccacggtgtctaagcaggacctggccgcctttgagcgcatcgtgcccggcggggtcgtcacggacccggaagcgctgcaggctcccaacgtggactggttgcggacgctgcgaggctgtagcaaggtgctgctgaggccacggacgtcggaggaggtgtcccacatcctcaggcactgccacgagaggaacctggccgtgaacccacaggggggcaacacaggcatggtgggtggcagcgtccccgtctttgacgagatcatcctctccactgcccgcatgaaccgggtcctcagcttccacagcgtgtctggaattctggtttgccaggcgggctgcgtcctggaggagctgagccggtatgtggaggaacgggacttcatcatgccgctggacttaggagccaagggcagctgccacatcgggggaaacgtggcaaccaacgctggaggcctgcggtttcttcgatatggctcactgcatgggactgtcctgggcctggaagtggtgctggccgacggcactgtcctggactgcctgacctccctgaggaaggacaacacgggctatgacctgaagcagctgttcatcgggtcggagggcactttggggatcatcaccacggtgtccatcttgtgtccacccaagcccagggctgtgaacgtggctttcctcggctgcccaggctttgctgaggttctgcagaccttcagcacctgcaaggggatgctgggtgagatcctgtctgcattcgagttcatggatgctgtgtgcatgcagctggtcgggcgccatctccacctggccagcccggtgcaagagagtccgttttacgtcctcatcgagacttcaggctccaacgcaggccatgacgctgagaagctgggccacttcctggagcacgcgctgggctccggcctggtgaccgatgggaccatggccaccgaccagaggaaagtcaagatgctgtgggccctgagggaaaggatcacagaggcgctgagccgggatggctacgtgtacaagtacgacctctccctccctgtggagcggctctacgacatcgtgactgacctgcgcgcccgcctcggcccgcacgccaagcacgtggtgggctatggccaccttggagatggtaacctgcacctcaatgtgacggcggaggccttcagcccctcgctcctggctgccctggagccccacgtgtacgagtggacggccgggcagcagggcagcgtcagcgcggagcacggagtgggcttcaggaagagggacgtcctgggctacagcaagccaccgggggccctgcagctcatgcagcagctcaaggccctgctggaccccaagggcatcctcaacccctacaagacgctgcccagccaggcctgacggccactcctgctgctgccaaggcccactgggggtcggcgggtggctctcgggcgggggtgttgcggtggctctgagggatgagccggcagtgggcaggggaccaggcacctggttgaagggactgggagcccgcactggggaactgccggacgcaggccctcgggcaggagcatctggcagagtggggggcgtggcaggcaccctcctttgcagggcgaggtggggcctctgcagccatcctggacaggccggggtggcggcagctttgcccacgtggaagcggggtgggtctcacttgcgtggtggcccctggccccatcttgcctgctgcggcctggggagcaggcgctgggtggtggttctgcctgcttgctgctcgttccccgggcatgcgtgggcagcggggggcatgcgtgggcagcagggggcgtgggcagcgggggcacgggcaggaccacgtgggccgtgatcgtgggttgccgagaggacctgagcgctgcggctctgctgaatggagccgggtccctcaggccgtggacgccctcgggaggggggtgactgtggcttgtgtctggacaggaatgtgtcatttcccacatcttctagagggctgccagctgggaagacagttatcagggcaagctgtgctctgagtttcgggttctgctcctacaaagaacgtgcggtgctgcgggcgagggccccggcacggacaagggccactgcagagtgtgtttctgctcgtcagctgccctgggcagcggatgggctgggcgatgcagctggatgcacatctcattctgtcatgaatgtccagtaaaaatctgaattggttgcaa

SEQ ID NO: 124782 - DNA, 2277 bp, Homo sapiens
  Payload ID: 4504
  Gene Symbol: D2HGDH
  Gene Name: D-2-hydroxyglutarate dehydrogenase
  ENST ID: ENST00000400769
  CDS Start-End: 159-1121
actccggctcggcggctctgggcctgcggcgggcgctgcgggttggagctcgggacgtgatcgtgggcgcgcagccagcggctccctgcccttcccctccgggccctgagtaccggccccccaccaaggaggagcccgaggtctccgtcccggcggcgatgctgccccgtcggcctctggcgtggcccgcgtggctgttgcggggtgctccgggagccgcgggttcttggggtcggccggttggccccctggcccgcagaggctgctgctccgccccggggacccccgaggtgccgctgacccgggagcgctaccccgtgcggcgcttgccgttctccacggtgtctaagcaggacctggccgcctttgagcgcatcgtgcccggcggggtcgtcacggacccggaagcgctgcaggctcccaacgtggactggttgcggacgctgcgaggctgtagcaaggtgctgctgaggccacggacgtcggaggaggtgtcccacatcctcaggcactgccacgagaggaacctggccgtgaacccacaggggggcaacacaggcatggtgggtggcagcgtccccgtctttgacgagatcatcctctccactgcccgcatgaaccgggtcctcagcttccacagcgtgtctggaattctggtttgccaggcgggctgcgtcctggaggagctgagccggtatgtggaggaacgggacttcatcatgccgctggacttaggagccaagggcagctgccacatcgggggaaacgtggcaaccaacgctggaggcctgcggtttcttcgatatggctcactgcatgggactgtcctgggcctggaagtggtgctggccgacggcactgtcctggactgcctgacctccctgaggaaggacaacacgggctatgacctgaagcagctgttcatcgggtcggagggcactttggggatcatcaccacggtgtccatcttgtgtccacccaagcccagggctgtgaacgtggctttcctcgatgctgtgggccctgagggaaaggatcacagaggcgctgagccgggatggctacgtgtacaagtacgacctctccctccctgtggagcggctctacgacatcgtgactgacctgcgcgcccgcctcggcccgcacgccaagcacgtggtgggctatggccaccttggagatggtaacctgcacctcaatgtgacggcggaggccttcagcccctcgctcctggctgccctggagccccacgtgtacgagtggacggccgggcagcagggcagcgtcagcgcggagcacggagtgggcttcaggaagagggacgtcctgggctacagcaagccaccgggggccctgcagctcatgcagcagctcaaggccctgctggaccccaagggcatcctcaacccctacaagacgctgcccagccaggcctgacggccactcctgctgctgccaaggcccactgggggtcggcgggtggctctcgggcgggggtgttgcggtggctctgagggatgagccggcagtgggcaggggaccaggcacctggttgaagggactgggagcccgcactggggaactgccggacgcaggccctcgggcaggagcatctggcagagtggggggcgtggcaggcaccctcctttgcagggcgaggtggggcctctgcagccatcctggacaggccggggtggcggcagctttgcccacgtggaagcggggtgggtctcacttgcgtggtggcccctggccccatcttgcctgctgcggcctggggagcaggcgctgggtggtggttctgcctgcttgctgctcgttccccgggcatgcgtgggcagcggggggcatgcgtgggcagcagggggcgtgggcagcgggggcacgggcaggaccacgtgggccgtgatcgtgggttgccgagaggacctgagcgctgcggctctgctgaatggagccgggtccctcaggccgtggacgccctcgggaggggggtgactgtggcttgtgtctggacaggaatgtgtcatttcccacatcttctagagggctgccagctgggaagacagttatcagggcaagctgtgctctgagtttcgggttctgctcctacaaagaacgtgcggtgctgcgggcgagggccccggcacggacaagggccactgcagagtgtgtttctgctcgtcagctgccctgggcagcggatgggctgggcgatgcagctggatgcacatctcattctgtcatgaatgtccagtaaaaatctgaattggttgc

SEQ ID NO: 124783 - DNA, 2208 bp, Homo sapiens
  Payload ID: 4504
  Gene Symbol: D2HGDH
  Gene Name: D-2-hydroxyglutarate dehydrogenase
  ENST ID: ENST00000403782
  CDS Start-End: 205-1368
aatgcgcaggcgcggcgtcgccccgcccactccggctcggcggctctgggcctgcggcgggcgctgcgggttggagctcgggacgtgatcgtgggctgtagcaaggtgctgctgaggccacggacgtcggaggaggtgtcccacatcctcaggcactgccacgagaggaacctggccgtgaacccacaggggggcaacacaggcatggtgggtggcagcgtccccgtctttgacgagatcatcctctccactgcccgcatgaaccgggtcctcagcttccacagcgtgtctggaattctggtttgccaggcgggctgcgtcctggaggagctgagccggtatgtggaggaacgggacttcatcatgccgctggacttaggagccaagggcagctgccacatcgggggaaacgtggcaaccaacgctggaggcctgcggtttcttcgatatggctcactgcatgggactgtcctgggcctggaagtggtgctggccgacggcactgtcctggactgcctgacctccctgaggaaggacaacacgggctatgacctgaagcagctgttcatcgggtcggagggcactttggggatcatcaccacggtgtccatcttgtgtccacccaagcccagggctgtgaacgtggctttcctcggctgcccaggctttgctgaggttctgcagaccttcagcacctgcaaggggatgctgggtgagatcctgtctgcattcgagttcatggatgctgtgtgcatgcagctggtcgggcgccatctccacctggccagcccggtgcaagagagtccgttttacgtcctcatcgagacttcaggctccaacgcaggccatgacgctgagaagctgggccacttcctggagcacgcgctgggctccggcctggtgaccgatgggaccatggccaccgaccagaggaaagtcaagatgctgtgggccctgagggaaaggatcacagaggcgctgagccgggatggctacgtgtacaagtacgacctctccctccctgtggagcggctctacgacatcgtgactgacctgcgcgcccgcctcggcccgcacgccaagcacgtggtgggctatggccaccttggagatggtaacctgcacctcaatgtgacggcggaggccttcagcccctcgctcctggctgccctggagccccacgtgtacgagtggacggccgggcagcagggcagcgtcagcgcggagcacggagtgggcttcaggaagagggacgtcctgggctacagcaagccaccgggggccctgcagctcatgcagcagctcaaggccctgctggaccccaagggcatcctcaacccctacaagacgctgcccagccaggcctgacggccactcctgctgctgccaaggcccactgggggtcggcgggtggctctcgggcgggggtgttgcggtggctctgagggatgagccggcagtgggcaggggaccaggcacctggttgaagggactgggagcccgcactggggaactgccggacgcaggccctcgggcaggagcatctggcagagtggggggcgtggcaggcaccctcctttgcagggcgaggtggggcctctgcagccatcctggacaggccggggtggcggcagctttgcccacgtggaagcggggtgggtctcacttgcgtggtggcccctggccccatcttgcctgctgcggcctggggagcaggcgctgggtggtggttctgcctgcttgctgctcgttccccgggcatgcgtgggcagcggggggcatgcgtgggcagcagggggcgtgggcagcgggggcacgggcaggaccacgtgggccgtgatcgtgggttgccgagaggacctgagcgctgcggctctgctgaatggagccgggtccctcaggccgtggacgccctcgggaggggggtgactgtggcttgtgtctggacaggaatgtgtcatttcccacatcttctagagggctgccagctgggaagacagttatcagggcaagctgtgctctgagtttcgggttctgctcctacaaagaacgtgcggtgctgcgggcgagggccccggcacggacaagggccactgcagagtgtgtttctgctcgtcagctgccctgggcagcggatgggctgggcgatgcagctggatgcacatctcattctgtcatgaatgtccagtaaaaatctgaattggttgc

SEQ ID NO: 124784 - DNA, 955 bp, Homo sapiens
  Payload ID: 4504
  Gene Symbol: D2HGDH
  Gene Name: D-2-hydroxyglutarate dehydrogenase
  ENST ID: ENST00000445308
  CDS Start-End: 1-955
aaagccacgcaaaccacaggccgatctgtctgagccctaggatttggcccggttctgcttcagccaccagcaccgtctgctcctcctcagaatccttcctcccccgtggcccgcccgccgtgtccctcctcctccacggcccgcccaccgtgtccttccctcccccgtggcccacccaccatgtccttccctcccctgtggcccacccgccatgtccctgcctcccacccgacatgccccttgagctgcctgggccctgctgttgtccccactgcctgtgtgactctgcgcccccttccctaccctgccccaccctggttcagggagcgtccaggcccattctcatcctcagggccttccctggcccttgccactctgtgccgtgtcatgacctgaagctgcaggtgggcgcctcccccttccgtcatggctgtcccccttctgtgaggtgtcccagccgcctgattgccggagtcccagggtgctcggtgctgtcgtggagcctgggacattcactgtctgggattgattccaggatgctgtgggccctgagggaaaggatcacagaggcgctgagccgggatggctacgtgtacaagtacgacctctccctccctgtggagcggctctacgacatcgtgactgacctgcgcgcccgcctcggcccgcacgccaagcacgtggtgggctatggccaccttggagatggtaacctgcacctcaatgtgacggcggaggccttcagcccctcgctcctggctgccctggagccccacgtgtacgagtggacggccgggcagcagggcagcgtcagcgcggagcacggagtgggcttcaggaagagggacgtcctgggctacagcaagccaccgggggccctgcagctcatgcagcagctcaaggccctgctggaccccaagggcatcctcaacccctacaagacgctgcccagcca

SEQ ID NO: 124785 - DNA, 454 bp, Homo sapiens
  Payload ID: 4504
  Gene Symbol: D2HGDH
  Gene Name: D-2-hydroxyglutarate dehydrogenase
  ENST ID: ENST00000417686
  CDS Start-End: 1-454
ccacagcgtgtctggaattctggtttgccaggcgggctgcgtcctggaggagctgagccggtatgtggaggaacgggacttcatcatgccgctggacttaggagccaagggcagctgccacatcgggggaaacgtggcaaccaacgctggaggcctgcggtttcttcgatatggctcactgcatgggactgtcctgggcctggaagtggtgctggccgacggcactgtcctggactgcctgacctccctgaggaaggacaacacgggctatgacctgaagcagctgttcatcgggtcggagggcactttggggatcatcaccacggtgtccatcttgtgtccacccaagcccagggctgtgaacgtggctttcctcggttttctgtgttctgctctgatcccactccaactgcagtcacctgtgtgccgcccgcctgtggtcctgggagcccga

SEQ ID NO: 124786 - DNA, 566 bp, Homo sapiens
  Payload ID: 4504
  Gene Symbol: D2HGDH
  Gene Name: D-2-hydroxyglutarate dehydrogenase
  ENST ID: ENST00000432449
  CDS Start-End: 1-566
ttctgtgttctgctctgatcccactccaactgcagtcacctgtgtgccgcccgcctgtggtcctgggagcccgaggccagcccggctgccgcatcctgctcttcgcactccaggctgcccaggctttgctgaggttctgcagaccttcagcacctgcaaggggatgctgggtgagatcctgtctgcattcgagttcatggatgctgtgtgcatgcagctggtcgggcgccatctccacctggccagcccggtgcaagagagtccgttttacgtcctcatcgagacttcaggctccaacgcaggccatgacgctgagaagctgggccacttcctggagcacgcgctgggctccggcctggtgaccgatgggaccatggccaccgaccagaggaaagtcaagatgctgtgggccctgagggaaaggatcacagaggcgctgagccgggatggctacgtgtacaagtacgacctctccctccctgtggagcggctctacgacatcgtgactgacctgcgcgcccgcctcggcccgcacgccaagcacgtggtgggctatggccaccttg

SEQ ID NO: 124787 - DNA, 4549 bp, Homo sapiens
  Payload ID: 4504
  Gene Symbol: D2HGDH
  Gene Name: D-2-hydroxyglutarate dehydrogenase
  ENST ID: ENST00000436747
  CDS Start-End: 174-905
ggcgtcgccccgcccactccggctcggcggctctgggcctgcggcgggcgctgcgggttggagctcgggacgtgatcgtgggcgcgcagccagcggctccctgcccttcccctccgggccctgagtaccggccccccaccaaggaggagcccgaggtctccgtcccggcggcgatgctgccccgtcggcctctggcgtggcccgcgtggctgttgcggggtgctccgggagccgcgggttcttggggtcggccggttggccccctggcccgcagaggctgctgctccgccccggggacccccgaggtgccgctgacccgggagcgctaccccgtgcggcgcttgccgttctccacggtgtctaagcaggacctggccgcctttgagcgcatcgtgcccggcggggtcgtcacggacccggaagcgctgcaggctcccaacgtggactggttgcggacgctgcgaggctgtagcaaggtgctgctgaggccacggacgtcggaggaggtgtcccacatcctcaggcactgccacgagaggaacctggccgtgaacccacaggggggcaacacaggcatggtgggtggcagcgtccccgtctttgacgagatcatcctctccactgcccgcatgaaccgggtcctcagcttccacagcgtgtctggcgggctgcgtcctggaggagctgagccggtatgtggaggaacgggacttcatcatgccgctggacttaggagccaagggcagctgccacatcgggggaaacgtggcaaccaacgctggaggcctgcggtttcttcgatatggctcactgcatgggactgtcctgggcctggaagtggtgctggccgacggcactgtcctggactgcctgacctccctgaggaaggacaacacgggctatgacctgaagcagctgttcatcgggtcggagggcactttggggatcatcaccacggtgtccatcttgtgtccacccaagcccagggctgtgaacgtggctttcctcgtcacctgtgtgccgcccgcctgtggtcctgggagcccgaggccagcccggctgccgcatcctgctcttcgcactccaggtctcagacaggagtcactcgcctcttcgtgccacgcccacgtctaagccgggtggaacaggccctgtgaggatggtcctggtgtccctcgtgctcgtgggctcggtccagctctccagggccccagtcagccctggctcctgctctcctgcagctggggcgacttccgacgaggcactcttgtcccacttcctggggattcctgcccactctgagcaagatgcccagtccccaccgccagaccctccaacaccaccaccacctcccacaccccagccctctacgcgtctgcagccacaccccgacatggtgctcgggtcacaggccttgaggtgctcctgtgtcacccagtgcaggtgtctgcccccagcctctgcgcctgtgagaccttctctctggaaaattcttctctgatatccacatgcctttgcattgcctccctgtctcgccctgaaaggtgggcacgggccccctcctgctgcagcgtctctggggctgcccgcctgcagacatctccactcagttcctttccatctttgcacttgagggtcggcttccccagggcagcggcctcactggtagcccccaccaaccctggagcactaacacgcctgttggatgaggtcctgagtgcagggaagacctgagtgctgattgtgttaagagaaatgcagccattcccaaaggctgcctgttgctggctctgtgtttgcagaattcccaagatacgccccctctgagtcccactgccgtctcaggtgctgtgtggttcttcggcgccttcccctcctgatttgatgctggtggtgacaccaggcgtgcacctgtccctcctgatctgatgctggtgacaccaggcgtgcacctgcccctcctggcatctgatgctggtggtgacaccaggcgtgccctgcccctcctgatctgatgctggtggtgacaccaggcgtgcaccttctcctgatctgatgctggtggtgacactaggctgcccaggctttgctgaggttctgcagaccttcagcacctgcaaggggatgctgggtgagatcctgtctgcattcgagttcatggatgctgtgtgcatgcagctggtcgggcgccatctccacctggccagcccggtgcaagagagtccgttttacgtcctcatcgagacttcaggctccaacgcaggccatgacgctgagaagctgggccacttcctggagcacgcgctgggctccggcctggtgaccgatgggaccatggccaccgaccagaggaaagtcaagggtctcgctctcacccaggctggagtgcagtgacacagttgcagctcactgcagcctcgacctcctgggctcaagcaatcctcccgcctcagcctcccgagtagctgagtctacagatctccacaatggaagttcgaagcaagcaaaagccacgcaaaccacaggccgatctgtctgagccctaggatttggcccggttctgcttcagccaccagcaccgtctgctcctcctcagaatccttcctcccccgtggcccgcccgccgtgtccctcctcctccacggcccgcccaccgtgtccttccctcccccgtggcccacccaccatgtccttccctcccctgtggcccacccgccatgtccctgcctcccacccgacatgccccttgagctgcctgggccctgctgttgtccccactgcctgtgtgactctgcgcccccttccctaccctgccccaccctggttcagggagcgtccaggcccattctcatcctcagggccttccctggcccttgccactctgtgccgtgtcatgacctgaagctgcaggtgggcgcctcccccttccgtcatggctgtcccccttctgtgaggtgtcccagccgcctgattgccggagtcccagggtgctcggtgctgtcgtggagcctgggacattcactgtctgggattgattccagggttggagccacacctggtctggggcattcgctgtcctgggtcagagcccctcctggtctgggacattcgctgtctggggttggagccacacctggtctggggcatttgctgtccggggtcggagcctcacctggtgaagatacagaacatgctgctgccctaaccccgtgtggtgtgccccctgtccccgggtgtcgttcccatagccagcccttgtctcatctcgtctcatcctctagatgctgtgggccctgagggaaaggatcacagaggcgctgagccgggatggctacgtgtacaagtacgacctctccctccctgtggagcggctctacgacatcgtgactgacctgcgcgcccgcctcggcccgcacgccaagcacgtggtgggctatggccaccttggagatggtaacctgcacctcaatgtgacggcggaggccttcagcccctcgctcctggctgccctggagccccacgtgtacgagtggacggccgggcagcagggcagcgtcagcgcggagcacggagtgggcttcaggaagagggacgtcctgggctacagcaagccaccgggggccctgcagctcatgcagcagctcaaggccctgctggaccccaagggcatcctcaacccctacaagacgctgcccagccaggcctgacggccactcctgctgctgccaaggcccactgggggtcggcgggtggctctcgggcgggggtgttgcggtggctctgagggatgagccggcagtgggcaggggaccaggcacctggttgaagggactgggagcccgcactggggaactgccggacgcaggccctcgggcaggagcatctggcagagtggggggcgtggcaggcaccctcctttgcagggcgaggtggggcctctgcagccatcctggacaggccggggtggcggcagctttgcccacgtggaagcggggtgggtctcacttgcgtggtggcccctggccccatcttgcctgctgcggcctggggagcaggcgctgggtggtggttctgcctgcttgctgctcgttccccgggcatgcgtgggcagcggggggcatgcgtgggcagcagggggcgtgggcagcgggggcacgggcaggaccacgtgggccgtgatcgtgggttgccgagaggacctgagcgctgcggctctgctgaatggagccgggtccctcaggccgtggacgccctcgggaggggggtgactgtggcttgtgtctggacaggaatgtgtcatttcccacatcttctagagggctgccagctgggaagacagttatcagggcaagctgtgctctgagtttcgggttctgctcctacaaagaacgtgcggtgctgcgggcgagggccccggcacggacaagggccactgcagagtgtgtttctgctcgtcagctgccctgggcagcggatgggctgggcgatgcagctggatgcacatctcattctgtcatgaatgtccagtaaaaatctgaattggttgcaa

SEQ ID NO: 124788 - DNA, 234 bp, Homo sapiens
  Payload ID: 4504
  Gene Symbol: D2HGDH
  Gene Name: D-2-hydroxyglutarate dehydrogenase
  ENST ID: ENST00000454048
  CDS Start-End: 1-234
ggcaacacaggcatggtgggtggcagcgtccccgtctttgacgagatcatcctctccactgcccgcatgaaccgggtcctcagcttccacagcgtgtctgagagtccgttttacgtcctcatcgagacttcaggctccaacgcaggccatgacgctgagaagctgggccacttcctggagcacgcgctgggctccggcctggtgaccgatgggaccatggccaccgaccagagg

SEQ ID NO: 124789 - DNA, 269 bp, Homo sapiens
  Payload ID: 4504
  Gene Symbol: D2HGDH
  Gene Name: D-2-hydroxyglutarate dehydrogenase
  ENST ID: ENST00000437164
  CDS Start-End: 1-269
aggcactgccacgagaggaacctggccgtgaacccacaggggggcaacacaggcatggtgggtggcagcgtccccgtctttgacgagatcatcctctccactgcccgcatgaaccgggtcctcagcttccacagcgtgtctggctgcccaggctttgctgaggttctgcagaccttcagcacctgcaaggggatgctgggtgagatcctgtctgcattcgagttcatggatgctgtgtgcatgcagctggtcgggcgccatctccacct

SEQ ID NO: 124790 - DNA, 2294 bp, Homo sapiens
  Payload ID: 4504
  Gene Symbol: D2HGDH
  Gene Name: D-2-hydroxyglutarate dehydrogenase
  ENST ID: ENST00000610344
  CDS Start-End: 436-1044
ggccggattcccagtggtggcgaggaggtggtatttttttaagtgtcagtgtggcattgtggttgcctcaataaaacagagtctttttttgtcttttttttttgagacagggtctcgctctcacccaggctggagtgcagtgacacagttgcagctcactgcagcctcgacctcctgggctcaagcaatcctcccgcctcagcctcccgagtagctgagtctacagatctccacaatggaagttcgaagcaagcaaaagccacgcaaaccacaggccgatctgtctgagccctaggatttggcccggttctgcttcagccaccagcaccgtctgctcctcctcagaatccttcctcccccgtggcccgcccgccgtgtccctcctcctccacggcccgcccaccgtgtccttccctcccccgtggcccacccaccatgtccttccctcccctgtggcccacccgccatgtccctgcctcccacccgacatgccccttgagctgcctgggcccttgttgtccccactgcctgtgtgactctgcgcccccttccctaccctgccccaccctggttcagggagcgtccaggcccattctcatcctcagggccttccctggcccttgccactctgtgccgtgtcatgacctgaagctgcaggtgggcgcctcccccttccgtcatggctgtcccccttctgtgaggtgtcccagccgcctgattgccggagtcccagggtgctcggtgctgtcgtggagcctgggacattcactgtctgggattgattccagggttggagccacacctggtctggggcattcgctgtcctgggtcagagcccctcctggtctgggacattcgctgtctggggttggagccacacctggtctggggcatttgctgtccggggtcggagcctcacctggtgaagatacagaacatgctgctgccctaaccccgtgtggtgtgccccctgtccccgggtgtcgttcccatagccagcccttgtctcatctcgtctcatcctctagatgctgtgggccctgagggaaaggatcacagaggcgctgagccgggatggctacgtgtacaagtacgacctctccctccctgtggagcggctctacgacatcgtgactgacctgcgcgcccgcctcggcccgcacgccaagcacgtggtgggctatggccaccttggagatggtaacctgcacctcaatgtgacggcggaggccttcagcccctcgctcctggctgccctggagccccacgtgtacgagtggacggccgggcagcagggcagcgtcagcgcggagcacggagtgggcttcaggaagagggacgtcctgggctacagcaagccaccgggggccctgcagctcatgcagcagctcaaggccctgctggaccccaagggcatcctcaacccctacaagacgctgcccagccaggcctgacggccactcctgctgctgccaaggcccactgggggtcggcgggtggctctcgggcgggggtgttgcggtggctctgagggatgagccggcagtgggcaggggaccaggcacctggttgaagggactgggagcccgcactggggaactgccggacgcaggccctcgggcaggagcatctggcagagtggggggcgtggcaggcaccctcctttgcagggcgaggtggggcctctgcagccatcctggacaggccggggtggcggcagctttgcccacgtggaagcggggtgggtctcacttgcgtggtggcccctggccccatcttgcctgctgcggcctggggagcaggcgctgggtggtggttctgcctgcttgctgctcgttccccgggcatgcgtgggcagcggggggcatgcgtgggcagcagggggcgtgggcagcgggggcacgggcaggaccacgtgggccgtgatcgtgggttgccgagaggacctgagcgctgcggctctgctgaatggagccgggtccctcaggccgtggacgccctcgggaggggggtgactgtggcttgtgtctggacaggaatgtgtcatttcccacatcttctagagggctgccagctgggaagacagttatcagggcaagctgtgctctgagtttcgggttctgctcctacaaagaacgtgcggtgctgcgggcgagggccccggcacggacaagggccactgcagagtgtgtttctgctcgtcagctgccctgggcagcggatgggctgggcgatgcagctggatgcacatctcattctgtcatgaatgtccagtaaaaatctgaattggttgc

SEQ ID NO: 124791 - DNA, 1632 bp, Homo sapiens
  Payload ID: 4505
  Gene Symbol: DPF1
  Gene Name: D4, zinc and double PHD fingers family 1
  Uniprot ID: Q92782
  ENST ID: ENST00000355526
  CDS Start-End: 28-1272
gtgctcccgccccccgggaatgaatggatgggcggcctcagcgcccgcccgaccgctgggaggaccgacccggcggggacctgctgggggcaggacccggggagcaagatggccactgtcatccctggccccctgagcctaggcgaggacttctaccgcgaggccatcgagcactgccgcagttacaacgcgcgcctgtgcgccgagcgcagcctgcgactgcccttcctcgactcgcagaccggcgtggcccagaacaactgctacatctggatggagaagacccaccgcgggccgggtttggccccgggacagatttacacgtaccccgcccgctgttggaggaagaaacggagactcaacatcctggaggaccccagactcaggccctgcgagtacaagatcgactgtgaagcacccctgaagaaggagggtggcctcccggaagggccggtcctcgaggctctactgtgtgcagagacgggggagaagaagattgagctgaaggaggaggagaccattatggactgtcagaaacagcagttgctggagtttccgcatgacctcgaggtggaagacttggaggatgacattcccaggaggaagaacagggccaaaggaaaggcatatggcatcgggggtctccggaaacgccaggacaccgcttccctggaggaccgagacaagccgtatgtctgtgatatctgtgggaaacggtataagaaccggccggggctcagctaccactacacccacacccacctggccgaggaggagggggaggagaacgccgaacgccacgccctgcccttccaccggaaaaacaaccataaacagttttacaaagaattggcctgggtccctgaggcacaaaggaaacacacagccaagaaggcgcccgacggcactgtcatccccaacggctactgtgacttctgcctggggggctccaagaagacggggtgtcccgaggacctcatctcctgtgcggactgtgggcgatcaggacacccctcgtgtttacaattcacggtgaacatgacggcagccgtgcggacctaccgctggcagtgcatcgagtgcaaatcctgcagcctgtgcggaacctccgagaacgacgaccagctgctgttttgtgatgactgcgatcggggttaccacatgtactgcctgagtccccccatggcggagcccccggaagggagctggagctgtcacctctgtctccggcacctgaaggaaaaggcttctgcttacatcaccctcacctaggccggctcggctcgccgcgactctggggtggtgctcgcctacctgcctctccgagctcctcaattctcccccaccctgaacatcccgcagggggagggggagagggggaagccgagagggggctgggccaccccctcccctctgtgcaagtggaatgtctgccctgtgggtgggtgggcccggccagggcctctccctccctccctccctctctgtcccttggcaaatggacaccaggggcttctcccctcaaagccataccccgcctctgggcgggcatggggggtggtgggtgccagccaggggcatggacagagcctttttctaaagaaaaagacaaaaagttaaaaaaaaaaaaaa

SEQ ID NO: 124792 - DNA, 2341 bp, Homo sapiens
  Payload ID: 4505
  Gene Symbol: DPF1
  Gene Name: D4, zinc and double PHD fingers family 1
  ENST ID: ENST00000416611
  CDS Start-End: 125-1321
cgcagccccaagaatgaatgaaatcgtagcgcgctgggcggcagagcgggcggcgcaggccgggctgggcccgcgcgcggcggcagcggcgccccgggccggaggcggcccagccgagcgggccatggccaccgccattcagaacccgctcaagtccctaggcgaggacttctaccgcgaggccatcgagcactgccgcagttacaacgcgcgcctgtgcgccgagcgcagcctgcgactgcccttcctcgactcgcagaccggcgtggcccagaacaactgctacatctggatggagaagacccaccgcgggccgggtttggccccgggacagatttacacgtaccccgcccgctgttggaggaagaaacggagactcaacatcctggaggaccccagactcaggccctgcgagtacaagatcgactgtgaagcacccctgaagaaggagggtggcctcccggaagggccggtcctcgaggctctactgtgtgcagagacgggggagaagaagattgagctgaaggaggaggagaccattatggactgtcagaaacagcagttgctggagtttccgcatgacctcgaggtggaagacttggaggatgacattcccaggaggaagaacagggccaaaggaaaggcatatggcatcgggggtctccggaaacgccaggacaccgcttccctggaggaccgagacaagccgtatgtctgtgatatctgtgggaaacggtataagaaccggccggggctcagctaccactacacccacacccacctggccgaggaggagggggaggagaacgccgaacgccacgccctgcccttccaccggaaaaacaaccataaacagttttacaaagaattggcctgggtccctgaggcacaaaggaaacacacagccaagaaggcgcccgacggcactgtcatccccaacggctactgtgacttctgcctggggggctccaagaagacggggtgtcccgaggacctcatctcctgtgcggactgtgggcgatcaggacacccctcgtgtttacaattcacggtgaacatgacggcagccgtgcggacctaccgctggcagtgcatcgagtgcaaatcctgcagcctgtgcggaacctccgagaacgacggtgccagctgggcgggtctcaccccccaggaccagctgctgttttgtgatgactgcgatcggggttaccacatgtactgcctgagtccccccatggcggagcccccggaagggagctggagctgtcacctctgtctccggcacctgaaggaaaaggcttctgcttacatcaccctcacctaggccggctcggctcgccgcgactctggggtggtgctcgcctacctgcctctccgagctcctcaattctcccccaccctgaacatcccgcagggggagggggagagggggaagccgagagggggctgggccaccccctcccctctgtgcaagtggaatgtctgccctgtgggtgggtgggcccggccagggcctctccctccctccctccctctctgtcccttggcaaatggacaccaggggcttctcccctcaaagccataccccgcctctgggcgggcatggggggtggtgggtgccagccaggggcatggacagagcctttttctaaagaaaaagacaaaaagttaaaaaaaaaaaaaagaagaaaagaaaagaagttaatatatacaaagagtcctccaaggcctggctgggtggaggggcgctgctgagagtgtccaccgggcacccgcctctgccggccccccgccgggcgccccaaccccaatttctggagctgcagccgtcccgcgccccacccaaggtgggcgccttcccctcttgtgcccagggcggtgggcgtggtgtccacccgcccctcctggtgcccacggtggatactgcatgatgtgaaccttggttttgaactctgttcctgcccctccccgaccgccccagcctgtgcccgccccgtgcctgccgtggctggtgggtggcggtggtggggccgggtgggcccccgcccagcgcctgctggaatgagaagcacagactccgccacggactccttttctctccctcctcccgccccgccaggcctggcggcccccgcccccctcgctggccattttgggggagtgagggggcgtggttgtttcttgtggttgtgtgtgtttgttgttcgggttttaaaaaagggaaactgagactgcaggtgggggaggtggtgggttttggggggatgtcccctaatccaggagtgccccctcacttgtcaccgagtctcctctattgcctgcctctgctgtgaattaacttgtt

SEQ ID NO: 124793 - DNA, 1960 bp, Homo sapiens
  Payload ID: 4505
  Gene Symbol: DPF1
  Gene Name: D4, zinc and double PHD fingers family 1
  Uniprot ID: Q92782
  ENST ID: ENST00000414789
  CDS Start-End: 601-1599
gacatgcttgtgtctttggatgcatgagggggtgtatgtgtgtgtggtgtgatgtttccatgttgtgtgtctttgtgtgggtgatgtgtttctggtgtgtgtctgtggatatgtgatgtgtctttgtgcatggttatttgtgtgatttgtctccacactatggaacttgggatatttgtctttttcagtagatatttatgtgtgcacgtgtgtgaggtttgtctgtttctcctttgtgagtattgggatttgtctctctttgtgtgtgaatcccgtgtgactgtgtgtgatttgtgttgtgtgtctgcatgtgttcaggtagggatacgtcccggtgtgtttttgtttgtttctgtatcgtgtttctactcatgagctgggggcctgtttgagtcccagtttgggggcccctgggccctgtccccttcccccagcctgggtcccggagtgggaggaggggagagcctaggcgaggacttctaccgcgaggccatcgagcactgccgcagttacaacgcgcgcctgtgcgccgagcgcagcctgcgactgcccttcctcgactcgcagaccggcgtggcccagaacaactgctacatctggatggagaagacccaccgcgggccgggtttggccccgggacagatttacacgtaccccgcccgctgttggaggaagaaacggagactcaacatcctggaggaccccagactcaggccctgcgagtacaagatcgactgtgaagcacccctgaagaaggagggtggcctcccggaagggccggtcctcgaggctctactgtgtgcagagacgggggagaagaagattgagctgaaggaggaggagaccattatggactgtcagaaacagcagttgctggagtttccgcatgacctcgaggtggaagacttggaggatgacattcccaggaggaagaacagggccaaaggaaaggcatatggcatcgggggtctccggaaacgccaggacaccgcttccctggaggaccgagacaagccgtatgtctgtgatatctgtgggaaacggtataagaaccggccggggctcagctaccactacacccacacccacctggccgaggaggagggggaggagaacgccgaacgccacgccctgcccttccaccggaaaaacaaccataaacagttttacaaagaattggcctgggtccctgaggcacaaaggaaacacacagccaagaaggcgcccgacggcactgtcatccccaacggctactgtgacttctgcctggggggctccaagaagacggggtgtcccgaggacctcatctcctgtgcggactgtgggcgatcaggacacccctcgtgtttacaattcacggtgaacatgacggcagccgtgcggacctaccgctggcagtgcatcgagtgcaaatcctgcagcctgtgcggaacctccgagaacgacgaccagctgctgttttgtgatgactgcgatcggggttaccacatgtactgcctgagtccccccatggcggagcccccggaagggagctggagctgtcacctctgtctccggcacctgaaggaaaaggcttctgcttacatcaccctcacctaggccggctcggctcgccgcgactctggggtggtgctcgcctacctgcctctccgagctcctcaattctcccccaccctgaacatcccgcagggggagggggagagggggaagccgagagggggctgggccaccccctcccctctgtgcaagtggaatgtctgccctgtgggtgggtgggcccggccagggcctctccctccctccctccctctctgtcccttggcaaatggacaccaggggcttctcccctcaaagccataccccgcctctgggcgggcatggggggtggtgggtgccagccaggggcatggacagagcctttttctaaagaaaaagacaaaaagttaaaaaaaaaaaaaag

SEQ ID NO: 124794 - DNA, 2227 bp, Homo sapiens
  Payload ID: 4505
  Gene Symbol: DPF1
  Gene Name: D4, zinc and double PHD fingers family 1
  Uniprot ID: Q92782
  ENST ID: ENST00000420980
  CDS Start-End: 28-1170
gtgctcccgccccccgggaatgaatggatgggcggcctcagcgcccgcccgaccgctgggaggaccgacccggcggggacctgctgggggcaggacccggggagcaagatggccactgtcatccctggccccctgagcctaggcgaggacttctaccgcgaggccatcgagcactgccgcagttacaacgcgcgcctgtgcgccgagcgcagcctgcgactgcccttcctcgactcgcagaccggcgtggcccagaacaactgctacatctggatggagaagacccaccgcgggccgggtttggccccgggacagatttacacgtaccccgcccgctgttggaggaagaaacggagactcaacatcctggaggaccccagactcaggccctgcgagtacaagatcgactgtgaagcacccctgaagaaggagggtggcctcccggaagggccggtcctcgaggctctactgtgtgcagagacgggggagaagaagattgagctgaaggaggaggagaccattatggactgtcagaaacagcagttgctggagtttccgcatgacctcgaggtggaagacttggaggatgacattcccaggaggaagaacagggccaaaggaaaggcatatggcatcgggggtctccggaaacgccaggacaccgcttccctggaggaccgagacaagccgtatgtctgtgataagttttacaaagaattggcctgggtccctgaggcacaaaggaaacacacagccaagaaggcgcccgacggcactgtcatccccaacggctactgtgacttctgcctggggggctccaagaagacggggtgtcccgaggacctcatctcctgtgcggactgtgggcgatcaggacacccctcgtgtttacaattcacggtgaacatgacggcagccgtgcggacctaccgctggcagtgcatcgagtgcaaatcctgcagcctgtgcggaacctccgagaacgacggtgccagctgggcgggtctcaccccccaggaccagctgctgttttgtgatgactgcgatcggggttaccacatgtactgcctgagtccccccatggcggagcccccggaagggagctggagctgtcacctctgtctccggcacctgaaggaaaaggcttctgcttacatcaccctcacctaggccggctcggctcgccgcgactctggggtggtgctcgcctacctgcctctccgagctcctcaattctcccccaccctgaacatcccgcagggggagggggagagggggaagccgagagggggctgggccaccccctcccctctgtgcaagtggaatgtctgccctgtgggtgggtgggcccggccagggcctctccctccctccctccctctctgtcccttggcaaatggacaccaggggcttctcccctcaaagccataccccgcctctgggcgggcatggggggtggtgggtgccagccaggggcatggacagagcctttttctaaagaaaaagacaaaaagttaaaaaaaaaaaaaagaagaaaagaaaagaagttaatatatacaaagagtcctccaaggcctggctgggtggaggggcgctgctgagagtgtccaccgggcacccgcctctgccggccccccgccgggcgccccaaccccaatttctggagctgcagccgtcccgcgccccacccaaggtgggcgccttcccctcttgtgcccagggcggtgggcgtggtgtccacccgcccctcctggtgcccacggtggatactgcatgatgtgaaccttggttttgaactctgttcctgcccctccccgaccgccccagcctgtgcccgccccgtgcctgccgtggctggtgggtggcggtggtggggccgggtgggcccccgcccagcgcctgctggaatgagaagcacagactccgccacggactccttttctctccctcctcccgccccgccaggcctggcggcccccgcccccctcgctggccattttgggggagtgagggggcgtggttgtttcttgtggttgtgtgtgtttgttgttcgggttttaaaaaagggaaactgagactgcaggtgggggaggtggtgggttttggggggatgtcccctaatccaggagtgccccctcacttgtcaccgagtctcctctattgcctgcctctgctgtgaattaacttgttctgtgtattaaactgggcctgacccctctgcccacga

SEQ ID NO: 124795 - DNA, 523 bp, Homo sapiens
  Payload ID: 4505
  Gene Symbol: DPF1
  Gene Name: D4, zinc and double PHD fingers family 1
  ENST ID: ENST00000438365
  CDS Start-End: 228-523
gtgcatggttatttgtgtgatttgtctccacactatggaacttgggatatttgtctttttcagtagatatttatgtgtgcacgtgtgtgagcctaggcgaggacttctaccgcgaggccatcgagcactgccgcagttacaacgcgcgcctgtgcgccgagcgcagcctgcgactgcccttcctcgactcgcagaccggcgtggcccagaacaactgctacatctggatggagaagacccaccgcgggccgggtttggccccgggacagatttacacgtaccccgcccgctgttggaggaagaaacggagactcaacatcctggaggaccccagactcaggccctgcgagtacaagatcgactgtgaagcacccctgaagaaggagggtggcctcccggaagggccggtcctcgaggctctactgtgtgcagagacgggggagaagaagattgagctgaaggaggaggagaccattatggactgtcagaaacagcagttgctggagtttccgcatgacctcga

SEQ ID NO: 124796 - DNA, 1608 bp, Homo sapiens
  Payload ID: 4505
  Gene Symbol: DPF1
  Gene Name: D4, zinc and double PHD fingers family 1
  ENST ID: ENST00000418517
  CDS Start-End: 84-386
cagagcgggcggcgcaggccgggctgggcccgcgcgcggcggcagcggcgccccgggccggaggcggcccagccgagcgggccatggccaccgccattcagaacccgctcaagtcgcgaggacttctaccgcgaggccatcgagcactgccgcagttacaacgcgcgcctgtgcgccgagcgcagcctgcgactgcccttcctcgactcgcagaccggcgtggcccagaacaactgctacatctggatggagaagacccaccgcgggccgggtttggccccgggacagatttacacgtaccccgcccgctgttggaggaagaaacggagactcaacatcctggaggaccccagactcaggccctgcgagtacaagatcgactgtgaagcacccctgaagaaggagggtggcctcccggaagggccggtcctcgaggctctactgtgtgcagagacgggggagaagaagattgagctgaaggaggaggagaccattatggactgtcagaaacagcagttgctggagtttccgcatgacctcgaggtggaagacttggaggatgacattcccaggaggaagaacagggccaaaggaaaggcatatggcatcgggggtctccggaaacgccaggacaccgcttccctggaggaccgagacaagccgtatgtctgtgatatctgtgggaaacggtataagaaccggccggggctcagctaccactacacccacacccacctggccgaggaggagggggaggagaacgccgaacgccacgccctgcccttccaccggaaaaacaaccataaacagttttacaaagaattggcctgggtccctgaggcacaaaggaaacacacagccaagaaggcgcccgacggcactgtcatccccaacggctactgtgacttctgcctggggggctccaagaagacggggtgtcccgaggacctcatctcctgtgcggactgtgggcgatcaggacacccctcgtgtttacaattcacggtgaacatgacggcagccgtgcggacctaccgctggcagtgcatcgagtgcaaatcctgcagcctgtgcggaacctccgagaacgacgaccagctgctgttttgtgatgactgcgatcggggttaccacatgtactgcctgagtccccccatggcggagcccccggaagggagctggagctgtcacctctgtctccggcacctgaaggaaaaggcttctgcttacatcaccctcacctaggccggctcggctcgccgcgactctggggtggtgctcgcctacctgcctctccgagctcctcaattctcccccaccctgaacatcccgcagggggagggggagagggggaagccgagagggggctgggccaccccctcccctctgtgcaagtggaatgtctgccctgtgggtgggtgggcccggccagggcctctccctccctccctccctctctgtcccttggcaaatggacaccaggggcttctcccctcaaagccataccccgcctctgggcgggcatggggggtggtgggtgccagccaggggcatggacagagcctttttctaaagaaaaagacaaaaagttaaaaaaaaaaaaaagaa

SEQ ID NO: 124797 - DNA, 1562 bp, Homo sapiens
  Payload ID: 4505
  Gene Symbol: DPF1
  Gene Name: D4, zinc and double PHD fingers family 1
  ENST ID: ENST00000456296
  CDS Start-End: 88-1254
gcggcagagcgggcggcgcaggccgggctgggcccgcgcgcggcggcagcggcgccccgggccggaggcggcccagccgagcgggccatggccaccgccattcagaacccgctcaagtccctaggcgaggacttctaccgcgaggccatcgagcactgccgcagttacaacgcgcgcctgtgcgccgagcgcagcctgcgactgcccttcctcgactcgcagaccggcgtggcccagaacaactgctacatctggatggagaagacccaccgcgggccgggtttggccccgggacagatttacacgtaccccgcccgctgttggaggaagaaacggagactcaacatcctggaggaccccagactcaggccctgcgagtacaagatcgactgtgaagcacccctgaagaaggagggtggcctcccggaagggccggtcctcgaggctctactgtgtgcagagacgggggagaagaagattgagctgaaggaggaggagaccattatggactgtcagaaacagcagttgctggagtttccgcatgacctcgaggtggaagacttggaggatgacattcccaggaggaagaacagggccaaaggaaaggcatatggcatcgggggtctccggaaacgccaggacaccgcttccctggaggaccgagacaagccgtatgtctgtgatatctgtgggaaacggtataagaaccggccggggctcagctaccactacacccacacccacctggccgaggaggagggggaggagaacgccgaacgccacgccctgcccttccaccggaaaaacaaccataaacagttttacaaagaattggcctgggtccctgaggcacaaaggaaacacacagccaagaaggcgcccgacggcactgtcatccccaacggctactgtgacttctgcctggggggctccaagaagacggggtgtcccgaggacctcatctcctgtgcggactgtgggcgatcaggacacccctcgtgtttacaattcacggtgaacatgacggcagccgtgcggacctaccgctggcagtgcatcgagtgcaaatcctgcagcctgtgcggaacctccgagaacgacgaccagctgctgttttgtgatgactgcgatcggggttaccacatgtactgcctgagtccccccatggcggagcccccggaagggagctggagctgtcacctctgtctccggcacctgaaggaaaaggcttctgcttacatcaccctcacctaggccggctcggctcgccgcgactctggggtggtgctcgcctacctgcctctccgagctcctcaattctcccccaccctgaacatcccgcagggggagggggagagggggaagccgagagggggctgggccaccccctcccctctgtgcaagtggaatgtctgccctgtgggtgggtgggcccggccagggcctctccctccctccctccctctctgtcccttggcaaatggacaccaggggcttctcccctcaaagccataccccgcctctgggcgggcatggggggtggtgggtgccagccaggggca

SEQ ID NO: 124798 - DNA, 2303 bp, Homo sapiens
  Payload ID: 4505
  Gene Symbol: DPF1
  Gene Name: D4, zinc and double PHD fingers family 1
  Uniprot ID: Q92782
  ENST ID: ENST00000412732
  CDS Start-End: 251-1249
gcggcagagcgggcggcgcaggccgggctgggcccgcgcgcggcggcagcggcgccccgggccggaggcggcccagccgagcgggccatggccaccgccattcagaacccgctcaagtcgcgaggacttctaccgcgaggccatcgagcactgccgcagttacaacgcgcgcctgtgcgccgagcgcagcctgcgactgcccttcctcgactcgcagaccggcgtggcccagaacaactgctacatctggatggagaagacccaccgcgggccgggtttggccccgggacagatttacacgtaccccgcccgctgttggaggaagaaacggagactcaacatcctggaggaccccagactcaggccctgcgagtacaagatcgactgtgaagcacccctgaagaaggagggtggcctcccggaagggccggtcctcgaggctctactgtgtgcagagacgggggagaagaagattgagctgaaggaggaggagaccattatggactgtcagaaacagcagttgctggagtttccgcatgacctcgaggtggaagacttggaggatgacattcccaggaggaagaacagggccaaaggaaaggcatatggcatcgggggtctccggaaacgccaggacaccgcttccctggaggaccgagacaagccgtatgtctgtgatatctgtgggaaacggtataagaaccggccggggctcagctaccactacacccacacccacctggccgaggaggagggggaggagaacgccgaacgccacgccctgcccttccaccggaaaaacaaccataaacagttttacaaagaattggcctgggtccctgaggcacaaaggaaacacacagccaagaaggcgcccgacggcactgtcatccccaacggctactgtgacttctgcctggggggctccaagaagacggggtgtcccgaggacctcatctcctgtgcggactgtgggcgatcaggacacccctcgtgtttacaattcacggtgaacatgacggcagccgtgcggacctaccgctggcagtgcatcgagtgcaaatcctgcagcctgtgcggaacctccgagaacgacgaccagctgctgttttgtgatgactgcgatcggggttaccacatgtactgcctgagtccccccatggcggagcccccggaagggagctggagctgtcacctctgtctccggcacctgaaggaaaaggcttctgcttacatcaccctcacctaggccggctcggctcgccgcgactctggggtggtgctcgcctacctgcctctccgagctcctcaattctcccccaccctgaacatcccgcagggggagggggagagggggaagccgagagggggctgggccaccccctcccctctgtgcaagtggaatgtctgccctgtgggtgggtgggcccggccagggcctctccctccctccctccctctctgtcccttggcaaatggacaccaggggcttctcccctcaaagccataccccgcctctgggcgggcatggggggtggtgggtgccagccaggggcatggacagagcctttttctaaagaaaaagacaaaaagttaaaaaaaaaaaaaagaagaaaagaaaagaagttaatatatacaaagagtcctccaaggcctggctgggtggaggggcgctgctgagagtgtccaccgggcacccgcctctgccggccccccgccgggcgccccaaccccaatttctggagctgcagccgtcccgcgccccacccaaggtgggcgccttcccctcttgtgcccagggcggtgggcgtggtgtccacccgcccctcctggtgcccacggtggatactgcatgatgtgaaccttggttttgaactctgttcctgcccctccccgaccgccccagcctgtgcccgccccgtgcctgccgtggctggtgggtggcggtggtggggccgggtgggcccccgcccagcgcctgctggaatgagaagcacagactccgccacggactccttttctctccctcctcccgccccgccaggcctggcggcccccgcccccctcgctggccattttgggggagtgagggggcgtggttgtttcttgtggttgtgtgtgtttgttgttcgggttttaaaaaagggaaactgagactgcaggtgggggaggtggtgggttttggggggatgtcccctaatccaggagtgccccctcacttgtcaccgagtctcctctattgcctgcctctgctgtgaattaacttgttctgtgtattaaactgggcctgacccctctgccca

SEQ ID NO: 124799 - DNA, 973 bp, Homo sapiens
  Payload ID: 4505
  Gene Symbol: DPF1
  Gene Name: D4, zinc and double PHD fingers family 1
  ENST ID: ENST00000438060
  CDS Start-End: 343-973
gtctctgacaagaatggtgtcggatgcaccgctccctggcggggtggagggcgtggggggcctccagattctttttggggaagggagacatcatcccttccctgcaaccctcgggtctgggagagactgaaatgacccgggggtgcgggggccttggcaactggagtgaagtccacactacctttgtcttgggatgtggagtgtgtcctaggcgaggacttctaccgcgaggccatcgagcactgccgcagttacaacgcgcgcctgtgcgccgagcgcagcctgcgactgcccttcctcgactcgcagaccggcgtggcccagaacaactgctacatctggatggagaagacccaccgcgggccgggtttggccccgggacagatttacacgtaccccgcccgctgttggaggaagaaacggagactcaacatcctggaggaccccagactcaggccctgcgagtacaagatcgactgtgaagcacccctgaagaaggagggtggcctcccggaagggccggtcctcgaggctctactgtgtgcagagacgggggagaagaagattgagctgaaggaggaggagaccattatggactgtcagaaacagcagttgctggagtttccgcatgacctcgaggtggaagacttggaggatgacattcccaggaggaagaacagggccaaaggaaaggcatatggcatcgggggtctccggaaacgccaggacaccgcttccctggaggaccgagacaagccgtatgtctgtgatatctgtgggaaacggtataagaaccggccggggctcagctaccactacacccacacccacctggccgaggaggagggggaggagaacgccgaacgccacgccctgcccttccaccggaaaaacaaccataaacagttttacaaagaattggcctgggtccctgaggcacaaaggaaacacacagccaagaaggcgcccgacg

SEQ ID NO: 124800 - DNA, 428 bp, Homo sapiens
  Payload ID: 4505
  Gene Symbol: DPF1
  Gene Name: D4, zinc and double PHD fingers family 1
  ENST ID: ENST00000586624
  CDS Start-End: 266-428
tcttgcttcctcttcgggatcccggactccacgttggtggatctacaggcgatggggcccctcaccctgaccctggcccagacccctgggaggaggtgtgctacagccgtgagcaggggcccagctacacctaggcgaggacttctaccgcgaggccatcgagcactgccgcagttacaacgcgcgcctgtgcgccgagcgcagcctgcgactgcccttcctcgactcgcagaccggcgtggcccagaacaactgctacatctggatggagaagacccaccgcgggccgggtttggccccgggacagatttacacgtaccccgcccgctgttggaggaagaaacggagactcaacatcctggaggaccccagactcaggccctgcgagtacaagatcgactgtgaagcacccctgaagaaggagggtg

SEQ ID NO: 124801 - DNA, 2356 bp, Homo sapiens
  Payload ID: 4505
  Gene Symbol: DPF1
  Gene Name: D4, zinc and double PHD fingers family 1
  ENST ID: ENST00000614244
  CDS Start-End: 109-1302
gtgctcccgccccccgggaatgaatggatgggcggcctcagcgcccgcccgaccgctgggaggaccgacccggcggggacctgctgggggcaggacccggggagcaagatggccactgtcatccctggccccctgagcctaggcgaggacttctaccgcgaggccatcgagcactgccgcagttacaacgcgcgcctgtgcgccgagcgcagcctgcgactgcccttcctcgactcgcagaccggcgtggcccagaacaactgctacatctggatggagaagacccaccgcgggccgggtttggccccgggacagatttacacgtaccccgcccgctgttggaggaagaaacggagactcaacatcctggaggaccccagactcaggccctgcgagtacaagatcgactgtgaagcacccctgaagaaggagggtggcctcccggaagggccggtcctcgaggctctactgtgtgcagagacgggggagaagaagattgagctgaaggaggaggagaccattatggactgtcagaaacagcagttgctggagtttccgcatgacctcgaggtggaagacttggaggatgacattcccaggaggaagaacagggccaaaggaaaggcatatggcatcgggggtctccggaaacgccaggacaccgcttccctggaggaccgagacaagccgtatgtctgtgatatctgtgggaaacggtataagaaccggccggggctcagctaccactacacccacacccacctggccgaggaggagggggaggagaacgccgaacgccacgccctgcccttccaccggaaaaacaaccataaacagttttacaaagaattggcctgggtccctgaggcacaaaggaaacacacagccaagaaggcgcccgacggcactgtcatccccaacggctactgtgacttctgcctggggggctccaagaagacggggtgtcccgaggacctcatctcctgtgcggactgtgggcgatcaggacacccctcgtgtttacaattcacggtgaacatgacggcagccgtgcggacctaccgctggcagtgcatcgagtgcaaatcctgcagcctgtgcggaacctccgagaacgacggtgccagctgggcgggtctcaccccccaggaccagctgctgttttgtgatgactgcgatcggggttaccacatgtactgcctgagtccccccatggcggagcccccggaagggagctggagctgtcacctctgtctccggcacctgaaggaaaaggcttctgcttacatcaccctcacctaggccggctcggctcgccgcgactctggggtggtgctcgcctacctgcctctccgagctcctcaattctcccccaccctgaacatcccgcagggggagggggagagggggaagccgagagggggctgggccaccccctcccctctgtgcaagtggaatgtctgccctgtgggtgggtgggcccggccagggcctctccctccctccctccctctctgtcccttggcaaatggacaccaggggcttctcccctcaaagccataccccgcctctgggcgggcatggggggtggtgggtgccagccaggggcatggacagagcctttttctaaagaaaaagacaaaaagttaaaaaaaaaaaaaagaagaaaagaaaagaagttaatatatacaaagagtcctccaaggcctggctgggtggaggggcgctgctgagagtgtccaccgggcacccgcctctgccggccccccgccgggcgccccaaccccaatttctggagctgcagccgtcccgcgccccacccaaggtgggcgccttcccctcttgtgcccagggcggtgggcgtggtgtccacccgcccctcctggtgcccacggtggatactgcatgatgtgaaccttggttttgaactctgttcctgcccctccccgaccgccccagcctgtgcccgccccgtgcctgccgtggctggtgggtggcggtggtggggccgggtgggcccccgcccagcgcctgctggaatgagaagcacagactccgccacggactccttttctctccctcctcccgccccgccaggcctggcggcccccgcccccctcgctggccattttgggggagtgagggggcgtggttgtttcttgtggttgtgtgtgtttgttgttcgggttttaaaaaagggaaactgagactgcaggtgggggaggtggtgggttttggggggatgtcccctaatccaggagtgccccctcacttgtcaccgagtctcctctattgcctgcctctgctgtgaattaacttgttctgtgtattaaactgggcctgacccctctgccca

SEQ ID NO: 124802 - DNA, 2462 bp, Homo sapiens
  Payload ID: 4506
  Gene Symbol: DPF2
  Gene Name: D4, zinc and double PHD fingers family 2
  ENST ID: ENST00000252268
  CDS Start-End: 21-1238
gaggcagaggaacagggaagatggcggctgtggtggagaatgtagtgaagctccttggggagcagtactacaaagatgccatggagcagtgccacaattacaatgctcgcctctgtgctgagcgcagcgtgcgcctgcctttcttggactcacagaccggagtagcccagagcaattgttacatctggatggaaaagcgacaccggggtccaggattggcctccggacagctgtactcctaccctgcccggcgctggcggaaaaagcggcgagcccatccccctgaggatccacgactttccttcccatctattaagccagacacagaccagaccctgaagaaggaggggctgatctctcaggatggcagtagtttagaggctctgttgcgcactgaccccctggagaagcgaggtgccccggatccccgagttgatgatgacagcctgggcgagtttcctgtgaccaacagtcgagcgcgaaagcggatcctagaaccagatgacttcctggatgacctcgatgatgaagactatgaagaagatactcccaagcgtcggggaaaggggaaatccaagggtaagggtgtgggcagtgcccgtaagaagctggatgcttccatcctggaggaccgggataagccctatgcctgtgacaatagtttcaaacaaaagcatacctcgaaagcgccccagagagtttgtggaaaacgttacaagaaccgaccaggcctcagttaccactatgcccactcccacttggctgaggaggagggcgaggacaaggaagactctcaaccacccactcctgtttcccagaggtctgaggagcagaaatccaaaaagggtcctgatggattggccttgcccaacaactactgtgacttctgcctgggggactcaaagattaacaagaagacgggacaacccgaggagctggtgtcctgttctgactgtggccgctcagggcatccatcttgcctccaatttacccccgtgatgatggcggcagtgaagacataccgctggcagtgcatcgagtgcaaatgttgcaatatctgcggcacctccgagaatgacgaccagttgctcttctgtgatgactgcgatcgtggctaccacatgtactgtctcaccccgtccatgtctgagccccctgaaggaagttggagctgccacctgtgtctggacctgttgaaagagaaagcttccatctaccagaaccagaactcctcttgatgtggccacccacctgctccccgacatatctaaggctgtttctctcctccacttcatatttcatacccatctttcccttcttcctcctctccttcacaaatccagagaaccttggggtggttgtgccagcctgcctttggcagctgcaagctgaggtggcagctctgaccacctctggccccaggccctcagggagaaaggagcaacacactgcccctaggcgtgcgtgtggcccagtttctctctgctctccattaagtgcattcactctgcttgccttgggcccagcccctggtgatcacagggttcaaacagtgtcctcctagaaagagtgggagagcagctcacttctctgtgttctgcctcccctctggtctccagagttttcctgtcctctagaggcaagccaggccagggagctgggagcgagcaagctgaggccacgtccacaaggagcttttcatgcccctgtgccgcatagcctcacctctttcctccagagtggctctctgcggccctgtgttcctgctacagagtgttcttttctggagtcaggatgttctcggtcaccctcctggttctgccctgtcccattccaccccaccccagggggaacagtagcttcaccttgttattcccattgctctcctggctcactcttacggtcggtctccagtgactgaagcattccccacccttggaatttctcatcttctgcctcccttcctactccttttggttttgtggggagaggggaaggatcagggggccaggccagcagctcgggggccacaaggagatggataatgtgcctgttttttaacacaacaaaaaagcctacctccaaaatcccctttttgttcttcctggacctgggcattcagcctcctgctcttaactgaattgggagcctctgccacctgccccgtgtatcctggctctcagctcatggggaagccacatagacatccctttcttcccttgcacgctcgctagcagctggtaaggtcttcacaccctgattcctcaagttttctgcttagtggcactgacattaagtagtggggggacagtccatgccaggacaccctggagtagccttcccccttggccgtgggcaggccctaactcactgtcgctttggagttgaggtgtcttttttttttctttctttagttcctgtattctaaacattagtaaaaataaatgtttttacacagagcc

SEQ ID NO: 124803 - DNA, 2085 bp, Homo sapiens
  Payload ID: 4506
  Gene Symbol: DPF2
  Gene Name: D4, zinc and double PHD fingers family 2
  Uniprot ID: Q92785
  ENST ID: ENST00000415073
  CDS Start-End: 33-656
gcttctcggcccgaggcagaggaacagggaagatggcggctgtggtggagaatgtagtgaagctccttggggagcagtactacaaagatgccatggagcagtgccacaattacaatgctcgcctctgtgctgagcgcagcgtgcgcctgcctttcttggactcacagaccggagtagcccagagcaattgttacatctggatggaaaagcgacaccggggtccaggattggcctccggacagctgtactcctaccctgcccggcgctggcggaaaaagcggcgagcccatccccctgaggatccacgactttccttcccatctattaagccagacacagaccagaccctgaagaaggaggggctgatctctcaggatggcagtagtttagaggctctgttgcgcactgaccccctggagaagcgaggtgccccggatccccgagttgatgatgacagcctgggcgagtttcctgtgaccaacagtcgagcgcgaaaggaccagttgctcttctgtgatgactgcgatcgtggctaccacatgtactgtctcaccccgtccatgtctgagccccctgaaggaagttggagctgccacctgtgtctggacctgttgaaagagaaagcttccatctaccagaaccagaactcctcttgatgtggccacccacctgctccccgacatatctaaggctgtttctctcctccacttcatatttcatacccatctttcccttcttcctcctctccttcacaaatccagagaaccttggggtggttgtgccagcctgcctttggcagctgcaagctgaggtggcagctctgaccacctctggccccaggccctcagggagaaaggagcaacacactgcccctaggcgtgcgtgtggcccagtttctctctgctctccattaagtgcattcactctgcttgccttgggcccagcccctggtgatcacagggttcaaacagtgtcctcctagaaagagtgggagagcagctcacttctctgtgttctgcctcccctctggtctccagagttttcctgtcctctagaggcaagccaggccagggagctgggagcgagcaagctgaggccacgtccacaaggagcttttcatgcccctgtgccgcatagcctcacctctttcctccagagtggctctctgcggccctgtgttcctgctacagagtgttcttttctggagtcaggatgttctcggtcaccctcctggttctgccctgtcccattccaccccaccccagggggaacagtagcttcaccttgttattcccattgctctcctggctcactcttacggtcggtctccagtgactgaagcattccccacccttggaatttctcatcttctgcctcccttcctactccttttggttttgtggggagaggggaaggatcagggggccaggccagcagctcgggggccacaaggagatggataatgtgcctgttttttaacacaacaaaaaagcctacctccaaaatcccctttttgttcttcctggacctgggcattcagcctcctgctcttaactgaattgggagcctctgccacctgccccgtgtatcctggctctcagctcatggggaagccacatagacatccctttcttcccttgcacgctcgctagcagctggtaaggtcttcacaccctgattcctcaagttttctgcttagtggcactgacattaagtagtggggggacagtccatgccaggacaccctggagtagccttcccccttggccgtgggcaggccctaactcactgtcgctttggagttgaggtgtcttttttttttctttctttagttcctgtattctaaacattagtaaaaataaatgtttttacacagagccctctgctggatggtttatctcctgcctttctccattaagaaggccatttcatcctaagatttccatgatggtggtttttttttttaatgttttgaaatacagcttttttccccccaaattaaaatttttttgtggaaccccaatatgtaaagcgaatataaaattggttattttgttttgttacataaattcaagtttataacaa

SEQ ID NO: 124804 - DNA, 524 bp, Homo sapiens
  Payload ID: 4506
  Gene Symbol: DPF2
  Gene Name: D4, zinc and double PHD fingers family 2
  ENST ID: ENST00000532102
  CDS Start-End: 11-331
aacagggaagatggcggctgtggtggagaatgtagtgaagctccttggggagcagtactacaaagatgccatggagcagtgccacaattacaatgctcgcctctgtgctgagcgcagcgtgcgcctgcctttcttggactcacagaccggagtagcccagagcaattgttacatctggatggaaaagcgacaccggggtccaggattggcctccggacagctgtactcctaccctgcccggcgctggcggaaaaagcggcgagcccatccccctgaggatccacgactttccttcccatctattaagccagcggatcctagaaccagatgacttcctggatgacctcgatgatgaagactatgaagaagatactcccaagcgtcggggaaaggggaaatccaagggtaagggtgtgggcagtgcccgtaagaagctggatgcttccatcctggaggaccgggataagccctatgcctgtgacatttgtggaaaacgttacaagaaccgaccaggcctcagttac

SEQ ID NO: 124805 - DNA, 1573 bp, Homo sapiens
  Payload ID: 4506
  Gene Symbol: DPF2
  Gene Name: D4, zinc and double PHD fingers family 2
  ENST ID: ENST00000531989
  CDS Start-End: 1-351
gcgaggacaaggaagactctcaaccacccactcctgtttcccagaggtctgaggagcagaaatccaaaaagggtcctgatggattggccttgcccaacaactactgtgacttctgcctgggggactcaaagattaacaagaagacgggacaacccgaggagctggtgtcctgttctgactgtggccgctcaggaccagttgctcttctgtgatgactgcgatcgtggctaccacatgtactgtctcaccccgtccatgtctgagccccctgaaggaagttggagctgccacctgtgtctggacctgttgaaagagaaagcttccatctaccagaaccagaactcctcttgatgtggccacccacctgctccccgacatatctaaggctgtttctctcctccacttcatatttcatacccatctttcccttcttcctcctctccttcacaaatccagagaaccttggggtggttgtgccagcctgcctttggcagctgcaagctgaggtggcagctctgaccacctctggccccaggccctcagggagaaaggagcaacacactgcccctaggcgtgcgtgtggcccagtttctctctgctctccattaagtgcattcactctgcttgccttgggcccagcccctggtgatcacagggttcaaacagtgtcctcctagaaagagtgggagagcagctcacttctctgtgttctgcctcccctctggtctccagagttttcctgtcctctagaggcaagccaggccagggagctgggagcgagcaagctgaggccacgtccacaaggagcttttcatgcccctgtgccgcatagcctcacctctttcctccagagtggctctctgcggccctgtgttcctgctacagagtgttcttttctggagtcaggatgttctcggtcaccctcctggttctgccctgtcccattccaccccaccccagggggaacagtagcttcaccttgttattcccattgctctcctggctcactcttacggtcggtctccagtgactgaagcattccccacccttggaatttctcatcttctgcctcccttcctactccttttggttttgtggggagaggggaaggatcagggggccaggccagcagctcgggggccacaaggagatggataatgtgcctgttttttaacacaacaaaaaagcctacctccaaaatcccctttttgttcttcctggacctgggcattcagcctcctgctcttaactgaattgggagcctctgccacctgccccgtgtatcctggctctcagctcatggggaagccacatagacatccctttcttcccttgcacgctcgctagcagctggtaaggtcttcacaccctgattcctcaagttttctgcttagtggcactgacattaagtagtggggggacagtccatgccaggacaccctggagtagccttcccccttggccgtgggcaggccctaactcactgtcgctttggagttgaggtgtcttttttttttctttctttagttcctgtattctaaacattagtaaaaataaatgtttttacacagag

SEQ ID NO: 124806 - DNA, 2799 bp, Homo sapiens
  Payload ID: 4506
  Gene Symbol: DPF2
  Gene Name: D4, zinc and double PHD fingers family 2
  Uniprot ID: Q92785
  ENST ID: ENST00000528416
  CDS Start-End: 134-1309
agtgctcgctctagtgcgcgcgcccggacggcgcctgcgcagagggcaaggaacctggtaccccggtgcggtcccggcgcctgcgcgctgcggactgtggggcttctcggcccgaggcagaggaacagggaagatggcggctgtggtggagaatgtagtgaagctccttggggagcagtactacaaagatgccatggagcagtgccacaattacaatgctcgcctctgtgctgagcgcagcgtgcgcctgcctttcttggactcacagaccggagtagcccagagcaattgttacatctggatggaaaagcgacaccggggtccaggattggcctccggacagctgtactcctaccctgcccggcgctggcggaaaaagcggcgagcccatccccctgaggatccacgactttccttcccatctattaagccagacacagaccagaccctgaagaaggaggggctgatctctcaggatggcagtagtttagaggctctgttgcgcactgaccccctggagaagcgaggtgccccggatccccgagttgatgatgacagcctgggcgagtttcctgtgaccaacagtcgagcgcgaaagcggatcctagaaccagatgacttcctggatgacctcgatgatgaagactatgaagaagatactcccaagcgtcggggaaaggggaaatccaagggtaagggtgtgggcagtgcccgtaagaagctggatgcttccatcctggaggaccgggataagccctatgcctgtgacatttgtggaaaacgttacaagaaccgaccaggcctcagttaccactatgcccactcccacttggctgaggaggagggcgaggacaaggaagactctcaaccacccactcctgtttcccagaggtctgaggagcagaaatccaaaaagggtcctgatggattggccttgcccaacaactactgtgacttctgcctgggggactcaaagattaacaagaagacgggacaacccgaggagctggtgtcctgttctgactgtggccgctcagggcatccatcttgcctccaatttacccccgtgatgatggcggcagtgaagacataccgctggcagtgcatcgagtgcaaatgttgcaatatctgcggcacctccgagaatgacgaccagttgctcttctgtgatgactgcgatcgtggctaccacatgtactgtctcaccccgtccatgtctgagccccctgaaggaagttggagctgccacctgtgtctggacctgttgaaagagaaagcttccatctaccagaaccagaactcctcttgatgtggccacccacctgctccccgacatatctaaggctgtttctctcctccacttcatatttcatacccatctttcccttcttcctcctctccttcacaaatccagagaaccttggggtggttgtgccagcctgcctttggcagctgcaagctgaggtggcagctctgaccacctctggccccaggccctcagggagaaaggagcaacacactgcccctaggcgtgcgtgtggcccagtttctctctgctctccattaagtgcattcactctgcttgccttgggcccagcccctggtgatcacagggttcaaacagtgtcctcctagaaagagtgggagagcagctcacttctctgtgttctgcctcccctctggtctccagagttttcctgtcctctagaggcaagccaggccagggagctgggagcgagcaagctgaggccacgtccacaaggagcttttcatgcccctgtgccgcatagcctcacctctttcctccagagtggctctctgcggccctgtgttcctgctacagagtgttcttttctggagtcaggatgttctcggtcaccctcctggttctgccctgtcccattccaccccaccccagggggaacagtagcttcaccttgttattcccattgctctcctggctcactcttacggtcggtctccagtgactgaagcattccccacccttggaatttctcatcttctgcctcccttcctactccttttggttttgtggggagaggggaaggatcagggggccaggccagcagctcgggggccacaaggagatggataatgtgcctgttttttaacacaacaaaaaagcctacctccaaaatcccctttttgttcttcctggacctgggcattcagcctcctgctcttaactgaattgggagcctctgccacctgccccgtgtatcctggctctcagctcatggggaagccacatagacatccctttcttcccttgcacgctcgctagcagctggtaaggtcttcacaccctgattcctcaagttttctgcttagtggcactgacattaagtagtggggggacagtccatgccaggacaccctggagtagccttcccccttggccgtgggcaggccctaactcactgtcgctttggagttgaggtgtcttttttttttctttctttagttcctgtattctaaacattagtaaaaataaatgtttttacacagagccctctgctggatggtttatctcctgcctttctccattaagaaggccatttcatcctaagatttccatgatggtggtttttttttttaatgttttgaaatacagcttttttccccccaaattaaaatttttttgtggaaccccaatatgtaaagcgaatataaaattggttattttgttttgttacataaattcaagtttataacaattctttgttataaagaacaatgaagctgttttgatcaatacaaaatttgggttaaaatcaa

SEQ ID NO: 124807 - DNA, 3229 bp, Homo sapiens
  Payload ID: 4507
  Gene Symbol: DPF3
  Gene Name: D4, zinc and double PHD fingers, family 3
  Uniprot ID: Q92784
  ENST ID: ENST00000381216
  CDS Start-End: 14-1087
acattgtagcaaaatggcgactgtcattcacaaccccctgaaagcgctcggggaccagttctacaaggaagccattgagcactgccggagttacaactcacggctgtgtgcagagcgcagcgtgcgtcttcccttcctggactcacagactggggtggcccagaacaactgctacatctggatggagaagaggcaccgaggcccaggccttgccccgggccagctgtatacataccctgcccgctgctggcgcaagaagagacgattgcacccacctgaagatccaaaactgcggctgctggagataaaacctgaagtggagcttcccctgaagaaggatgggttcacctcagagagcaccacgctggaagccttgctccgtggcgagggggttgagaagaaggtggatgccagggaggaggaaagcatccaggaaatacagagggttttggaaaatgatgaaaatgtagaagaagggaatgaagaagaggatttggaagaggatattcccaagcgaaagaacaggactagaggacgggctcgcggctctgcagggggcaggaggaggcacgacgccgcctctcaggaagaccacgacaaaccttacgtctgtgacatctgtggcaagcgctacaagaaccgaccggggctcagctaccactatgctcacactcacctggccagcgaggagggggatgaagctcaagaccaggagactcggtccccacccaaccacagaaatgagaaccacaggccccagaaaggaccggatggaacagtcattcccaataactactgtgacttctgcttggggggctccaacatgaacaagaagagtgggcggcctgaagagctggtgtcctgcgcagactgtggacgctctgctcatttgggaggagaaggcaggaaggagaaggaggcagcggccgcagcacgtaccacggaggacttattcggttccacgtcagaaagtgacacgtcaactttccacggctttgatgaggacgatttggaagagcctcgctcctgtcgaggacgccgcagtggccggggttcgcccacagcagataaaaagggcagttgctaaacccacggaacagactctctgggcaattagccatccccctctgactttggtcattgtgctggttctgatatatattttttttaatgaaaggcaactttagattttccctctatccttgctttttttcccttcacctcccacgtgtccctccatccctccccccacccctctgttttgggtatgtacaacagaagcacaaactactgaaacaaaacaaaacagcagaatgagcgttcttccgagagatggcatcgtgatgcgctatttattttccatagaaataggaagttagacggattgtctcttttctgaggggagggggtctttttgacaggagcagagttgatgtcctcaattttcatatttattggcaaaaggaagagaagaggaactttgggttggaaacaaagaaccaataacattaaaacattattatttatatattctagctgttattagaatcagactttttttgcgagagagagagagagagagagagaagggaaatcaaagaaatcgaagcaatatcctgtttagaggcaagccgcccggtggggagaatttcctcaatgggagacggttgcactattctgtgccccacggagtttgcggctccccgcggcagacccctccctcattctcctccctgacctttccatcttcctctctgcttgcgagaaaatgtcagtagttccagagaagtcggggtgcctatgcctggcctccctccacacctgggccctgaccagccgcctcctgggctcctcctcctccgtcagtagagctgctgttttgttattgctggtttttcctcactttcctcctggcaaagaacgacttccaaatgcagggatggaatataagcagaacgtcatgggctcagcagtgactccaccacccgaggccgaggccgtgcttctggaagatagaaggagacatcatcgtgtgtttcccctccccttgcccctgttaagaaacgtatcaatacccattggatgatcaaggctaccgtatttcttctatttttttttatagtgcctgccaggcactttgttttatgtttccaatagcacttcctgaaataaaccaaagcaacactgctcaaggcccctggggcgatggagaaggccacccacctcactgacagtcccaagaatgaccggctgcgaggtcctagtcaaaagtcaacattatgacctggggactccagcatccttcaagcaagccatttccgaagaaggtgaaaagaagccaggatgattggcacctcctcctcctcctcctcttcttcctcttcccttgcccagccccctcctgtgcgtgtgtttcagacaacacaggagccagcacaggagtggaaaatcctgcagcgcaactcagctcagcccacagaagccttgggaatggcctcagtttgtgcaataagaagattttttttttctttttaaatcttcattatattttctttgattgtctgtgagaaagtacccaggtccgcctggaattactctacagtagaaataactgaacacaaacaaactgatggaaaaaaagagttaactattttatttatttcaatatttaaaaggaaaaaagtgctgacatggcacagtatttttgtttaaagtacctcctacttcaaaagttaagcgcaattttgtgaagacatgaaatcataagagtacttaatgtaaaataaaagactgcatattaactctaaagaaaaatgccccacattttaaataagaaaataaagatcaactctgctctctcaggctttttaaaaagccattcatgtatgtgctttaggtatttttatttctgcgagttggatgtggtaagtgaggagtgctcagtttttttttcctccttcaaaagtctattgaaagtgttggtgatgttaaatgattgtgtgttaagatttgactgaaataacttagccacaaatcagcagtttcccccaccctcattgccccctcaccccaggcaagccccttttatctgaatgtcagaagcagcctgcctcctagttatcatgtctgatgaggtctagctcaggaaggaattccatctattgatggaatatatcccctcaagttcaatagattcgaacacagagagctttgtttaaaataatgcagc

SEQ ID NO: 124808 - DNA, 3687 bp, Homo sapiens
  Payload ID: 4507
  Gene Symbol: DPF3
  Gene Name: D4, zinc and double PHD fingers, family 3
  ENST ID: ENST00000366353
  CDS Start-End: 307-1545
attctcgtcttcacccctggccactcctggagttgaaaaccaggttcgctcccggggacggtagggggttcctaacgcaaaggaatgcacagggagaatcggacgtgtttgcgccagctcgtcgcccatcagaaatagggaaaggggtaggaaggccccaggtttcaaatatatttatatgaaagctgccgttaagaggacgttggaagctgaggctgatcagataggagctcctggcttcagttctggctcggaagctcggatacactgcgcttgaacgccacagcgtttcacccaagaaagaaaatgttttatggcagaataaatgggcgtaacttcgccgcatcctcgctgccggttgctttcgctgcaacaccgctgatgctgtttctaccgaacccacaactgattttcagtttccccatttccagccgaaatcacataaccgggctgatgccacctggtaaactcaagttagagaacctatttcacatgtgcaccaggctcggggaccagttctacaaggaagccattgagcactgccggagttacaactcacggctgtgtgcagagcgcagcgtgcgtcttcccttcctggactcacagactggggtggcccagaacaactgctacatctggatggagaagaggcaccgaggcccaggccttgccccgggccagctgtatacataccctgcccgctgctggcgcaagaagagacgattgcacccacctgaagatccaaaactgcggctgctggagataaaacctgaagtggagcttcccctgaagaaggatgggttcacctcagagagcaccacgctggaagccttgctccgtggcgagggggttgagaagaaggtggatgccagggaggaggaaagcatccaggaaatacagagggttttggaaaatgatgaaaatgtagaagaagggaatgaagaagaggatttggaagaggatattcccaagcgaaagaacaggactagaggacgggctcgcggctctgcagggggcaggaggaggcacgacgccgcctctcaggaagaccacgacaaaccttacgtctgtgacatctgtggcaagcgctacaagaaccgaccggggctcagctaccactatgctcacactcacctggccagcgaggagggggatgaagctcaagaccaggagactcggtccccacccaaccacagaaatgagaaccacaggccccagaaaggaccggatggaacagtcattcccaataactactgtgacttctgcttggggggctccaacatgaacaagaagagtgggcggcctgaagagctggtgtcctgcgcagactgtggacgctctgctcatttgggaggagaaggcaggaaggagaaggaggcagcggccgcagcacgtaccacggaggacttattcggttccacgtcagaaagtgacacgtcaactttccacggctttgatgaggacgatttggaagagcctcgctcctgtcgaggacgccgcagtggccggggttcgcccacagcagataaaaagggcagttgctaaacccacggaacagactctctgggcaattagccatccccctctgactttggtcattgtgctggttctgatatatattttttttaatgaaaggcaactttagattttccctctatccttgctttttttcccttcacctcccacgtgtccctccatccctccccccacccctctgttttgggtatgtacaacagaagcacaaactactgaaacaaaacaaaacagcagaatgagcgttcttccgagagatggcatcgtgatgcgctatttattttccatagaaataggaagttagacggattgtctcttttctgaggggagggggtctttttgacaggagcagagttgatgtcctcaattttcatatttattggcaaaaggaagagaagaggaactttgggttggaaacaaagaaccaataacattaaaacattattatttatatattctagctgttattagaatcagactttttttgcgagagagagagagagagagagagaagggaaatcaaagaaatcgaagcaatatcctgtttagaggcaagccgcccggtggggagaatttcctcaatgggagacggttgcactattctgtgccccacggagtttgcggctccccgcggcagacccctccctcattctcctccctgacctttccatcttcctctctgcttgcgagaaaatgtcagtagttccagagaagtcggggtgcctatgcctggcctccctccacacctgggccctgaccagccgcctcctgggctcctcctcctccgtcagtagagctgctgttttgttattgctggtttttcctcactttcctcctggcaaagaacgacttccaaatgcagggatggaatataagcagaacgtcatgggctcagcagtgactccaccacccgaggccgaggccgtgcttctggaagatagaaggagacatcatcgtgtgtttcccctccccttgcccctgttaagaaacgtatcaatacccattggatgatcaaggctaccgtatttcttctatttttttttatagtgcctgccaggcactttgttttatgtttccaatagcacttcctgaaataaaccaaagcaacactgctcaaggcccctggggcgatggagaaggccacccacctcactgacagtcccaagaatgaccggctgcgaggtcctagtcaaaagtcaacattatgacctggggactccagcatccttcaagcaagccatttccgaagaaggtgaaaagaagccaggatgattggcacctcctcctcctcctcctcttcttcctcttcccttgcccagccccctcctgtgcgtgtgtttcagacaacacaggagccagcacaggagtggaaaatcctgcagcgcaactcagctcagcccacagaagccttgggaatggcctcagtttgtgcaataagaagattttttttttctttttaaatcttcattatattttctttgattgtctgtgagaaagtacccaggtccgcctggaattactctacagtagaaataactgaacacaaacaaactgatggaaaaaaagagttaactattttatttatttcaatatttaaaaggaaaaaagtgctgacatggcacagtatttttgtttaaagtacctcctacttcaaaagttaagcgcaattttgtgaagacatgaaatcataagagtacttaatgtaaaataaaagactgcatattaactctaaagaaaaatgccccacattttaaataagaaaataaagatcaactctgctctctcaggctttttaaaaagccattcatgtatgtgctttaggtatttttatttctgcgagttggatgtggtaagtgaggagtgctcagtttttttttcctccttcaaaagtctattgaaagtgttggtgatgttaaatgattgtgtgttaagatttgactgaaataacttagccacaaatcagcagtttcccccaccctcattgccccctcaccccaggcaagccccttttatctgaatgtcagaagcagcctgcctcctagttatcatgtctgatgaggtctagctcaggaaggaattccatctattgatggaatatatcccctcaagttcaatagattcgaacacagagagctttgtttaaaataatgcagc

SEQ ID NO: 124809 - DNA, 4077 bp, Homo sapiens
  Payload ID: 4507
  Gene Symbol: DPF3
  Gene Name: D4, zinc and double PHD fingers, family 3
  Uniprot ID: Q92784
  ENST ID: ENST00000541685
  CDS Start-End: 29-1102
agacaatattctgttacattgtagcaaaatggcgactgtcattcacaaccccctgaaagcgctcggggaccagttctacaaggaagccattgagcactgccggagttacaactcacggctgtgtgcagagcgcagcgtgcgtcttcccttcctggactcacagactggggtggcccagaacaactgctacatctggatggagaagaggcaccgaggcccaggccttgccccgggccagctgtatacataccctgcccgctgctggcgcaagaagagacgattgcacccacctgaagatccaaaactgcggctgctggagataaaacctgaagtggagcttcccctgaagaaggatgggttcacctcagagagcaccacgctggaagccttgctccgtggcgagggggttgagaagaaggtggatgccagggaggaggaaagcatccaggaaatacagagggttttggaaaatgatgaaaatgtagaagaagggaatgaagaagaggatttggaagaggatattcccaagcgaaagaacaggactagaggacgggctcgcggctctgcagggggcaggaggaggcacgacgccgcctctcaggaagaccacgacaaaccttacgtctgtgacatctgtggcaagcgctacaagaaccgaccggggctcagctaccactatgctcacactcacctggccagcgaggagggggatgaagctcaagaccaggagactcggtccccacccaaccacagaaatgagaaccacaggccccagaaaggaccggatggaacagtcattcccaataactactgtgacttctgcttggggggctccaacatgaacaagaagagtgggcggcctgaagagctggtgtcctgcgcagactgtggacgctctgctcatttgggaggagaaggcaggaaggagaaggaggcagcggccgcagcacgtaccacggaggacttattcggttccacgtcagaaagtgacacgtcaactttccacggctttgatgaggacgatttggaagagcctcgctcctgtcgaggacgccgcagtggccggggttcgcccacagcagataaaaagggcagttgctaaacccacggaacagactctctgggcaattagccatccccctctgactttggtcattgtgctggttctgatatatattttttttaatgaaaggcaactttagattttccctctatccttgctttttttcccttcacctcccacgtgtccctccatccctccccccacccctctgttttgggtatgtacaacagaagcacaaactactgaaacaaaacaaaacagcagaatgagcgttcttccgagagatggcatcgtgatgcgctatttattttccatagaaataggaagttagacggattgtctcttttctgaggggagggggtctttttgacaggagcagagttgatgtcctcaattttcatatttattggcaaaaggaagagaagaggaactttgggttggaaacaaagaaccaataacattaaaacattattatttatatattctagctgttattagaatcagactttttttgcgagagagagagagagagagagagaagggaaatcaaagaaatcgaagcaatatcctgtttagaggcaagccgcccggtggggagaatttcctcaatgggagacggttgcactattctgtgccccacggagtttgcggctccccgcggcagacccctccctcattctcctccctgacctttccatcttcctctctgcttgcgagaaaatgtcagtagttccagagaagtcggggtgcctatgcctggcctccctccacacctgggccctgaccagccgcctcctgggctcctcctcctccgtcagtagagctgctgttttgttattgctggtttttcctcactttcctcctggcaaagaacgacttccaaatgcagggatggaatataagcagaacgtcatgggctcagcagtgactccaccacccgaggccgaggccgtgcttctggaagatagaaggagacatcatcgtgtgtttcccctccccttgcccctgttaagaaacgtatcaatacccattggatgatcaaggctaccgtatttcttctatttttttttatagtgcctgccaggcactttgttttatgtttccaatagcacttcctgaaataaaccaaagcaacactgctcaaggcccctggggcgatggagaaggccacccacctcactgacagtcccaagaatgaccggctgcgaggtcctagtcaaaagtcaacattatgacctggggactccagcatccttcaagcaagccatttccgaagaaggtgaaaagaagccaggatgattggcacctcctcctcctcctcctcttcttcctcttcccttgcccagccccctcctgtgcgtgtgtttcagacaacacaggagccagcacaggagtggaaaatcctgcagcgcaactcagctcagcccacagaagccttgggaatggcctcagtttgtgcaataagaagattttttttttctttttaaatcttcattatattttctttgattgtctgtgagaaagtacccaggtccgcctggaattactctacagtagaaataactgaacacaaacaaactgatggaaaaaaagagttaactattttatttatttcaatatttaaaaggaaaaaagtgctgacatggcacagtatttttgtttaaagtacctcctacttcaaaagttaagcgcaattttgtgaagacatgaaatcataagagtacttaatgtaaaataaaagactgcatattaactctaaagaaaaatgccccacattttaaataagaaaataaagatcaactctgctctctcaggctttttaaaaagccattcatgtatgtgctttaggtatttttatttctgcgagttggatgtggtaagtgaggagtgctcagtttttttttcctccttcaaaagtctattgaaagtgttggtgatgttaaatgattgtgtgttaagatttgactgaaataacttagccacaaatcagcagtttcccccaccctcattgccccctcaccccaggcaagccccttttatctgaatgtcagaagcagcctgcctcctagttatcatgtctgatgaggtctagctcaggaaggaattccatctattgatggaatatatcccctcaagttcaatagattcgaacacagagagctttgtttaaaataatgcagcaaaaaaaaaaaaaaaaaaaaagcaaaaataaaagcatcagctgaggtgatattagttcagtcacctaacaactcctagaagagatgaggaaagggaaccttctgctgagctggcttctggggcctgagcttccagagctgtccccaagggctaggaaggccgacctgaaggatgagaacctcaaattcagttgctggtgggagccaaggaagacggcgggtgttctaacatggccctttctggctgagctggcggaagtgggcgttttggccgatgggatgtatctcggcgctgtgtctgtggcccagcaaaggtgcagggctgactggctgagccactgggttctacccgcaggctccccactgcactgggctttcacacagccatgctcttgggtttccctcccttgtaagcagagtcataataacacacgaatagtctaaggctgggtattctggtcagcagaggtccttgagtcacagtgttactgaaatggttctgagcctgagaatctctttggcctctgaaagggcagggcaggtgggcaccgacttcctgccagtcctttcaggtttcctgttcaaagccagtcctgttggtggaggggatcaccgagagtgtctgtatcattttgtagcccttttctctgacgttttctggtagaaaatgtcccttgtcaaaatgctaataattatcataataatctgctttccaaccaactcccacaagtgacaacctgtgtagaactgtgataaaggtttgcataatgtagggtttgtaccaagtgtgtgtaagtttctgttaaataaaaagtctgtttccaatgctcctat

SEQ ID NO: 124810 - DNA, 1514 bp, Homo sapiens
  Payload ID: 4507
  Gene Symbol: DPF3
  Gene Name: D4, zinc and double PHD fingers, family 3
  Uniprot ID: Q92784
  ENST ID: ENST00000546183
  CDS Start-End: 128-1231
acattgtagcaaaatggcgactgtcattcacaaccccctgaaagcgccctttcaagaatcctatgaaagttgtggatcatctccccggaaaacacgcatatagatgtgaacatctgcctatggttttatggggttcacagacctggaagagcccatctctggatgccctggaggcccatgggctctagggctcggggaccagttctacaaggaagccattgagcactgccggagttacaactcacggctgtgtgcagagcgcagcgtgcgtcttcccttcctggactcacagactggggtggcccagaacaactgctacatctggatggagaagaggcaccgaggcccaggccttgccccgggccagctgtatacataccctgcccgctgctggcgcaagaagagacgattgcacccacctgaagatccaaaactgcggctgctggagataaaacctgaagtggagcttcccctgaagaaggatgggttcacctcagagagcaccacgctggaagccttgctccgtggcgagggggttgagaagaaggtggatgccagggaggaggaaagcatccaggaaatacagagggttttggaaaatgatgaaaatgtagaagaagggaatgaagaagaggatttggaagaggatattcccaagcgaaagaacaggactagaggacgggctcgcggctctgcagggggcaggaggaggcacgacgccgcctctcaggaagaccacgacaaaccttacgtctgtgacatctgtggcaagcgctacaagaaccgaccggggctcagctaccactatgctcacactcacctggccagcgaggagggggatgaagctcaagaccaggagactcggtccccacccaaccacagaaatgagaaccacaggccccagaaaggaccggatggaacagtcattcccaataactactgtgacttctgcttggggggctccaacatgaacaagaagagtgggcggcctgaagagctggtgtcctgcgcagactgtggacgctctgctcatttgggaggagaaggcaggaaggagaaggaggcagcggccgcagcacgtaccacggaggacttattcggttccacgtcagaaagtgacacgtcaactttccacggctttgatgaggacgatttggaagagcctcgctcctgtcgaggacgccgcagtggccggggttcgcccacagcagataaaaagggcagttgctaaacccacggaacagactctctgggcaattagccatccccctctgactttggtcattgtgctggttctgatatatattttttttaatgaaaggcaactttagattttccctctatccttgctttttttcccttcacctcccacgtgtccctccatccctccccccacccctctgttttgggtatgtacaacagaagcacaaactactgaaacaaaacaaaacagcagaatgagcgttcttccgagagatggcatcgtgatgcgctatttattttccatagaaata

SEQ ID NO: 124811 - DNA, 1138 bp, Homo sapiens
  Payload ID: 4507
  Gene Symbol: DPF3
  Gene Name: D4, zinc and double PHD fingers, family 3
  Uniprot ID: Q92784
  ENST ID: ENST00000556509
  CDS Start-End: 1-1137
atggcgactgtcattcacaaccccctgaaagcgctcggggaccagttctacaaggaagccattgagcactgccggagttacaactcacggctgtgtgcagagcgcagcgtgcgtcttcccttcctggactcacagactggggtggcccagaacaactgctacatctggatggagaagaggcaccgaggcccaggccttgccccgggccagctgtatacataccctgcccgctgctggcgcaagaagagacgattgcacccacctgaagatccaaaactgcggctgctggagataaaacctgaagtggagcttcccctgaagaaggatgggttcacctcagagagcaccacgctggaagccttgctccgtggcgagggggttgagaagaaggtggatgccagggaggaggaaagcatccaggaaatacagagggttttggaaaatgatgaaaatgtagaagaagggaatgaagaagaggatttggaagaggatattcccaagcgaaagaacaggactagaggacgggctcgcggctctgcagggggcaggaggaggcacgacgccgcctctcaggaagaccacgacaaaccttacgtctgtgacatctgtggcaagcgctacaagaaccgaccggggctcagctaccactatgctcacactcacctggccagcgaggagggggatgaagctcaagaccaggagactcggtccccacccaaccacagaaatgagaaccacaggccccagaaaggaccggatggaacagtcattcccaataactactgtgacttctgcttggggggctccaacatgaacaagaagagtgggcggcctgaagagctggtgtcctgcgcagactgtggacgctctggtcacccaacctgcctgcagtttaccctgaacatgaccgaggctgtcaagacctacaagtggcagtgcatagagtgcaaatcctgtatcctctgtgggacctcagagaatgatgaccagctactcttctgcgatgactgtgaccgaggctatcacatgtactgtttaaatcccccggtggctgagcccccagaaggaagctggagctgccacttatgctgggaactgctcaaagagaaagcctcagcctttggctgccaggcctagg

SEQ ID NO: 124812 - DNA, 4520 bp, Homo sapiens
  Payload ID: 4507
  Gene Symbol: DPF3
  Gene Name: D4, zinc and double PHD fingers, family 3
  ENST ID: ENST00000610283
  CDS Start-End: 307-1545
attctcgtcttcacccctggccactcctggagttgaaaaccaggttcgctcccggggacggtagggggttcctaacgcaaaggaatgcacagggagaatcggacgtgtttgcgccagctcgtcgcccatcagaaatagggaaaggggtaggaaggccccaggtttcaaatatatttatatgaaagctgccgttaagaggacgttggaagctgaggctgatcagataggagctcctggcttcagttctggctcggaagctcggatacactgcgcttgaacgccacagcgtttcacccaagaaagaaaatgttttatggcagaataaatgggcgtaacttcgccgcatcctcgctgccggttgctttcgctgcaacaccgctgatgctgtttctaccgaacccacaactgattttcagtttccccatttccagccgaaatcacataaccgggctgatgccacctggtaaactcaagttagagaacctatttcacatgtgcaccaggctcggggaccagttctacaaggaagccattgagcactgccggagttacaactcacggctgtgtgcagagcgcagcgtgcgtcttcccttcctggactcacagactggggtggcccagaacaactgctacatctggatggagaagaggcaccgaggcccaggccttgccccgggccagctgtatacataccctgcccgctgctggcgcaagaagagacgattgcacccacctgaagatccaaaactgcggctgctggagataaaacctgaagtggagcttcccctgaagaaggatgggttcacctcagagagcaccacgctggaagccttgctccgtggcgagggggttgagaagaaggtggatgccagggaggaggaaagcatccaggaaatacagagggttttggaaaatgatgaaaatgtagaagaagggaatgaagaagaggatttggaagaggatattcccaagcgaaagaacaggactagaggacgggctcgcggctctgcagggggcaggaggaggcacgacgccgcctctcaggaagaccacgacaaaccttacgtctgtgacatctgtggcaagcgctacaagaaccgaccggggctcagctaccactatgctcacactcacctggccagcgaggagggggatgaagctcaagaccaggagactcggtccccacccaaccacagaaatgagaaccacaggccccagaaaggaccggatggaacagtcattcccaataactactgtgacttctgcttggggggctccaacatgaacaagaagagtgggcggcctgaagagctggtgtcctgcgcagactgtggacgctctgctcatttgggaggagaaggcaggaaggagaaggaggcagcggccgcagcacgtaccacggaggacttattcggttccacgtcagaaagtgacacgtcaactttccacggctttgatgaggacgatttggaagagcctcgctcctgtcgaggacgccgcagtggccggggttcgcccacagcagataaaaagggcagttgctaaacccacggaacagactctctgggcaattagccatccccctctgactttggtcattgtgctggttctgatatatattttttttaatgaaaggcaactttagattttccctctatccttgctttttttcccttcacctcccacgtgtccctccatccctccccccacccctctgttttgggtatgtacaacagaagcacaaactactgaaacaaaacaaaacagcagaatgagcgttcttccgagagatggcatcgtgatgcgctatttattttccatagaaataggaagttagacggattgtctcttttctgaggggagggggtctttttgacaggagcagagttgatgtcctcaattttcatatttattggcaaaaggaagagaagaggaactttgggttggaaacaaagaaccaataacattaaaacattattatttatatattctagctgttattagaatcagactttttttgcgagagagagagagagagagagagaagggaaatcaaagaaatcgaagcaatatcctgtttagaggcaagccgcccggtggggagaatttcctcaatgggagacggttgcactattctgtgccccacggagtttgcggctccccgcggcagacccctccctcattctcctccctgacctttccatcttcctctctgcttgcgagaaaatgtcagtagttccagagaagtcggggtgcctatgcctggcctccctccacacctgggccctgaccagccgcctcctgggctcctcctcctccgtcagtagagctgctgttttgttattgctggtttttcctcactttcctcctggcaaagaacgacttccaaatgcagggatggaatataagcagaacgtcatgggctcagcagtgactccaccacccgaggccgaggccgtgcttctggaagatagaaggagacatcatcgtgtgtttcccctccccttgcccctgttaagaaacgtatcaatacccattggatgatcaaggctaccgtatttcttctatttttttttatagtgcctgccaggcactttgttttatgtttccaatagcacttcctgaaataaaccaaagcaacactgctcaaggcccctggggcgatggagaaggccacccacctcactgacagtcccaagaatgaccggctgcgaggtcctagtcaaaagtcaacattatgacctggggactccagcatccttcaagcaagccatttccgaagaaggtgaaaagaagccaggatgattggcacctcctcctcctcctcctcttcttcctcttcccttgcccagccccctcctgtgcgtgtgtttcagacaacacaggagccagcacaggagtggaaaatcctgcagcgcaactcagctcagcccacagaagccttgggaatggcctcagtttgtgcaataagaagattttttttttctttttaaatcttcattatattttctttgattgtctgtgagaaagtacccaggtccgcctggaattactctacagtagaaataactgaacacaaacaaactgatggaaaaaaagagttaactattttatttatttcaatatttaaaaggaaaaaagtgctgacatggcacagtatttttgtttaaagtacctcctacttcaaaagttaagcgcaattttgtgaagacatgaaatcataagagtacttaatgtaaaataaaagactgcatattaactctaaagaaaaatgccccacattttaaataagaaaataaagatcaactctgctctctcaggctttttaaaaagccattcatgtatgtgctttaggtatttttatttctgcgagttggatgtggtaagtgaggagtgctcagtttttttttcctccttcaaaagtctattgaaagtgttggtgatgttaaatgattgtgtgttaagatttgactgaaataacttagccacaaatcagcagtttcccccaccctcattgccccctcaccccaggcaagccccttttatctgaatgtcagaagcagcctgcctcctagttatcatgtctgatgaggtctagctcaggaaggaattccatctattgatggaatatatcccctcaagttcaatagattcgaacacagagagctttgtttaaaataatgcagcaaaaaaaaaaaaaaaaaaaaagcaaaaataaaagcatcagctgaggtgatattagttcagtcacctaacaactcctagaagagatgaggaaagggaaccttctgctgagctggcttctggggcctgagcttccagagctgtccccaagggctaggaaggccgacctgaaggatgagaacctcaaattcagttgctggtgggagccaaggaagacggcgggtgttctaacatggccctttctggctgagctggcggaagtgggcgttttggccgatgggatgtatctcggcgctgtgtctgtggcccagcaaaggtgcagggctgactggctgagccactgggttctacccgcaggctccccactgcactgggctttcacacagccatgctcttgggtttccctcccttgtaagcagagtcataataacacacgaatagtctaaggctgggtattctggtcagcagaggtccttgagtcacagtgttactgaaatggttctgagcctgagaatctctttggcctctgaaagggcagggcaggtgggcaccgacttcctgccagtcctttcaggtttcctgttcaaagccagtcctgttggtggaggggatcaccgagagtgtctgtatcattttgtagcccttttctctgacgttttctggtagaaaatgtcccttgtcaaaatgctaataattatcataataatctgctttccaaccaactcccacaagtgacaacctgtgtagaactgtgataaaggtttgcataatgtagggtttgtaccaagtgtgtgtaagtttctgttaaataaaaagtctgtttccaatgctcctat

SEQ ID NO: 124813 - DNA, 4221 bp, Homo sapiens
  Payload ID: 4507
  Gene Symbol: DPF3
  Gene Name: D4, zinc and double PHD fingers, family 3
  Uniprot ID: Q92784
  ENST ID: ENST00000614862
  CDS Start-End: 143-1246
agacaatattctgttacattgtagcaaaatggcgactgtcattcacaaccccctgaaagcgccctttcaagaatcctatgaaagttgtggatcatctccccggaaaacacgcatatagatgtgaacatctgcctatggttttatggggttcacagacctggaagagcccatctctggatgccctggaggcccatgggctctagggctcggggaccagttctacaaggaagccattgagcactgccggagttacaactcacggctgtgtgcagagcgcagcgtgcgtcttcccttcctggactcacagactggggtggcccagaacaactgctacatctggatggagaagaggcaccgaggcccaggccttgccccgggccagctgtatacataccctgcccgctgctggcgcaagaagagacgattgcacccacctgaagatccaaaactgcggctgctggagataaaacctgaagtggagcttcccctgaagaaggatgggttcacctcagagagcaccacgctggaagccttgctccgtggcgagggggttgagaagaaggtggatgccagggaggaggaaagcatccaggaaatacagagggttttggaaaatgatgaaaatgtagaagaagggaatgaagaagaggatttggaagaggatattcccaagcgaaagaacaggactagaggacgggctcgcggctctgcagggggcaggaggaggcacgacgccgcctctcaggaagaccacgacaaaccttacgtctgtgacatctgtggcaagcgctacaagaaccgaccggggctcagctaccactatgctcacactcacctggccagcgaggagggggatgaagctcaagaccaggagactcggtccccacccaaccacagaaatgagaaccacaggccccagaaaggaccggatggaacagtcattcccaataactactgtgacttctgcttggggggctccaacatgaacaagaagagtgggcggcctgaagagctggtgtcctgcgcagactgtggacgctctgctcatttgggaggagaaggcaggaaggagaaggaggcagcggccgcagcacgtaccacggaggacttattcggttccacgtcagaaagtgacacgtcaactttccacggctttgatgaggacgatttggaagagcctcgctcctgtcgaggacgccgcagtggccggggttcgcccacagcagataaaaagggcagttgctaaacccacggaacagactctctgggcaattagccatccccctctgactttggtcattgtgctggttctgatatatattttttttaatgaaaggcaactttagattttccctctatccttgctttttttcccttcacctcccacgtgtccctccatccctccccccacccctctgttttgggtatgtacaacagaagcacaaactactgaaacaaaacaaaacagcagaatgagcgttcttccgagagatggcatcgtgatgcgctatttattttccatagaaataggaagttagacggattgtctcttttctgaggggagggggtctttttgacaggagcagagttgatgtcctcaattttcatatttattggcaaaaggaagagaagaggaactttgggttggaaacaaagaaccaataacattaaaacattattatttatatattctagctgttattagaatcagactttttttgcgagagagagagagagagagagagaagggaaatcaaagaaatcgaagcaatatcctgtttagaggcaagccgcccggtggggagaatttcctcaatgggagacggttgcactattctgtgccccacggagtttgcggctccccgcggcagacccctccctcattctcctccctgacctttccatcttcctctctgcttgcgagaaaatgtcagtagttccagagaagtcggggtgcctatgcctggcctccctccacacctgggccctgaccagccgcctcctgggctcctcctcctccgtcagtagagctgctgttttgttattgctggtttttcctcactttcctcctggcaaagaacgacttccaaatgcagggatggaatataagcagaacgtcatgggctcagcagtgactccaccacccgaggccgaggccgtgcttctggaagatagaaggagacatcatcgtgtgtttcccctccccttgcccctgttaagaaacgtatcaatacccattggatgatcaaggctaccgtatttcttctatttttttttatagtgcctgccaggcactttgttttatgtttccaatagcacttcctgaaataaaccaaagcaacactgctcaaggcccctggggcgatggagaaggccacccacctcactgacagtcccaagaatgaccggctgcgaggtcctagtcaaaagtcaacattatgacctggggactccagcatccttcaagcaagccatttccgaagaaggtgaaaagaagccaggatgattggcacctcctcctcctcctcctcttcttcctcttcccttgcccagccccctcctgtgcgtgtgtttcagacaacacaggagccagcacaggagtggaaaatcctgcagcgcaactcagctcagcccacagaagccttgggaatggcctcagtttgtgcaataagaagattttttttttctttttaaatcttcattatattttctttgattgtctgtgagaaagtacccaggtccgcctggaattactctacagtagaaataactgaacacaaacaaactgatggaaaaaaagagttaactattttatttatttcaatatttaaaaggaaaaaagtgctgacatggcacagtatttttgtttaaagtacctcctacttcaaaagttaagcgcaattttgtgaagacatgaaatcataagagtacttaatgtaaaataaaagactgcatattaactctaaagaaaaatgccccacattttaaataagaaaataaagatcaactctgctctctcaggctttttaaaaagccattcatgtatgtgctttaggtatttttatttctgcgagttggatgtggtaagtgaggagtgctcagtttttttttcctccttcaaaagtctattgaaagtgttggtgatgttaaatgattgtgtgttaagatttgactgaaataacttagccacaaatcagcagtttcccccaccctcattgccccctcaccccaggcaagccccttttatctgaatgtcagaagcagcctgcctcctagttatcatgtctgatgaggtctagctcaggaaggaattccatctattgatggaatatatcccctcaagttcaatagattcgaacacagagagctttgtttaaaataatgcagcaaaaaaaaaaaaaaaaaaaaagcaaaaataaaagcatcagctgaggtgatattagttcagtcacctaacaactcctagaagagatgaggaaagggaaccttctgctgagctggcttctggggcctgagcttccagagctgtccccaagggctaggaaggccgacctgaaggatgagaacctcaaattcagttgctggtgggagccaaggaagacggcgggtgttctaacatggccctttctggctgagctggcggaagtgggcgttttggccgatgggatgtatctcggcgctgtgtctgtggcccagcaaaggtgcagggctgactggctgagccactgggttctacccgcaggctccccactgcactgggctttcacacagccatgctcttgggtttccctcccttgtaagcagagtcataataacacacgaatagtctaaggctgggtattctggtcagcagaggtccttgagtcacagtgttactgaaatggttctgagcctgagaatctctttggcctctgaaagggcagggcaggtgggcaccgacttcctgccagtcctttcaggtttcctgttcaaagccagtcctgttggtggaggggatcaccgagagtgtctgtatcattttgtagcccttttctctgacgttttctggtagaaaatgtcccttgtcaaaatgctaataattatcataataatctgctttccaaccaactcccacaagtgacaacctgtgtagaactgtgataaaggtttgcataatgtagggtttgtaccaagtgtgtgtaagtttctgttaaataaaaagtctgtttccaatgctcctat

SEQ ID NO: 124814 - DNA, 4534 bp, Homo sapiens
  Payload ID: 4508
  Gene Symbol: DAB2
  Gene Name: Dab, mitogen-responsive phosphoprotein, homolog 2 (Drosophila)
  Uniprot ID: P98082
  ENST ID: ENST00000320816
  CDS Start-End: 469-2781
atttcccctcccgtcgctgggtccctgcgatcgcccccagctggtggggctcgcggagctcaggggagcggggtcctctgcgccgctgcagcgcgagttaataaacagttaagtttggaagactctgcagacacgttgagggggagttaccaagcccaggcagcaaaaacatcctggcacattcctggggagtcctcagctgccagcatctgattagaaccatatctctcgccgggagtggccgcgcggctccgaagctcccggccggcggctatttaagcgaggcccgccgcatccgctgcgctgtagcctggaggctccgggcgcggggaagtcatgctcgcttcacggaggcaatagctagccggtgtctgtgggaggttatgtttatttgagacttctccatcgggatcgcctggtgtcaccaagtgtccactggtactgaggtttgctgcctgccttcttgccatgtctaacgaagtagaaacaagtgcaaccaatggtcagcccgaccaacaggccgcaccaaaagcaccctcaaagaaggaaaaaaagaaaggccctgaaaagacagatgaatatctcttagcaaggttcaaaggcgatggtgtaaaatataaggccaagctgattggcattgatgatgtgccagatgcaagaggggataaaatgagccaagactctatgatgaaactaaagggaatggcggcagctggtcggtctcagggacaacacaaacaaaggatctgggtcaacatttccctttctgggataaaaataattgatgagaaaactggggtaatagagcatgaacatccagtaaataagatttctttcattgcccgtgatgtgacagacaaccgggcatttggttacgtgtgtggaggagaaggccagcatcagttttttgccataaaaaccgggcaacaggctgaaccattagttgttgatcttaaagacctttttcaagttatctataatgtaaagaaaaaggaagaagaaaagaaaaagatagaggaagccagcaaagcagttgagaatgggagtgaggccctaatgattctagatgaccaaactaacaaactgaaatcgggtgttgaccagatggatttgtttggggacatgtctacacctcctgacctaaatagtccaacagaaagcaaagatatcctgttagtggatctaaactctgaaatcgacaccaatcagaattctttaagagaaaatccattcttaacaaacggcatcacctcctgttctcttcctcgaccaacgcctcaggcatccttcttgcctgaaaatgccttttctgccaatctcaacttctttcccacccctaatcctgatcctttccgtgacgatcctttcacacagccagaccaatcgacaccttcttcgtttgattctctcaaatctccagatcagaagaaagagaattcgagtagctcgtctactccgctgagtaatgggcccctgaatggtgatgttgactactttggtcagcaatttgaccagatctctaaccggactggcaaacaggaagctcaggcaggcccatggcccttttcaagttcgcaaacccagccagcagtgagaactcaaaatggggtatctgaaagagaacagaacggcttctctgtcaaatcctccccgaacccttttgtgggaagccctcccaaaggactgtccatacagaatggcgtaaagcaggacttggaaagctctgtccagtcctcaccacatgactccatagccattatcccacctccacaaagtaccaaaccaggaagaggcagaaggactgctaagtcttcagccaatgacttgcttgcatcagacatctttgctcctcccgtctcagaaccttcaggccaggcgtcacccacaggacaacctacagccctgcagcccaaccctctggatctcttcaaaacaagtgctcctgccccagtggggcccctggtgggtctaggtggtgtaactgtcacactccctcaggcaggaccatggaacacagcatctttggtcttcaatcagtccccttcaatggctccgggagccatgatgggtggtcaaccttcaggttttagtcagcccgtcatttttggtacaagtccagctgtttcaggttggaaccagccttcaccctttgcagcctcaactccccctccagtgcctgttgtctggggcccttctgcatctgtggcacccaatgcttggtcaacaacaagccctttggggaatccttttcagagcaatatttttccagctcctgctgtgtccactcagcccccatccatgcactcctctctcctggtcactcctcctcagccacctcccagagctggccctcccaaggacatctccagtgatgccttcactgccttagacccacttggggataaagagatcaaggatgtgaaagaaatgtttaaggatttccaactgcggcagccacctgctgtgcccgcgcggaagggagagcagacttcttctgggactttgagtgcctttgccagttatttcaacagcaaggttggcattcctcaggagaatgcagaccatgatgactttgatgctaatcaactattgaacaagatcaatgaaccaccaaagccagctcccagacaagtttccctgccagttaccaaatctactgacaatgcatttgagaaccctttctttaaagattcttttggttcatcacaagcctctgtggcttcttctcaacctgtatcttctgagatgtatagggatccatttggaaatccttttgcctaaattctgaacttggtctgcagaccatccagaggaataaaaaggttggccttagtagtcaaaaacaaagctgatagccagacacgttctgatttctgcccttgttccagctttgacgtattatctgttgccttatttctcattgcctcttctacttgtaaaatgcttttcactttctgtctaggttaaagctaaactgaatctatggctttaaataaattaagatcctaaactctctagcttaagtgtaaatgaagtacagtagtttccctactgaaccctgcctcttgtgtccctggaaccttctagaacacctgccttctaccctctggttgggagatgcagccaccacatcccttcatatcatactgttttgaataaattttcaaatccttattgttcagagttgtttgggggttctgtttcagagcataaaacctaaaggttatagtagaacaaggcaccttcttaaaagaaatcttgcttcagaccatcagttacagagaatttctaaagtaaaattgaagcaactacaacttctccttagacactttggaatctaaccacttaaggacctttttaaagagatagcttctcttctttctgaagatcaatttctcccaaggccaagattgtccttttctcccatttcttgctagctattgcaaatgagggaagaacattattcatctctcctccccttttttttctgattcttttttcagtcagttttgctcctgggttcaagtagtattaccaccctttcacaagcaacagactctcacagggcaaaaaaaaaaaaaaatctaatgattcacagacagatctggagcctctcttcattctcagtaattgctagtcccaagaactagaattgcaaatgggcacaacctatatccttcctgtggaagaggaggccactctcttgagctgaagttccagaagagcagttaatgttcaagagaaattgaactcaactcagcaacaaaggactctattttgaagagcaacatatcacaaagctaaatgtgattgtgccaaacacattaggtgcttatttggggtcatgctaggcctttatcaagtaactggaaaacttttcttgcagccacaatctcaatgtcgttagtaggaagataagaggggagaaaaagctgtagaacaaatgtttggggttaccattgaaaatctaatgtctgcaatatttttctcctcacaacttggaaacgttcccagttcattttcagtcctgttgtgagcacagttctgaagggtttattattgtcaaaataagttttgttttgttttgtttatgttgggtttttaatgttgtctcttgacccttaatgctcaggttcttgtgggagttaatcagccacatccaatgttaccttgagggggaagaagagggtgatgctcagaagctaaacaagacaggggccacatgaccctctattgattagccccaagtagaaagtcctgtggttttatgtttaatggtaatagttgatcatatatggcataattttctatcagcttcctactcagtcactataaacacagacttgaaatagtactttaaatgtccaaatacctaaatgtgctaaactggaggtaactatttctaggtagttgaatttttgaaagtcatgatcagccacacaactgttttgtacatacttattttctcatgcacttttctgtatgcaaataaagctataaatttactcatttcaataaactggagtggcagaat

SEQ ID NO: 124815 - DNA, 3690 bp, Homo sapiens
  Payload ID: 4508
  Gene Symbol: DAB2
  Gene Name: Dab, mitogen-responsive phosphoprotein, homolog 2 (Drosophila)
  Uniprot ID: P98082
  ENST ID: ENST00000339788
  CDS Start-End: 279-1937
agtcctcagctgccagcatctgattagaaccatatctctcgccgggagtggccgcgcggctccgaagctcccggccggcggctatttaagcgaggcccgccgcatccgctgcgctgtagcctggaggctccgggcgcggggaagtcatgctcgcttcacggaggcaatagctagccggtgtctgtgggaggttatgtttatttgagacttctccatcgggatcgcctggtgtcaccaagtgtccactggtactgaggtttgctgcctgccttcttgccatgtctaacgaagtagaaacaagtgcaaccaatggtcagcccgaccaacaggccgcaccaaaagcaccctcaaagaaggaaaaaaagaaaggccctgaaaagacagatgaatatctcttagcaaggttcaaaggcgatggtgtaaaatataaggccaagctgattggcattgatgatgtgccagatgcaagaggggataaaatgagccaagactctatgatgaaactaaagggaatggcggcagctggtcggtctcagggacaacacaaacaaaggatctgggtcaacatttccctttctgggataaaaataattgatgagaaaactggggtaatagagcatgaacatccagtaaataagatttctttcattgcccgtgatgtgacagacaaccgggcatttggttacgtgtgtggaggagaaggccagcatcagttttttgccataaaaaccgggcaacaggctgaaccattagttgttgatcttaaagacctttttcaagttatctataatgtaaagaaaaaggaagaagaaaagaaaaagatagaggaagccagcaaagcagttgagaatgggagtgaggccctaatgattctagatgaccaaactaacaaactgaaatcgggtgttgaccagatggatttgtttggggacatgtctacacctcctgacctaaatagtccaacatcttcagccaatgacttgcttgcatcagacatctttgctcctcccgtctcagaaccttcaggccaggcgtcacccacaggacaacctacagccctgcagcccaaccctctggatctcttcaaaacaagtgctcctgccccagtggggcccctggtgggtctaggtggtgtaactgtcacactccctcaggcaggaccatggaacacagcatctttggtcttcaatcagtccccttcaatggctccgggagccatgatgggtggtcaaccttcaggttttagtcagcccgtcatttttggtacaagtccagctgtttcaggttggaaccagccttcaccctttgcagcctcaactccccctccagtgcctgttgtctggggcccttctgcatctgtggcacccaatgcttggtcaacaacaagccctttggggaatccttttcagagcaatatttttccagctcctgctgtgtccactcagcccccatccatgcactcctctctcctggtcactcctcctcagccacctcccagagctggccctcccaaggacatctccagtgatgccttcactgccttagacccacttggggataaagagatcaaggatgtgaaagaaatgtttaaggatttccaactgcggcagccacctgctgtgcccgcgcggaagggagagcagacttcttctgggactttgagtgcctttgccagttatttcaacagcaaggttggcattcctcaggagaatgcagaccatgatgactttgatgctaatcaactattgaacaagatcaatgaaccaccaaagccagctcccagacaagtttccctgccagttaccaaatctactgacaatgcatttgagaaccctttctttaaagattcttttggttcatcacaagcctctgtggcttcttctcaacctgtatcttctgagatgtatagggatccatttggaaatccttttgcctaaattctgaacttggtctgcagaccatccagaggaataaaaaggttggccttagtagtcaaaaacaaagctgatagccagacacgttctgatttctgcccttgttccagctttgacgtattatctgttgccttatttctcattgcctcttctacttgtaaaatgcttttcactttctgtctaggttaaagctaaactgaatctatggctttaaataaattaagatcctaaactctctagcttaagtgtaaatgaagtacagtagtttccctactgaaccctgcctcttgtgtccctggaaccttctagaacacctgccttctaccctctggttgggagatgcagccaccacatcccttcatatcatactgttttgaataaattttcaaatccttattgttcagagttgtttgggggttctgtttcagagcataaaacctaaaggttatagtagaacaaggcaccttcttaaaagaaatcttgcttcagaccatcagttacagagaatttctaaagtaaaattgaagcaactacaacttctccttagacactttggaatctaaccacttaaggacctttttaaagagatagcttctcttctttctgaagatcaatttctcccaaggccaagattgtccttttctcccatttcttgctagctattgcaaatgagggaagaacattattcatctctcctccccttttttttctgattcttttttcagtcagttttgctcctgggttcaagtagtattaccaccctttcacaagcaacagactctcacagggcaaaaaaaaaaaaaaatctaatgattcacagacagatctggagcctctcttcattctcagtaattgctagtcccaagaactagaattgcaaatgggcacaacctatatccttcctgtggaagaggaggccactctcttgagctgaagttccagaagagcagttaatgttcaagagaaattgaactcaactcagcaacaaaggactctattttgaagagcaacatatcacaaagctaaatgtgattgtgccaaacacattaggtgcttatttggggtcatgctaggcctttatcaagtaactggaaaacttttcttgcagccacaatctcaatgtcgttagtaggaagataagaggggagaaaaagctgtagaacaaatgtttggggttaccattgaaaatctaatgtctgcaatatttttctcctcacaacttggaaacgttcccagttcattttcagtcctgttgtgagcacagttctgaagggtttattattgtcaaaataagttttgttttgttttgtttatgttgggtttttaatgttgtctcttgacccttaatgctcaggttcttgtgggagttaatcagccacatccaatgttaccttgagggggaagaagagggtgatgctcagaagctaaacaagacaggggccacatgaccctctattgattagccccaagtagaaagtcctgtggttttatgtttaatggtaatagttgatcatatatggcataattttctatcagcttcctactcagtcactataaacacagacttgaaatagtactttaaatgtccaaatacctaaatgtgctaaactggaggtaactatttctaggtagttgaatttttgaaagtcatgatcagccacacaactgttttgtacatacttattttctcatgcacttttctgtatgcaaataaagctataaatttactcatttcaataaactggagtggcagaat

SEQ ID NO: 124816 - DNA, 651 bp, Homo sapiens
  Payload ID: 4508
  Gene Symbol: DAB2
  Gene Name: Dab, mitogen-responsive phosphoprotein, homolog 2 (Drosophila)
  ENST ID: ENST00000515700
  CDS Start-End: 536-651
ctcagctgccagcatctgattagaaccatatctctcgccgggagtggccgcgcggctccgaagctcccggccggcggctatttaagcgaggcccgccgcatccgctgcgctgtagcctggaggctccgggcgcggggaagtcatgctcgcttcacggaggcaatagctagccgtgcaacagaaataaaccaaatgtgtttgaacatatgtcagagggctgacataatcatatgaagaatgctataccagtttggctttgggacgaaatgtgaatctactagggcaacatacaactgccctctgagtcagaagatcagaagttgctgtggctacacataattctggggtacatgtggagaacatgcagttttgttacataggtatacatgtgccatggtggtttgctgcatccatcaacccatcacctacattaggtgtctgtgggaggttatgtttatttgagacttctccatcgggatcgcctggtgtcaccaagtgtccactggtactgaggtttgctgcctgccttcttgccatgtctaacgaagtagaaacaagtgcaaccaatggtcagcccgaccaacaggccgcaccaaaagcaccctcaaagaaggaaaaaaagaaaggccctgaaaagacagatgaatatct

SEQ ID NO: 124817 - DNA, 931 bp, Homo sapiens
  Payload ID: 4508
  Gene Symbol: DAB2
  Gene Name: Dab, mitogen-responsive phosphoprotein, homolog 2 (Drosophila)
  ENST ID: ENST00000507539
  CDS Start-End: 212-562
ctcccggccggcggctatttaagcgaggcccgccgcatccgctgcgctgtagcctggaggctccgggcgcggggaagtcatgctcgcttcacggaggcaatagctagccggtgtctgtgggaggttatgtttatttgagacttctccatcgggatcgcctggtgtcaccaagtgtccactggtactgaggtttgctgcctgccttcttgccatgtctaacgaagtagaaacaagtgcaaccaatggtcagcccgaccaacaggccgcaccaaaagcaccctcaaagaaggaaaaaaagaaaggccctgaaaagacagatgaatatctcttagcaaggttcaaaggcgatggtgtaaaatataaggccaagctgattggcattgatgatgtgccagatgcaagaggggataaaatgagccaagactctatgatgaaactaaagggaatggcggcagctggtcggtctcagggacaacacaaacaaaggatctgggtcaacatttccctttctgggataaaaataattgatgagaaaactggggtaagaattcacatttgctgatacctctctgaccacctgagtctgaccaacaatttgctacttgaatttcggctccccttcttcgttctcaaagttctgtggggaacaaatatatcatatattacatctccagaagtaacaggcagaaaacagaataggaggtaatagagcatgaacatccagtaaataagatttctttcattgcccgtgatgtgacagacaaccgggcatttggttacgtgtgtggaggagaaggccagcatcagttttttgccataaaaaccgggcaacaggctgaaccattagttgttgatcttaaagacctttttcaagttatctataatgtaaagaaaaaggaagaagaaaagaaaaagatagaggaagccagca

SEQ ID NO: 124818 - DNA, 561 bp, Homo sapiens
  Payload ID: 4508
  Gene Symbol: DAB2
  Gene Name: Dab, mitogen-responsive phosphoprotein, homolog 2 (Drosophila)
  ENST ID: ENST00000503513
  CDS Start-End: 361-561
gctgtagcctggaggctccgggcgcggggaagtcatgctcgcttcacggaggcaatagctagccgtttttgtttggaaggaagagagccgctctgtaaaccgagaagagcagaaacaagcttccagacacatggaaagacttaaaaattatggaggggcgacttcacgaatagtaaatgttgctattgctctataaagtgacttcatgaaaaaatttctggccttagtcaggcaaagcaggggcatgggggagaaggaggtgtctgtgggaggttatgtttatttgagacttctccatcgggatcgcctggtgtcaccaagtgtccactggtactgaggtttgctgcctgccttcttgccatgtctaacgaagtagaaacaagtgcaaccaatggtcagcccgaccaacaggccgcaccaaaagcaccctcaaagaaggaaaaaaagaaaggccctgaaaagacagatgaatatctcttagcaaggttcaaaggcgatggtgtaaaatataaggccaagctgattggcattgatgatgtgccagatgcaagaggggataaa

SEQ ID NO: 124819 - DNA, 2740 bp, Homo sapiens
  Payload ID: 4508
  Gene Symbol: DAB2
  Gene Name: Dab, mitogen-responsive phosphoprotein, homolog 2 (Drosophila)
  Uniprot ID: P98082
  ENST ID: ENST00000509337
  CDS Start-End: 81-2330
tatttgagacttctccatcgggatcgcctggtgtcaccaagtgtccactggtactgaggtttgctgcctgccttcttgccatgtctaacgaagtagaaacaagtgcaaccaatggtcagcccgaccaacaggccgcaccaaaagcaccctcaaagaaggaaaaaaagaaaggccctgaaaagacagatgaatatctcttagcaaggttcaaaggcgatggtgtaaaatataaggccaagctgattggcattgatgatgtgccagatgcaagaggggataaaatgagccaagactctatgatgaaactaaagggaatggcggcagctggtcggtctcagggacaacacaaacaaaggatctgggtcaacatttccctttctgggataaaaataattgatgagaaaactggggtaatagagcatgaacatccagtaaataagatttctttcattgcccgtgatgtgacagacaaccgggcatttggttacgtgtgtggaggagaaggccagcatcagttttttgccataaaaaccgggcaacaggctgaaccattagttgttgatcttaaagacctttttcaagttatctataatgtaaagaaaaaggaagaagaaaagaaaaagatagaggaagccagcaaagcagttgagaatgggagtgaggccctaatgattctagatgaccaaactaacaaactgaaatcggaaagcaaagatatcctgttagtggatctaaactctgaaatcgacaccaatcagaattctttaagagaaaatccattcttaacaaacggcatcacctcctgttctcttcctcgaccaacgcctcaggcatccttcttgcctgaaaatgccttttctgccaatctcaacttctttcccacccctaatcctgatcctttccgtgacgatcctttcacacagccagaccaatcgacaccttcttcgtttgattctctcaaatctccagatcagaagaaagagaattcgagtagctcgtctactccgctgagtaatgggcccctgaatggtgatgttgactactttggtcagcaatttgaccagatctctaaccggactggcaaacaggaagctcaggcaggcccatggcccttttcaagttcgcaaacccagccagcagtgagaactcaaaatggggtatctgaaagagaacagaacggcttctctgtcaaatcctccccgaacccttttgtgggaagccctcccaaaggactgtccatacagaatggcgtaaagcaggacttggaaagctctgtccagtcctcaccacatgactccatagccattatcccacctccacaaagtaccaaaccaggaagaggcagaaggactgctaagtcttcagccaatgacttgcttgcatcagacatctttgctcctcccgtctcagaaccttcaggccaggcgtcacccacaggacaacctacagccctgcagcccaaccctctggatctcttcaaaacaagtgctcctgccccagtggggcccctggtgggtctaggtggtgtaactgtcacactccctcaggcaggaccatggaacacagcatctttggtcttcaatcagtccccttcaatggctccgggagccatgatgggtggtcaaccttcaggttttagtcagcccgtcatttttggtacaagtccagctgtttcaggttggaaccagccttcaccctttgcagcctcaactccccctccagtgcctgttgtctggggcccttctgcatctgtggcacccaatgcttggtcaacaacaagccctttggggaatccttttcagagcaatatttttccagctcctgctgtgtccactcagcccccatccatgcactcctctctcctggtcactcctcctcagccacctcccagagctggccctcccaaggacatctccagtgatgccttcactgccttagacccacttggggataaagagatcaaggatgtgaaagaaatgtttaaggatttccaactgcggcagccacctgctgtgcccgcgcggaagggagagcagacttcttctgggactttgagtgcctttgccagttatttcaacagcaaggttggcattcctcaggagaatgcagaccatgatgactttgatgctaatcaactattgaacaagatcaatgaaccaccaaagccagctcccagacaagtttccctgccagttaccaaatctactgacaatgcatttgagaaccctttctttaaagattcttttggttcatcacaagcctctgtggcttcttctcaacctgtatcttctgagatgtatagggatccatttggaaatccttttgcctaaattctgaacttggtctgcagaccatccagaggaataaaaaggttggccttagtagtcaaaaacaaagctgatagccagacacgttctgatttctgcccttgttccagctttgacgtattatctgttgccttatttctcattgcctcttctacttgtaaaatgcttttcactttctgtctaggttaaagctaaactgaatctatggctttaaataaattaagatcctaaactctctagcttaagtgtaaatgaagtacagtagtttccctactgaaccctgcctcttgtgtccctggaaccttctagaacacctgccttctaccctctggttgggagatgcagccaccacatcccttcatatcatactgttttgaataaattttcaaatccttattgttcagagttgtttg

SEQ ID NO: 124820 - DNA, 551 bp, Homo sapiens
  Payload ID: 4508
  Gene Symbol: DAB2
  Gene Name: Dab, mitogen-responsive phosphoprotein, homolog 2 (Drosophila)
  ENST ID: ENST00000511792
  CDS Start-End: 325-551
gcacacatgaaacatggcaatgttcagggcagcatgtgattgactgccaaagtgtctcgagcaggaagtaccaagggaggatggagatggtaataatcagggttgggtggagaatatctgaggaaactgcacttgatttgggccttgaagagtaattgactggatttagatttatctagaaaggtcgttcccagcagaagcaacaagaacaacaagcttggaggtgtctgtgggaggttatgtttatttgagacttctccatcgggatcgcctggtgtcaccaagtgtccactggtactgaggtttgctgcctgccttcttgccatgtctaacgaagtagaaacaagtgcaaccaatggtcagcccgaccaacaggccgcaccaaaagcaccctcaaagaaggaaaaaaagaaaggccctgaaaagacagatgaatatctcttagcaaggttcaaaggcgatggtgtaaaatataaggccaagctgattggcattgatgatgtgccagatgcaagaggggataaaatgagccaagactctatgatgaaact

SEQ ID NO: 124821 - DNA, 4537 bp, Homo sapiens
  Payload ID: 4508
  Gene Symbol: DAB2
  Gene Name: Dab, mitogen-responsive phosphoprotein, homolog 2 (Drosophila)
  Uniprot ID: P98082
  ENST ID: ENST00000545653
  CDS Start-End: 532-2781
gtccttatttgcacccgccccccgcccgcgtcggtctggggcttttgacttctccccgaacacatttcccctcccgtcgctgggtccctgcgatcgcccccagctggtggggctcgcggagctcaggggagcggggtcctctgcgccgctgcagcgcgagttaataaacagttaagtttggaagactctgcagacacgttgagggggagttaccaagcccaggcagcaaaaacatcctggcacattcctggggagtcctcagctgccagcatctgattagaaccatatctctcgccgggagtggccgcgcggctccgaagctcccggccggcggctatttaagcgaggcccgccgcatccgctgcgctgtagcctggaggctccgggcgcggggaagtcatgctcgcttcacggaggcaatagctagccggtgtctgtgggaggttatgtttatttgagacttctccatcgggatcgcctggtgtcaccaagtgtccactggtactgaggtttgctgcctgccttcttgccatgtctaacgaagtagaaacaagtgcaaccaatggtcagcccgaccaacaggccgcaccaaaagcaccctcaaagaaggaaaaaaagaaaggccctgaaaagacagatgaatatctcttagcaaggttcaaaggcgatggtgtaaaatataaggccaagctgattggcattgatgatgtgccagatgcaagaggggataaaatgagccaagactctatgatgaaactaaagggaatggcggcagctggtcggtctcagggacaacacaaacaaaggatctgggtcaacatttccctttctgggataaaaataattgatgagaaaactggggtaatagagcatgaacatccagtaaataagatttctttcattgcccgtgatgtgacagacaaccgggcatttggttacgtgtgtggaggagaaggccagcatcagttttttgccataaaaaccgggcaacaggctgaaccattagttgttgatcttaaagacctttttcaagttatctataatgtaaagaaaaaggaagaagaaaagaaaaagatagaggaagccagcaaagcagttgagaatgggagtgaggccctaatgattctagatgaccaaactaacaaactgaaatcggaaagcaaagatatcctgttagtggatctaaactctgaaatcgacaccaatcagaattctttaagagaaaatccattcttaacaaacggcatcacctcctgttctcttcctcgaccaacgcctcaggcatccttcttgcctgaaaatgccttttctgccaatctcaacttctttcccacccctaatcctgatcctttccgtgacgatcctttcacacagccagaccaatcgacaccttcttcgtttgattctctcaaatctccagatcagaagaaagagaattcgagtagctcgtctactccgctgagtaatgggcccctgaatggtgatgttgactactttggtcagcaatttgaccagatctctaaccggactggcaaacaggaagctcaggcaggcccatggcccttttcaagttcgcaaacccagccagcagtgagaactcaaaatggggtatctgaaagagaacagaacggcttctctgtcaaatcctccccgaacccttttgtgggaagccctcccaaaggactgtccatacagaatggcgtaaagcaggacttggaaagctctgtccagtcctcaccacatgactccatagccattatcccacctccacaaagtaccaaaccaggaagaggcagaaggactgctaagtcttcagccaatgacttgcttgcatcagacatctttgctcctcccgtctcagaaccttcaggccaggcgtcacccacaggacaacctacagccctgcagcccaaccctctggatctcttcaaaacaagtgctcctgccccagtggggcccctggtgggtctaggtggtgtaactgtcacactccctcaggcaggaccatggaacacagcatctttggtcttcaatcagtccccttcaatggctccgggagccatgatgggtggtcaaccttcaggttttagtcagcccgtcatttttggtacaagtccagctgtttcaggttggaaccagccttcaccctttgcagcctcaactccccctccagtgcctgttgtctggggcccttctgcatctgtggcacccaatgcttggtcaacaacaagccctttggggaatccttttcagagcaatatttttccagctcctgctgtgtccactcagcccccatccatgcactcctctctcctggtcactcctcctcagccacctcccagagctggccctcccaaggacatctccagtgatgccttcactgccttagacccacttggggataaagagatcaaggatgtgaaagaaatgtttaaggatttccaactgcggcagccacctgctgtgcccgcgcggaagggagagcagacttcttctgggactttgagtgcctttgccagttatttcaacagcaaggttggcattcctcaggagaatgcagaccatgatgactttgatgctaatcaactattgaacaagatcaatgaaccaccaaagccagctcccagacaagtttccctgccagttaccaaatctactgacaatgcatttgagaaccctttctttaaagattcttttggttcatcacaagcctctgtggcttcttctcaacctgtatcttctgagatgtatagggatccatttggaaatccttttgcctaaattctgaacttggtctgcagaccatccagaggaataaaaaggttggccttagtagtcaaaaacaaagctgatagccagacacgttctgatttctgcccttgttccagctttgacgtattatctgttgccttatttctcattgcctcttctacttgtaaaatgcttttcactttctgtctaggttaaagctaaactgaatctatggctttaaataaattaagatcctaaactctctagcttaagtgtaaatgaagtacagtagtttccctactgaaccctgcctcttgtgtccctggaaccttctagaacacctgccttctaccctctggttgggagatgcagccaccacatcccttcatatcatactgttttgaataaattttcaaatccttattgttcagagttgtttgggggttctgtttcagagcataaaacctaaaggttatagtagaacaaggcaccttcttaaaagaaatcttgcttcagaccatcagttacagagaatttctaaagtaaaattgaagcaactacaacttctccttagacactttggaatctaaccacttaaggacctttttaaagagatagcttctcttctttctgaagatcaatttctcccaaggccaagattgtccttttctcccatttcttgctagctattgcaaatgagggaagaacattattcatctctcctccccttttttttctgattcttttttcagtcagttttgctcctgggttcaagtagtattaccaccctttcacaagcaacagactctcacagggcaaaaaaaaaaaaaaatctaatgattcacagacagatctggagcctctcttcattctcagtaattgctagtcccaagaactagaattgcaaatgggcacaacctatatccttcctgtggaagaggaggccactctcttgagctgaagttccagaagagcagttaatgttcaagagaaattgaactcaactcagcaacaaaggactctattttgaagagcaacatatcacaaagctaaatgtgattgtgccaaacacattaggtgcttatttggggtcatgctaggcctttatcaagtaactggaaaacttttcttgcagccacaatctcaatgtcgttagtaggaagataagaggggagaaaaagctgtagaacaaatgtttggggttaccattgaaaatctaatgtctgcaatatttttctcctcacaacttggaaacgttcccagttcattttcagtcctgttgtgagcacagttctgaagggtttattattgtcaaaataagttttgttttgttttgtttatgttgggtttttaatgttgtctcttgacccttaatgctcaggttcttgtgggagttaatcagccacatccaatgttaccttgagggggaagaagagggtgatgctcagaagctaaacaagacaggggccacatgaccctctattgattagccccaagtagaaagtcctgtggttttatgtttaatggtaatagttgatcatatatggcataattttctatcagcttcctactcagtcactataaacacagacttgaaatagtactttaaatgtccaaatacctaaatgtgctaaactggaggtaactatttctaggtagttgaatttttgaaagtcatgatcagccacacaactgttttgtacatacttattttctcatgcacttttctgtatgcaaataaagctataaatttactcatttcaataaactggagtggcagaatatc

SEQ ID NO: 124822 - DNA, 647 bp, Homo sapiens
  Payload ID: 4509
  Gene Symbol: DAB1
  Gene Name: Dab, reelin signal transducer, homolog 1 (Drosophila)
  ENST ID: ENST00000332102
  CDS Start-End: 36-647
gggatctgtgtgaagtggactaaggattaagtaggatgtcaactgagacagaacttcaagtagctgtgaaaaccagcgccaagaaagactccagaaagaaaggtcaggatcgcagtgaagccactttgataaagaggtttaaaggtgaaggggtccggtacaaagccaaattgatcgggattgatgaagtttccgcagctcggggagacaagttatgtcaagattccatgatgaaactcaagggcgttgttgctggcgctcgttccaaaggagaacacaaacagaaaatctttttaaccatctcctttggaggaatcaaaatctttgatgagaagacaggggcccttcagcatcatcatgctgttcatgaaatatcctacattgcaaaggacattacagatcaccgggcctttggatatgtttgtgggaaggaagggaatcacagatttgtggccataaaaacagcccaggcggctgaacctgttattctggacttgagagatctctttcaactcatttatgaattgaagcaaagagaagaattagaaaaaaaggcacaaaaggataagcagtgtgaacaagctgtgtaccaggttcccaccagccaaaagaaggaaggtgtttatgatgtgccaaaaagtcaacct

SEQ ID NO: 124823 - DNA, 1150 bp, Homo sapiens
  Payload ID: 4509
  Gene Symbol: DAB1
  Gene Name: Dab, reelin signal transducer, homolog 1 (Drosophila)
  Uniprot ID: O75553
  ENST ID: ENST00000371230
  CDS Start-End: 265-906
cccagctcggcgctcgcccgggcttccccgggctgcagagcgcgcctgagtgccgccgcccgccgggcatggggagccgcttcctgggcggctgcggcagcggaggaggatgctctgggctaggcgagcactcaaaaagagtgaatgaaatgtgcagctcagagtgtcatttctgaagggaggagtctttctcttggagaagagtcctcaatgagcctggccgaggcccgggatctgtgtgaagtggactaaggattaagtaggatgtcaactgagacagaacttcaagtagctgtgaaaaccagcgccaagaaagactccagaaagaaaggtcaggatcgcagtgaagccactttgataaagaggtttaaaggtgaaggggtccggtacaaagccaaattgatcgggattgatgaagtttccgcagctcggggagacaagttatgtcaagattccatgatgaaactcaagggcgttgttgctggcgctcgttccaaaggagaacacaaacagaaaatctttttaaccatctcctttggaggaatcaaaatctttgatgagaagacaggggcccttcagcatcatcatgctgttcatgaaatatcctacattgcaaaggacattacagatcaccgggcctttggatatgtttgtgggaaggaagggaatcacagatttgtggccataaaaacagcccaggcggctgaacctgttattctggacttgagagatctctttcaactcatttatgaattgaagcaaagagaagaattagaaaaaaaggcacaaaaggataagcagtgtgaacaagctgtgtaccagacaatattggaagaggatgttgaagatcctgtgtaccaggtaatttctgaaactagtcggggttttagattcaagagtgactagacctgtgccagagccattttgtcagaaacctgaagaatccactgactgcaaaacctggagagagaccaagattatttctgagggtgagggctgccagcccctccaggagcaaatttccataaaaactaacagaagtttggccggcatcggtatcttgggatttggagatccgcttctcccttcttgcctctgcctcggcccccttcacagtctgtaaaagtttgatcccagagctgaatgtttt

SEQ ID NO: 124824 - DNA, 1802 bp, Homo sapiens
  Payload ID: 4509
  Gene Symbol: DAB1
  Gene Name: Dab, reelin signal transducer, homolog 1 (Drosophila)
  Uniprot ID: O75553
  ENST ID: ENST00000371231
  CDS Start-End: 36-1802
gggatctgtgtgaagtggactaaggattaagtaggatgtcaactgagacagaacttcaagtagctgtgaaaaccagcgccaagaaagactccagaaagaaaggtcaggatcgcagtgaagccactttgataaagaggtttaaaggtgaaggggtccggtacaaagccaaattgatcgggattgatgaagtttccgcagctcggggagacaagttatgtcaagattccatgatgaaactcaagggcgttgttgctggcgctcgttccaaaggagaacacaaacagaaaatctttttaaccatctcctttggaggaatcaaaatctttgatgagaagacaggggcccttcagcatcatcatgctgttcatgaaatatcctacattgcaaaggacattacagatcaccgggcctttggatatgtttgtgggaaggaagggaatcacagatttgtggccataaaaacagcccaggcggctgaacctgttattctggacttgagagatctctttcaactcatttatgaattgaagcaaagagaagaattagaaaaaaaggcacaaaaggataagcagtgtgaacaagctgtgtaccagacaatattggaagaggatgttgaagatcctgtgtaccagtacattgtgtttgaggctggacacgagccaatccgtgatcccgaaacggaagaaaacatttatcaggttcccaccagccaaaagaaggaaggtgtttatgatgtgccaaaaagtcaacctgtaagtaatggctattcgtttgaggattttgaagaacggtttgctgcagccaccccgaacagaaacctgcccacagactttgatgagatttttgaggcaacgaaggctgtgacccaattagaactttttggggacatgtccacaccccctgatataacctctccccccactcctgcaactccaggtgatgcctttatcccatcttcatctcagacccttccagcgagtgcagatgtgtttagttctgtacctttcggcactgctgctgtaccctcaggttacgttgcaatgggcgctgtcctcccgtccttctggggtcagcagcccctcgtccaacagcagatggtcatgggtgcccagccaccagtcgctcaggtgatgccgggggctcagcccatcgcatggggccagccgggtctctttcctgccactcagcagccctggccaactgtggccgggcagtttccgccagccgccttcatgcccacacaaactgttatgcctttgccagctgccatgttccaaggtcccctcaccccccttgccaccgtcccaggcacgagtgactccaccaggtcaagtccacagaccgacaagcccaggcagaaaatgggcaaagaaacgtttaaggatttccagatggcccagcctccgcccgtgccctcccgcaaacccgaccagccctccctcacctgtacctcagaggccttctccagttacttcaacaaagtcggggtggcacaggatacagacgactgtgatgactttgacatctcccagttgaatttgacccctgtgacttctaccacaccatcgaccaactcacctccaaccccagcccctagacagagctctccatccaaatcatctgcatcccatgccagtgatcctaccacagatgacatctttgaagagggctttgaaagtcccagcaaaagcgaagagcaagaagctcctgatggatcacaggcctcatccaacagtgatccatttggtgagcccagtggggagcccagtggtgataatataagtccacaggccggtagctag

SEQ ID NO: 124825 - DNA, 752 bp, Homo sapiens
  Payload ID: 4509
  Gene Symbol: DAB1
  Gene Name: Dab, reelin signal transducer, homolog 1 (Drosophila)
  ENST ID: ENST00000371232
  CDS Start-End: 36-752
gggatctgtgtgaagtggactaaggattaagtaggatgtcaactgagacagaacttcaagtagctgtgaaaaccagcgccaagaaagactccagaaagaaaggtcaggatcgcagtgaagccactttgataaagaggtttaaaggtgaaggggtccggtacaaagccaaattgatcgggattgatgaagtttccgcagctcggggagacaagttatgtcaagattccatgatgaaactcaagggcgttgttgctggcgctcgttccaaaggagaacacaaacagaaaatctttttaaccatctcctttggaggaatcaaaatctttgatgagaagacaggggttcccaccagccaaaagaaggaaggtgtttatgatgtgccaaaaagtcaacctgtaagtaatggctattcgtttgaggattttgaagaacggtttgctgcagccaccccgaacagaaacctgcccacagactttgatgagatttttgaggcaacgaaggctgtgacccaattagaactttttggggacatgtccacaccccctgatataacctctccccccactcctgcaactccaggtgatgcctttatcccatcttcatctcagacccttccagcgagtgcagatgtgtttagttctgtacctttcggcactgctgctgtaccctcaggttacgttgcaatgggcgctgtcctcccgtccttctggggtcagcagcccctcgtccaacagcagatggtcatgggtgcc

SEQ ID NO: 124826 - DNA, 5298 bp, Homo sapiens
  Payload ID: 4509
  Gene Symbol: DAB1
  Gene Name: Dab, reelin signal transducer, homolog 1 (Drosophila)
  Uniprot ID: O75553
  ENST ID: ENST00000371236
  CDS Start-End: 265-1932
cccagctcggcgctcgcccgggcttccccgggctgcagagcgcgcctgagtgccgccgcccgccgggcatggggagccgcttcctgggcggctgcggcagcggaggaggatgctctgggctaggcgagcactcaaaaagagtgaatgaaatgtgcagctcagagtgtcatttctgaagggaggagtctttctcttggagaagagtcctcaatgagcctggccgaggcccgggatctgtgtgaagtggactaaggattaagtaggatgtcaactgagacagaacttcaagtagctgtgaaaaccagcgccaagaaagactccagaaagaaaggtcaggatcgcagtgaagccactttgataaagaggtttaaaggtgaaggggtccggtacaaagccaaattgatcgggattgatgaagtttccgcagctcggggagacaagttatgtcaagattccatgatgaaactcaagggcgttgttgctggcgctcgttccaaaggagaacacaaacagaaaatctttttaaccatctcctttggaggaatcaaaatctttgatgagaagacaggggcccttcagcatcatcatgctgttcatgaaatatcctacattgcaaaggacattacagatcaccgggcctttggatatgtttgtgggaaggaagggaatcacagatttgtggccataaaaacagcccaggcggctgaacctgttattctggacttgagagatctctttcaactcatttatgaattgaagcaaagagaagaattagaaaaaaaggcacaaaaggataagcagtgtgaacaagctgtgtaccagacaatattggaagaggatgttgaagatcctgtgtaccagtacattgtgtttgaggctggacacgagccaatccgtgatcccgaaacggaagaaaacatttatcaggttcccaccagccaaaagaaggaaggtgtttatgatgtgccaaaaagtcaacctgtaagtgctgtgacccaattagaactttttggggacatgtccacaccccctgatataacctctccccccactcctgcaactccaggtgatgcctttatcccatcttcatctcagacccttccagcgagtgcagatgtgtttagttctgtacctttcggcactgctgctgtaccctcaggttacgttgcaatgggcgctgtcctcccgtccttctggggtcagcagcccctcgtccaacagcagatggtcatgggtgcccagccaccagtcgctcaggtgatgccgggggctcagcccatcgcatggggccagccgggtctctttcctgccactcagcagccctggccaactgtggccgggcagtttccgccagccgccttcatgcccacacaaactgttatgcctttgccagctgccatgttccaaggtcccctcaccccccttgccaccgtcccaggcacgagtgactccaccaggtcaagtccacagaccgacaagcccaggcagaaaatgggcaaagaaacgtttaaggatttccagatggcccagcctccgcccgtgccctcccgcaaacccgaccagccctccctcacctgtacctcagaggccttctccagttacttcaacaaagtcggggtggcacaggatacagacgactgtgatgactttgacatctcccagttgaatttgacccctgtgacttctaccacaccatcgaccaactcacctccaaccccagcccctagacagagctctccatccaaatcatctgcatcccatgccagtgatcctaccacagatgacatctttgaagagggctttgaaagtcccagcaaaagcgaagagcaagaagctcctgatggatcacaggcctcatccaacagtgatccatttggtgagcccagtggggagcccagtggtgataatataagtccacaggccggtagctagatagcgcaggtctgggagccagagcctctgtacgcgcagatcaacagacctaagaaatagcatcgatgcgagctcgtggtgggtgctcaagactggcatggacatcagcatcacgacaggctctcttgtattctttcacctcttcccacaagaaattcatgattgcccaatggaactcgctcagaagagggaactaagcatttttggcaaccaatggcagatatctatggcagcacacaaaaaaagtatagaaagatccacccaacattaaatcagaaatcaagcaaatgcttacccaacaaatatttgagccctcatagctgggtttaagatgactcagtgtgcaaaattattaattccctttttatttctctacctgttgaccactgttgagacaccaaatttggagtgacaggcatcagaggattacaacagggttggaactgacttctttaagcaaaagcaaagggtcttctgtgaccacaatatcgtcatccatatgccttttcacataggatgatgtgttttttgtcactccatggggcctggtctgccattttcccccctttcctttttttgtcatgtttgaaaattaataggtgtacaaatttttgtattgcttttgactttttttagatatgggtgaagaaatctaactggggagaaaaaaagcctcagtgaaatgaattaacttgaaattacaagacaaataagtggttgattattcattatgatcacgaatgttgccaaaacagtcctttagctattctgcatcctggtgaagaaagacagctttcagtacgaaccttcattctgtgagtaggaaaagacatcagatcccattgatgagaaagatgaaaaatgcatctgatttcttaagaagctctaaactctaagtacaataaaatgatattttttatttttccgatatcttgctgctgtgttgctatgcagacaagtgtcttctccacgtgccattttcaaagaaaagtcatttgccaaataattctggtacaattctggtaatgtggttttggatcttaaaaaccaactttctaatggaacaatggtggcataaatattcagaataacaaactgattctgtggtccaaatggttcatctctatctctttttgtacatcagaaaattcaaatgggatttttattttataacttgaaaaaaaaaccttaccattaaactctttaaatatttaagggaaatggctttaaggagttctaatgaaaaaaaattgtcttttttttgtaaatataaatgttaatgaaaatgatttttaataatgccattacactgtagagaaggtagcagattgagtgcaaggtgtgacaaacttgatggatggggctcactttccagacgttattctggagcatatggtaggaagctggagtgcagggacagctggcaggagcagttggccaatcagcagctagtgaacgggaagggagcacgtgactccatcatctagcctttccacgagagtccccaccctacgtgcaacacaagaaaaagacaattcacattctgaagaattcagattctgaaactctcccacctccccactcccacctacccccgatataaatcactggactgtttgtacgtgaaacagaagaggctaagcttcctttttttacacttatgagacaaaaagtgcagtgtttggttcgtatgtttagcacatgattttcataaagaatctatatatttttgccctacagagaattgttatacaggtcaagtgtgttttcctgatgttcctatgcagttacagtatgttgaaagtgttttaacactaagaagaaaactttaaagattcatgtgattaattggatttgaggataattattattatttggtttttagatttgaaaagtagaatttccattgagacaattgatttgaataggcctgcatttgattcttcatatcaatagaaactaaaatgatttgggagattcatttgaaaaatgattgtatacttgttcacaaagcgaaaagtgatacatgaaggtaatggttatcatttaaagcccacattttacactatcaggtcacaggagtctaatttttttttcagttagataaactgaccaaacgtctattcaagaatatatgtcaatatcatcctaatgtggaaggtccgaagaaccagaaaagtgagaagggccgtttacctccctctgtagctatcacctgttggtccacagagtttcttgagaaatgagcaaacattttatgattaggtaaccctttcacatgaacgggaagatgggaaaggtggaatgaccataagagttggcctgagaccagtttgttttctggggatttggtaagataggcagttcccatgggaaattgcttaaattgctttgttgcctatgatttgattctaaacaagtggtgctatcttctccctcaatatggctgtcttgagtttgtcttgcagtatcacaccattataccaattctttgggttgcttctgacacattcaaagtgaactctggctgatgttgctgtttcaggtataccatctggagttaatttcctagcagaaggtgaaagtccaggagaattgtcctctttcattgaacatgattgaaaatgtaactggctctgaacttcaagaagatagatgcccaagtgatgcattaaagtaagggaaataaagtcaagtttttcaactgccatccatattctcattggcagaattctgatttttttccaagcactgtttggtgagcctggaagcaccgtatcctgtcccaggagtacagtgaaatttccaagcaagagctgaggtgccaataccaaaagaccatggggagtctgcacggttctggttagatcaatagaaaatccatgtgtacaactgttaattcctcatcctccactagcactaaatttgtcactttaaattttgaaaccagggaaacaccacctgtcattctgtccccattctccatagctcttcaatctttacatgccgcaagacttttttgatagctcgtactcatcccagtgtctcctgaaaccccatcatgtaatgtactgggcaccttcttttaaacaaatgtttactctgtgggtttggttcatttcaatttctgcgttctgacacatatttttttaataaagatgagaaagagaaaatgactgttgcagtacctttctagacctactttaactttacctcagatgacagtttgttaacatatatggacacattatttttaactttatgtacaatgcattcaacagaacagcaaaatttttagaaattttccattaatttctgtaacacaccatgtaaaactgttacaaataaacatgtttgagaacaaca

SEQ ID NO: 124827 - DNA, 5168 bp, Homo sapiens
  Payload ID: 4509
  Gene Symbol: DAB1
  Gene Name: Dab, reelin signal transducer, homolog 1 (Drosophila)
  Uniprot ID: O75553
  ENST ID: ENST00000414851
  CDS Start-End: 139-1806
agcactcaaaaagagtgaatgaaatgtgcagctcagagtgtcatttctgaagggaggagtctttctcttggagaagagtcctcaatgagcctggccgaggcccgggatctgtgtgaagtggactaaggattaagtaggatgtcaactgagacagaacttcaagtagctgtgaaaaccagcgccaagaaagactccagaaagaaaggtcaggatcgcagtgaagccactttgataaagaggtttaaaggtgaaggggtccggtacaaagccaaattgatcgggattgatgaagtttccgcagctcggggagacaagttatgtcaagattccatgatgaaactcaagggcgttgttgctggcgctcgttccaaaggagaacacaaacagaaaatctttttaaccatctcctttggaggaatcaaaatctttgatgagaagacaggggcccttcagcatcatcatgctgttcatgaaatatcctacattgcaaaggacattacagatcaccgggcctttggatatgtttgtgggaaggaagggaatcacagatttgtggccataaaaacagcccaggcggctgaacctgttattctggacttgagagatctctttcaactcatttatgaattgaagcaaagagaagaattagaaaaaaaggcacaaaaggataagcagtgtgaacaagctgtgtaccagacaatattggaagaggatgttgaagatcctgtgtaccagtacattgtgtttgaggctggacacgagccaatccgtgatcccgaaacggaagaaaacatttatcaggttcccaccagccaaaagaaggaaggtgtttatgatgtgccaaaaagtcaacctgtaagtgctgtgacccaattagaactttttggggacatgtccacaccccctgatataacctctccccccactcctgcaactccaggtgatgcctttatcccatcttcatctcagacccttccagcgagtgcagatgtgtttagttctgtacctttcggcactgctgctgtaccctcaggttacgttgcaatgggcgctgtcctcccgtccttctggggtcagcagcccctcgtccaacagcagatggtcatgggtgcccagccaccagtcgctcaggtgatgccgggggctcagcccatcgcatggggccagccgggtctctttcctgccactcagcagccctggccaactgtggccgggcagtttccgccagccgccttcatgcccacacaaactgttatgcctttgccagctgccatgttccaaggtcccctcaccccccttgccaccgtcccaggcacgagtgactccaccaggtcaagtccacagaccgacaagcccaggcagaaaatgggcaaagaaacgtttaaggatttccagatggcccagcctccgcccgtgccctcccgcaaacccgaccagccctccctcacctgtacctcagaggccttctccagttacttcaacaaagtcggggtggcacaggatacagacgactgtgatgactttgacatctcccagttgaatttgacccctgtgacttctaccacaccatcgaccaactcacctccaaccccagcccctagacagagctctccatccaaatcatctgcatcccatgccagtgatcctaccacagatgacatctttgaagagggctttgaaagtcccagcaaaagcgaagagcaagaagctcctgatggatcacaggcctcatccaacagtgatccatttggtgagcccagtggggagcccagtggtgataatataagtccacaggccggtagctagatagcgcaggtctgggagccagagcctctgtacgcgcagatcaacagacctaagaaatagcatcgatgcgagctcgtggtgggtgctcaagactggcatggacatcagcatcacgacaggctctcttgtattctttcacctcttcccacaagaaattcatgattgcccaatggaactcgctcagaagagggaactaagcatttttggcaaccaatggcagatatctatggcagcacacaaaaaaagtatagaaagatccacccaacattaaatcagaaatcaagcaaatgcttacccaacaaatatttgagccctcatagctgggtttaagatgactcagtgtgcaaaattattaattccctttttatttctctacctgttgaccactgttgagacaccaaatttggagtgacaggcatcagaggattacaacagggttggaactgacttctttaagcaaaagcaaagggtcttctgtgaccacaatatcgtcatccatatgccttttcacataggatgatgtgttttttgtcactccatggggcctggtctgccattttcccccctttcctttttttgtcatgtttgaaaattaataggtgtacaaatttttgtattgcttttgactttttttagatatgggtgaagaaatctaactggggagaaaaaaagcctcagtgaaatgaattaacttgaaattacaagacaaataagtggttgattattcattatgatcacgaatgttgccaaaacagtcctttagctattctgcatcctggtgaagaaagacagctttcagtacgaaccttcattctgtgagtaggaaaagacatcagatcccattgatgagaaagatgaaaaatgcatctgatttcttaagaagctctaaactctaagtacaataaaatgatattttttatttttccgatatcttgctgctgtgttgctatgcagacaagtgtcttctccacgtgccattttcaaagaaaagtcatttgccaaataattctggtacaattctggtaatgtggttttggatcttaaaaaccaactttctaatggaacaatggtggcataaatattcagaataacaaactgattctgtggtccaaatggttcatctctatctctttttgtacatcagaaaattcaaatgggatttttattttataacttgaaaaaaaaaccttaccattaaactctttaaatatttaagggaaatggctttaaggagttctaatgaaaaaaaattgtcttttttttgtaaatataaatgttaatgaaaatgatttttaataatgccattacactgtagagaaggtagcagattgagtgcaaggtgtgacaaacttgatggatggggctcactttccagacgttattctggagcatatggtaggaagctggagtgcagggacagctggcaggagcagttggccaatcagcagctagtgaacgggaagggagcacgtgactccatcatctagcctttccacgagagtccccaccctacgtgcaacacaagaaaaagacaattcacattctgaagaattcagattctgaaactctcccacctccccactcccacctacccccgatataaatcactggactgtttgtacgtgaaacagaagaggctaagcttcctttttttacacttatgagacaaaaagtgcagtgtttggttcgtatgtttagcacatgattttcataaagaatctatatatttttgccctacagagaattgttatacaggtcaagtgtgttttcctgatgttcctatgcagttacagtatgttgaaagtgttttaacactaagaagaaaactttaaagattcatgtgattaattggatttgaggataattattattatttggtttttagatttgaaaagtagaatttccattgagacaattgatttgaataggcctgcatttgattcttcatatcaatagaaactaaaatgatttgggagattcatttgaaaaatgattgtatacttgttcacaaagcgaaaagtgatacatgaaggtaatggttatcatttaaagcccacattttacactatcaggtcacaggagtctaatttttttttcagttagataaactgaccaaacgtctattcaagaatatatgtcaatatcatcctaatgtggaaggtccgaagaaccagaaaagtgagaagggccgtttacctccctctgtagctatcacctgttggtccacagagtttcttgagaaatgagcaaacattttatgattaggtaaccctttcacatgaacgggaagatgggaaaggtggaatgaccataagagttggcctgagaccagtttgttttctggggatttggtaagataggcagttcccatgggaaattgcttaaattgctttgttgcctatgatttgattctaaacaagtggtgctatcttctccctcaatatggctgtcttgagtttgtcttgcagtatcacaccattataccaattctttgggttgcttctgacacattcaaagtgaactctggctgatgttgctgtttcaggtataccatctggagttaatttcctagcagaaggtgaaagtccaggagaattgtcctctttcattgaacatgattgaaaatgtaactggctctgaacttcaagaagatagatgcccaagtgatgcattaaagtaagggaaataaagtcaagtttttcaactgccatccatattctcattggcagaattctgatttttttccaagcactgtttggtgagcctggaagcaccgtatcctgtcccaggagtacagtgaaatttccaagcaagagctgaggtgccaataccaaaagaccatggggagtctgcacggttctggttagatcaatagaaaatccatgtgtacaactgttaattcctcatcctccactagcactaaatttgtcactttaaattttgaaaccagggaaacaccacctgtcattctgtccccattctccatagctcttcaatctttacatgccgcaagacttttttgatagctcgtactcatcccagtgtctcctgaaaccccatcatgtaatgtactgggcaccttcttttaaacaaatgtttactctgtgggtttggttcatttcaatttctgcgttctgacacatatttttttaataaagatgagaaagagaaaatgactgttgcagtacctttctagacctactttaactttacctcagatgacagtttgttaacatatatggacacattatttttaactttatgtacaatgcattcaacagaacagcaaaatttttagaaattttccattaatttctgtaacacaccatgtaaaactgttacaaataaacatgtttgagaac

SEQ ID NO: 124828 - DNA, 1817 bp, Homo sapiens
  Payload ID: 4509
  Gene Symbol: DAB1
  Gene Name: Dab, reelin signal transducer, homolog 1 (Drosophila)
  Uniprot ID: O75553
  ENST ID: ENST00000420954
  CDS Start-End: 37-1698
cgggatctgtgtgaagtggactaaggattaagtaggatgtcaactgagacagaacttcaagtagctgtgaaaaccagcgccaagaaagactccagaaagaaaggtcaggatcgcagtgaagccactttgataaagaggtttaaaggtgaaggggtccggtacaaagccaaattgatcgggattgatgaagtttccgcagctcggggagacaagttatgtcaagattccatgatgaaactcaagggcgttgttgctggcgctcgttccaaaggagaacacaaacagaaaatctttttaaccatctcctttggaggaatcaaaatctttgatgagaagacaggggcccttcagcatcatcatgctgttcatgaaatatcctacattgcaaaggacattacagatcaccgggcctttggatatgtttgtgggaaggaagggaatcacagatttgtggccataaaaacagcccaggcggctgaacctgttattctggacttgagagatctctttcaactcatttatgaattgaagcaaagagaagaattagaaaaaaaggcacaaaaggataagcagtgtgaacaagctgtgtaccaggttcccaccagccaaaagaaggaaggtgtttatgatgtgccaaaaagtcaacctgtaagtaatggctattcgtttgaggattttgaagaacggtttgctgcagccaccccgaacagaaacctgcccacagactttgatgagatttttgaggcaacgaaggctgtgacccaattagaactttttggggacatgtccacaccccctgatataacctctccccccactcctgcaactccaggtgatgcctttatcccatcttcatctcagacccttccagcgagtgcagatgtgtttagttctgtacctttcggcactgctgctgtaccctcaggttacgttgcaatgggcgctgtcctcccgtccttctggggtcagcagcccctcgtccaacagcagatggtcatgggtgcccagccaccagtcgctcaggtgatgccgggggctcagcccatcgcatggggccagccgggtctctttcctgccactcagcagccctggccaactgtggccgggcagtttccgccagccgccttcatgcccacacaaactgttatgcctttgccagctgccatgttccaaggtcccctcaccccccttgccaccgtcccaggcacgagtgactccaccaggtcaagtccacagaccgacaagcccaggcagaaaatgggcaaagaaacgtttaaggatttccagatggcccagcctccgcccgtgccctcccgcaaacccgaccagccctccctcacctgtacctcagaggccttctccagttacttcaacaaagtcggggtggcacaggatacagacgactgtgatgactttgacatctcccagttgaatttgacccctgtgacttctaccacaccatcgaccaactcacctccaaccccagcccctagacagagctctccatccaaatcatctgcatcccatgccagtgatcctaccacagatgacatctttgaagagggctttgaaagtcccagcaaaagcgaagagcaagaagctcctgatggatcacaggcctcatccaacagtgatccatttggtgagcccagtggggagcccagtggtgataatataagtccacaggccggtagctagatagcgcaggtctgggagccagagcctctgtacgcgcagatcaacagacctaagaaatagcatcgatgcgagctcgtggtgggtgctcaagactggcatggacatcagcatcacgacag

SEQ ID NO: 124829 - DNA, 5469 bp, Homo sapiens
  Payload ID: 4510
  Gene Symbol: DAB2IP
  Gene Name: DAB2 interacting protein
  Uniprot ID: Q5VWQ8
  ENST ID: ENST00000259371
  CDS Start-End: 88-3486
ggaatacaaaaggaggaacccagacgctcatggagacagcctcggttcataaatcaggtggggccaggggctgggggcccacacgccatggagcccgactcccttctggaccaagacgactcctacgagtcgcctcaagaaaggccgggctctcggcgcagcctgcctggcagcctttccgagaagagccccagcatggagccctcggccgccacgccgttccgggtcacgggcttcctcagccgccgcctcaagggctccatcaagcgcaccaagagccagcccaagctggaccgcaaccacagcttccgccacatcctgccggggttccggagcgccgccgccgccgccgcggacaatgagaggtcccatctgatgccgaggctgaaggagtctcgctcccacgagtccctgctcagccccagcagtgcggtggaggcgctggacctcagcatggaggaagaggtggtcatcaagcccgtgcacagcagcatccttggccaggactactgcttcgaggtgacgacgtcatcaggaagcaagtgcttttcctgccggtctgcagctgagcgggataagtggatggagaacctccggcgagcggtgcatcccaacaaggacaacagccggcgtgtggagcacatcctgaagctgtgggtgatcgaggccaaggacctgccagccaagaagaagtacctgtgcgagctgtgcctggacgatgtgctctatgcccgcaccacgggcaagctcaagacggacaatgttttctggggcgagcacttcgagttccacaacttgccgcctctgcgcacggtcactgtccacctgtaccgggagaccgacaagaagaagaagaaggagcgcaacagttacctgggcctggtgagcctacctgctgcctcggtggccgggcggcagttcgtggagaagtggtacccggtggtgacgcccaaccccaagggcggcaagggccctggacccatgatccgcatcaaggcgcgctaccaaaccatcaccatcctgcccatggagatgtacaaagagttcgctgagcacatcaccaaccactacctggggctgtgtgcagccctcgagcccatcctcagtgccaagaccaaggaggagatggcatctgccctggtgcacatcctgcagagcacgggcaaggtgaaggacttcctgacagacctgatgatgtcagaggtggaccgctgcggggacaacgagcacctcatcttccgggagaacacactggccaccaaggccattgaggagtacctcaagctagtgggccagaagtacctgcaggacgccctaggtgagttcatcaaagcgctgtatgagtcagatgagaactgcgaagtggatcccagcaagtgctcggccgctgacctcccagagcaccagggcaacctcaagatgtgctgcgagctggccttctgcaagatcatcaactcctactgtgtcttcccacgggagttgaaagaggtgtttgcctcgtggaggcaggagtgcagcagtcgcggccgcccggacatcagtgagcggctcatcagcgcctccctcttcctgcgcttcctctgcccagccatcatgtcgccctcactcttcaacctgctgcaggagtaccctgatgaccgcactgcccgcaccctcaccctcatcgccaaggtcacccagaacctggccaactttgccaaatttggcagcaaggaggaatacatgtccttcatgaaccagttcctagagcatgagtggaccaacatgcagcgcttcctgctggagatctccaaccccgagaccctctccaatacagccggcttcgagggctacatcgacctgggccgcgagctctccagcctgcactcactgctctgggaggccgtcagccagctggagcagagcatagtatccaaactgggacccctgcctcggatcctgagggacgtccacacagcactgagcaccccaggtagcgggcagctcccagggaccaatgacctggcctccacaccgggctctggcagcagcagcatctcagctgggctgcagaagatggtgattgagaacgatctttccggtctgatagatttcacccggttaccgtctccaacccccgaaaacaaggacttgttttttgtcacaaggtcctccggggtccagccctcacctgcccgcagctcgagttactcggaagccaacgagcctgatcttcagatggccaacggtggcaagagcctctccatggtggacctccaggacgcccgcacgctggatggggaggcaggctccccggcgggccccgacgtcctccccacagatgggcaggccgctgcagctcagctggtggccgggtggccggcccgggcaaccccagtgaacctggcagggctggccacggtgcggcgggcaggccagacaccaaccacaccaggcacctccgagggcgcgccaggccggccccagctgttggcaccgctctccttccagaaccctgtgtaccagatggcggctggcctgccgctgtcaccccgtggccttggcgactcaggctctgagggccacagctccctgagctcacacagcaacagcgaggagttggcggctgctgccaagctgggaagtttcagcactgccgcggaggagctggctcggcggcccggtgagctggcacggcgacagatgtcactgactgaaaaaggcgggcagcccacggtgccacggcagaacagtgctggcccccagaggaggatcgaccagcctccgcccccacccccgccgccacctcctgccccccgcggccggacgccccccaacctgctgagcaccctgcagtacccaagaccctcaagcggaaccctggcgtcggcctcacctgattgggtgggccccagtacccgcctgaggcagcagtcctcttcctccaagggggacagcccagaactgaagccacgggcagtgcacaagcagggcccttcacctgtgagccccaatgccctggaccgcacagccgcttggctcttgaccatgaacgcgcagttgttagaagacgagggcctgggcccagaccccccccacagggataggctaaggagtaaggacgagctcagccaagcagaaaaggacctggcggtgctgcaggacaagctgcgaatctccaccaagaagctggaggagtatgagaccctgttcaagtgccaggaggagacgacgcagaagctggtgctggagtaccaggcacggctggaggagggcgaggagcggctgcggcggcagcaggaggacaaggacatccagatgaagggcatcatcagcaggttgatgtccgtggaggaagaactgaagaaggaccacgcagagatgcaagcggctgtggactccaaacagaagatcattgatgcccaggagaagcgcattgcctcgttggatgccgccaatgcccgcctcatgagtgccctgacccagctgaaagagagtatgcattagaaacaaaagcccgcttgctcgcttgctggaacacaggggccttttaagttgagcgtgcgcactgcatgggaaatagcggccctggaggatgttagacttgctccctctccaagacagcagcagcctgcacctgccccgtgtgtgtggccggcctcctcctcacccttcccggcccccggccaaggacccaggcgctgcatacaggggaggggcgcaccccacagctggggccggttttcctcagctctaggctgttctgtagcttatctgcccctcccccactttcaagacagatgagcaggagcttgggtctctctcggcccctgtctgttcccagcccctgcagattctgagcaaaggccctgggtaagaagggtgggagtggggcctttgccagcagagccagggcagggcgagctgcaggaatcacccctctgcccctgcagctggaatgtgccacagaggccccacctgaagggtggatgtgctggaggggtggcccagagccatactgcgtccaccctgagctcggggacaggtgacagtggctgctctgggaaggggcttttagatgtaacctacaattcagttaggctagagacagatgctggtggaggaagggctgggccaccagggatcacagaccacaggaagatgggaggtggaagcagaggccctgcccccaccccttcctgtctcactcttctgtcttgtccccacccatgcgccttcgtgcctgagaccagggtggccacacaggcagggcctggctccagtctcatcctcccattgcccagtgagccctgctcttctctccccagccccctcccaccgctgcctcgtagagtgacctcggacagagcccccctagcaatacagggaggctcccggggcctggacaggcgggctcggaggctacccgctgtggccggtgccagctgcccttgcagggtgggtgagctctcaggccgagagccttatttacctagtgcaaaaactgtaaaagtgtacagactcttcacagatttttatcttaattgcaagtctgccgattttgtaaatgttcttggtgtttgactgtaatgtaactatctcacctaatggttgtacatatcctttggtcctggtgctgccgagggctggccgggactgctgctctcccaagggttttattttatttctgaatctagagaacagtattgggcaggaggaaaaggcttggtgtctgcggggggtgtcttccctgcctgtggcatttgtgtgttggctttgcagctgctgtctgagtagtggccactggggtgccttcactgggccagtcaacggggggctcctgcccaggccacagagaacctgagttcccgggagctgggccctgcctgcagccagggctggggttgccagaggccctggagggaaggacagtccctgctggggaagaacagccccggggccccctggtcaccgagactcagcctctgctggagaaagccacgccctccctgctagcacagaggcctgactgacttttttgcttaacttccatgttctgggtgatggaaactgccaaacctcctgtcagtgaggactctttccgactgcccagaaagtgggggtggaggaccgaggctacagctccacacgccccggtcccccagagcatctgccccaggtacacctccccctgcgccccgcacgactgcgggagccagactgtccagggaaacagcctctctcttttctacacactcagccacaaagccccccagctcccacaccgcgtcccagctcccctcttttgtaagtatgtgaaaaggaaaaaatgcaaacgttggagtttgggctggagctcctccctccagctgcgacttttaactatgtaataatgtacagaggaagctgttggtgttctaagactctgtgtggctgtgcaatttctgtacatttgcaattagaaatattaaagatttatttagctatttt

SEQ ID NO: 124830 - DNA, 3500 bp, Homo sapiens
  Payload ID: 4510
  Gene Symbol: DAB2IP
  Gene Name: DAB2 interacting protein
  Uniprot ID: Q5VWQ8
  ENST ID: ENST00000309989
  CDS Start-End: 148-3345
tgttcctcttctttcgtgttgtgtcagaagccatgatttccagtcttctcatctggaagatgaaggaaaagatagacccgaccccacagggttctgaggctcaaactgaaagcctggtggtggggcacctgtgacaggtcccatctgatgccgaggctgaaggagtctcgctcccacgagtccctgctcagccccagcagtgcggtggaggcgctggacctcagcatggaggaagaggtggtcatcaagcccgtgcacagcagcatccttggccaggactactgcttcgaggtgacgacgtcatcaggaagcaagtgcttttcctgccggtctgcagctgagcgggataagtggatggagaacctccggcgagcggtgcatcccaacaaggacaacagccggcgtgtggagcacatcctgaagctgtgggtgatcgaggccaaggacctgccagccaagaagaagtacctgtgcgagctgtgcctggacgatgtgctctatgcccgcaccacgggcaagctcaagacggacaatgttttctggggcgagcacttcgagttccacaacttgccgcctctgcgcacggtcactgtccacctgtaccgggagaccgacaagaagaagaagaaggagcgcaacagttacctgggcctggtgagcctacctgctgcctcggtggccgggcggcagttcgtggagaagtggtacccggtggtgacgcccaaccccaagggcggcaagggccctggacccatgatccgcatcaaggcgcgctaccaaaccatcaccatcctgcccatggagatgtacaaagagttcgctgagcacatcaccaaccactacctggggctgtgtgcagccctcgagcccatcctcagtgccaagaccaaggaggagatggcatctgccctggtgcacatcctgcagagcacgggcaaggtgaaggacttcctgacagacctgatgatgtcagaggtggaccgctgcggggacaacgagcacctcatcttccgggagaacacactggccaccaaggccattgaggagtacctcaagctagtgggccagaagtacctgcaggacgccctaggtgagttcatcaaagcgctgtatgagtcagatgagaactgcgaagtggatcccagcaagtgctcggccgctgacctcccagagcaccagggcaacctcaagatgtgctgcgagctggccttctgcaagatcatcaactcctactgtgtcttcccacgggagttgaaagaggtgtttgcctcgtggaggcaggagtgcagcagtcgcggccgcccggacatcagtgagcggctcatcagcgcctccctcttcctgcgcttcctctgcccagccatcatgtcgccctcactcttcaacctgctgcaggagtaccctgatgaccgcactgcccgcaccctcaccctcatcgccaaggtcacccagaacctggccaactttgccaaatttggcagcaaggaggaatacatgtccttcatgaaccagttcctagagcatgagtggaccaacatgcagcgcttcctgctggagatctccaaccccgagaccctctccaatacagccggcttcgagggctacatcgacctgggccgcgagctctccagcctgcactcactgctctgggaggccgtcagccagctggagcagagcatagtatccaaactgggacccctgcctcggatcctgagggacgtccacacagcactgagcaccccaggtagcgggcagctcccagggaccaatgacctggcctccacaccgggctctggcagcagcagcatctcagctgggctgcagaagatggtgattgagaacgatctttccggtctgatagatttcacccggttaccgtctccaacccccgaaaacaaggacttgttttttgtcacaaggtcctccggggtccagccctcacctgcccgcagctcgagttactcggaagccaacgagcctgatcttcagatggccaacggtggcaagagcctctccatggtggacctccaggacgcccgcacgctggatggggaggcaggctccccggcgggccccgacgtcctccccacagatgggcaggccgctgcagctcagctggtggccgggtggccggcccgggcaaccccagtgaacctggcagggctggccacggtgcggcgggcaggccagacaccaaccacaccaggcacctccgagggcgcgccaggccggccccagctgttggcaccgctctccttccagaaccctgtgtaccagatggcggctggcctgccgctgtcaccccgtggccttggcgactcaggctctgagggccacagctccctgagctcacacagcaacagcgaggagttggcggctgctgccaagctgggaagtttcagcactgccgcggaggagctggctcggcggcccggtgagctggcacggcgacagatgtcactgactgaaaaaggcgggcagcccacggtgccacggcagaacagtgctggcccccagaggaggatcgaccagcctccgcccccacccccgccgccacctcctgccccccgcggccggacgccccccaacctgctgagcaccctgcagtacccaagaccctcaagcggaaccctggcgtcggcctcacctgattgggtgggccccagtacccgcctgaggcagcagtcctcttcctccaagggggacagcccagaactgaagccacgggcagtgcacaagcagggcccttcacctgtgagccccaatgccctggaccgcacagccgcttggctcttgaccatgaacgcgcagttgttagaagacgagggcctgggcccagaccccccccacagggataggctaaggagtaaggacgagctcagccaagcagaaaaggacctggcggtgctgcaggacaagctgcgaatctccaccaagaagctggaggagtatgagaccctgttcaagtgccaggaggagacgacgcagaagctggtgctggagtaccaggcacggctggaggagggcgaggagcggctgcggcggcagcaggaggacaaggacatccagatgaagggcatcatcagcaggttgatgtccgtggaggaagaactgaagaaggaccacgcagagatgcaagcggctgtggactccaaacagaagatcattgatgcccaggagaagcgcattgcctcgttggatgccgccaatgcccgcctcatgagtgccctgacccagctgaaagagaggtacagcatgcaagcccgtaacggcatctcccccaccaaccccaccaaattgcagattactgagaacggcgagttcagaaacagcagcaattgttaacctgcctgaggagggaggaagctacccaaggagagggggactatggtggccaagggcagggtctcggcctggggaggcacccacggttgcagccccagcgcgggtgtcaggaggccgagcctcccctccctgccgctgtccaggaggcggccgca

SEQ ID NO: 124831 - DNA, 5193 bp, Homo sapiens
  Payload ID: 4510
  Gene Symbol: DAB2IP
  Gene Name: DAB2 interacting protein
  ENST ID: ENST00000373782
  CDS Start-End: 1-3210
agccagcccaagctggaccgcaaccacagcttccgccacatcctgccggggttccggagcgccgccgccgccgccgcggacaatgagaggtcccatctgatgccgaggctgaaggagtctcgctcccacgagtccctgctcagccccagcagtgcggtggaggcgctggacctcagcatggaggaagaggtggtcatcaagcccgtgcacagcagcatccttggccaggactactgcttcgaggtgacgacgtcatcaggaagcaagtgcttttcctgccggtctgcagctgagcgggataagtggatggagaacctccggcgagcggtgcatcccaacaaggacaacagccggcgtgtggagcacatcctgaagctgtgggtgatcgaggccaaggacctgccagccaagaagaagtacctgtgcgagctgtgcctggacgatgtgctctatgcccgcaccacgggcaagctcaagacggacaatgttttctggggcgagcacttcgagttccacaacttgccgcctctgcgcacggtcactgtccacctgtaccgggagaccgacaagaagaagaagaaggagcgcaacagttacctgggcctggtgagcctacctgctgcctcggtggccgggcggcagttcgtggagaagtggtacccggtggtgacgcccaaccccaagggcggcaagggccctggacccatgatccgcatcaaggcgcgctaccaaaccatcaccatcctgcccatggagatgtacaaagagttcgctgagcacatcaccaaccactacctggggctgtgtgcagccctcgagcccatcctcagtgccaagaccaaggaggagatggcatctgccctggtgcacatcctgcagagcacgggcaaggtgaaggacttcctgacagacctgatgatgtcagaggtggaccgctgcggggacaacgagcacctcatcttccgggagaacacactggccaccaaggccattgaggagtacctcaagctagtgggccagaagtacctgcaggacgccctaggtgagttcatcaaagcgctgtatgagtcagatgagaactgcgaagtggatcccagcaagtgctcggccgctgacctcccagagcaccagggcaacctcaagatgtgctgcgagctggccttctgcaagatcatcaactcctactgtgtcttcccacgggagttgaaagaggtgtttgcctcgtggaggcaggagtgcagcagtcgcggccgcccggacatcagtgagcggctcatcagcgcctccctcttcctgcgcttcctctgcccagccatcatgtcgccctcactcttcaacctgctgcaggagtaccctgatgaccgcactgcccgcaccctcaccctcatcgccaaggtcacccagaacctggccaactttgccaaatttggcagcaaggaggaatacatgtccttcatgaaccagttcctagagcatgagtggaccaacatgcagcgcttcctgctggagatctccaaccccgagaccctctccaatacagccggcttcgagggctacatcgacctgggccgcgagctctccagcctgcactcactgctctgggaggccgtcagccagctggagcagagcatagtatccaaactgggacccctgcctcggatcctgagggacgtccacacagcactgagcaccccaggtagcgggcagctcccagggaccaatgacctggcctccacaccgggctctggcagcagcagcatctcagctgggctgcagaagatggtgattgagaacgatctttccggtctgatagatttcacccggttaccgtctccaacccccgaaaacaaggacttgttttttgtcacaaggtcctccggggtccagccctcacctgcccgcagctcgagttactcggaagccaacgagcctgatcttcagatggccaacggtggcaagagcctctccatggtggacctccaggacgcccgcacgctggatggggaggcaggctccccggcgggccccgacgtcctccccacagatgggcaggccgctgcagctcagctggtggccgggtggccggcccgggcaaccccagtgaacctggcagggctggccacggtgcggcgggcaggccagacaccaaccacaccaggcacctccgagggcgcgccaggccggccccagctgttggcaccgctctccttccagaaccctgtgtaccagatggcggctggcctgccgctgtcaccccgtggccttggcgactcaggctctgagggccacagctccctgagctcacacagcaacagcgaggagttggcggctgctgccaagctgggaagtttcagcactgccgcggaggagctggctcggcggcccggtgagctggcacggcgacagatgtcactgactgaaaaaggcgggcagcccacggtgccacggcagaacagtgctggcccccagaggaggatcgaccagcctccgcccccacccccgccgccacctcctgccccccgcggccggacgccccccaacctgctgagcaccctgcagtacccaagaccctcaagcggaaccctggcgtcggcctcacctgattgggtgggccccagtacccgcctgaggcagcagtcctcttcctccaagggggacagcccagaactgaagccacgggcagtgcacaagcagggcccttcacctgtgagccccaatgccctggaccgcacagccgcttggctcttgaccatgaacgcgcagttgttagaagacgagggcctgggcccagaccccccccacagggataggctaaggagtaaggacgagctcagccaagcagaaaaggacctggcggtgctgcaggacaagctgcgaatctccaccaagaagctggaggagtatgagaccctgttcaagtgccaggaggagacgacgcagaagctggtgctggagtaccaggcacggctggaggagggcgaggagcggctgcggcggcagcaggaggacaaggacatccagatgaagggcatcatcagcaggttgatgtccgtggaggaagaactgaagaaggaccacgcagagatgcaagcggctgtggactccaaacagaagatcattgatgcccaggagaagcgcattgcctcgttggatgccgccaatgcccgcctcatgagtgccctgacccagctgaaagagagtatgcattagaaacaaaagcccgcttgctcgcttgctggaacacaggggccttttaagttgagcgtgcgcactgcatgggaaatagcggccctggaggatgttagacttgctccctctccaagacagcagcagcctgcacctgccccgtgtgtgtggccggcctcctcctcacccttcccggcccccggccaaggacccaggcgctgcatacaggggaggggcgcaccccacagctggggccggttttcctcagctctaggctgttctgtagcttatctgcccctcccccactttcaagacagatgagcaggagcttgggtctctctcggcccctgtctgttcccagcccctgcagattctgagcaaaggccctgggtaagaagggtgggagtggggcctttgccagcagagccagggcagggcgagctgcaggaatcacccctctgcccctgcagctggaatgtgccacagaggccccacctgaagggtggatgtgctggaggggtggcccagagccatactgcgtccaccctgagctcggggacaggtgacagtggctgctctgggaaggggcttttagatgtaacctacaattcagttaggctagagacagatgctggtggaggaagggctgggccaccagggatcacagaccacaggaagatgggaggtggaagcagaggccctgcccccaccccttcctgtctcactcttctgtcttgtccccacccatgcgccttcgtgcctgagaccagggtggccacacaggcagggcctggctccagtctcatcctcccattgcccagtgagccctgctcttctctccccagccccctcccaccgctgcctcgtagagtgacctcggacagagcccccctagcaatacagggaggctcccggggcctggacaggcgggctcggaggctacccgctgtggccggtgccagctgcccttgcagggtgggtgagctctcaggccgagagccttatttacctagtgcaaaaactgtaaaagtgtacagactcttcacagatttttatcttaattgcaagtctgccgattttgtaaatgttcttggtgtttgactgtaatgtaactatctcacctaatggttgtacatatcctttggtcctggtgctgccgagggctggccgggactgctgctctcccaagggttttattttatttctgaatctagagaacagtattgggcaggaggaaaaggcttggtgtctgcggggggtgtcttccctgcctgtggcatttgtgtgttggctttgcagctgctgtctgagtagtggccactggggtgccttcactgggccagtcaacggggggctcctgcccaggccacagagaacctgagttcccgggagctgggccctgcctgcagccagggctggggttgccagaggccctggagggaaggacagtccctgctggggaagaacagccccggggccccctggtcaccgagactcagcctctgctggagaaagccacgccctccctgctagcacagaggcctgactgacttttttgcttaacttccatgttctgggtgatggaaactgccaaacctcctgtcagtgaggactctttccgactgcccagaaagtgggggtggaggaccgaggctacagctccacacgccccggtcccccagagcatctgccccaggtacacctccccctgcgccccgcacgactgcgggagccagactgtccagggaaacagcctctctcttttctacacactcagccacaaagccccccagctcccacaccgcgtcccagctcccctcttttgtaagtatgtgaaaaggaaaaaatgcaaacgttggagtttgggctggagctcctccctccagctgcgacttttaactatgtaataatgtacagaggaagctgttggtgttctaagactctgtgtggctgtgcaatttctgtacatttgcaattagaaatattaaagatttatttagctatttt

SEQ ID NO: 124832 - DNA, 1006 bp, Homo sapiens
  Payload ID: 4510
  Gene Symbol: DAB2IP
  Gene Name: DAB2 interacting protein
  ENST ID: ENST00000394340
  CDS Start-End: 133-1006
tgcttgcaggaatacccagtcatctagttggaaaagccgccagatggaatacaaaaggaggaacccagacgctcatggagacagcctcggttcataaatcaggtggggccaggggctgggggcccacacgccatggagcccgactcccttctggaccaagacgactcctacgagtcgcctcaagaaaggccgggctctcggcgcagcctgcctggcagcctttccgagaagagccccagcatggagccctcggccgccacgccgttccgggtcacgggcttcctcagccgccgcctcaagggctccatcaagcgcaccaagagccagcccaagctggaccgcaaccacagcttccgccacatcctgccggggttccggagcgccgccgccgccgccgcggacaatgagaggtcccatctgatgccgaggctgaaggagtctcgctcccacgagtccctgctcagccccagcagtgcggtggaggcgctggacctcagcatggaggaagaggtggtcatcaagcccgtgcacagcagcatccttggccaggactactgcttcgaggtgacgacgtcatcaggaagcaagtgcttttcctgccggtctgcagctgagcgggataagtggatggagaacctccggcgagcggtgcatcccaacaaggacaacagccggcgtgtggagcacatcctgaagctgtgggtgatcgaggccaaggacctgccagccaagaagaagtacctgtgcgagctgtgcctggacgatgtgctctatgcccgcaccacgggcaagctcaagacggacaatgttttctggggcgagcacttcgagttccacaacttgccgcctctgcgcacggtcactgtccacctgtaccgggagaccgacaagaagaagaagaaggagcgcaacagttacctgggcctggtgagcctacctgctgcctcggtggccgggcggcagttcgtggagaagtggtacccggtggtgacgcccaaccccaagg

SEQ ID NO: 124833 - DNA, 6784 bp, Homo sapiens
  Payload ID: 4510
  Gene Symbol: DAB2IP
  Gene Name: DAB2 interacting protein
  Uniprot ID: Q5VWQ8
  ENST ID: ENST00000408936
  CDS Start-End: 183-3752
gggagcgggagggggcaggaggcggaggaggagtttgagcgactttgtggggcagccagggcctcggcggccgctcgggcgagcgcgggagaacgcgtgggcgcccgccgggctgtccggagcggccgatggggcccgtgtgagcgcgcccaggcccggcccggtgcccggcgggcggcagcatgtccgcgggcggcagcgccaggaagagcaccgggaggtcctcctactactaccggctgctgaggcggccccggctgcagcgacagaggagccgctcccgcagccggacccggcctgccagggagtcgcctcaagaaaggccgggctctcggcgcagcctgcctggcagcctttccgagaagagccccagcatggagccctcggccgccacgccgttccgggtcacgggcttcctcagccgccgcctcaagggctccatcaagcgcaccaagagccagcccaagctggaccgcaaccacagcttccgccacatcctgccggggttccggagcgccgccgccgccgccgcggacaatgagaggtcccatctgatgccgaggctgaaggagtctcgctcccacgagtccctgctcagccccagcagtgcggtggaggcgctggacctcagcatggaggaagaggtggtcatcaagcccgtgcacagcagcatccttggccaggactactgcttcgaggtgacgacgtcatcaggaagcaagtgcttttcctgccggtctgcagctgagcgggataagtggatggagaacctccggcgagcggtgcatcccaacaaggacaacagccggcgtgtggagcacatcctgaagctgtgggtgatcgaggccaaggacctgccagccaagaagaagtacctgtgcgagctgtgcctggacgatgtgctctatgcccgcaccacgggcaagctcaagacggacaatgttttctggggcgagcacttcgagttccacaacttgccgcctctgcgcacggtcactgtccacctgtaccgggagaccgacaagaagaagaagaaggagcgcaacagttacctgggcctggtgagcctacctgctgcctcggtggccgggcggcagttcgtggagaagtggtacccggtggtgacgcccaaccccaagggcggcaagggccctggacccatgatccgcatcaaggcgcgctaccaaaccatcaccatcctgcccatggagatgtacaaagagttcgctgagcacatcaccaaccactacctggggctgtgtgcagccctcgagcccatcctcagtgccaagaccaaggaggagatggcatctgccctggtgcacatcctgcagagcacgggcaaggtgaaggacttcctgacagacctgatgatgtcagaggtggaccgctgcggggacaacgagcacctcatcttccgggagaacacactggccaccaaggccattgaggagtacctcaagctagtgggccagaagtacctgcaggacgccctaggtgagttcatcaaagcgctgtatgagtcagatgagaactgcgaagtggatcccagcaagtgctcggccgctgacctcccagagcaccagggcaacctcaagatgtgctgcgagctggccttctgcaagatcatcaactcctactgtgtcttcccacgggagttgaaagaggtgtttgcctcgtggaggcaggagtgcagcagtcgcggccgcccggacatcagtgagcggctcatcagcgcctccctcttcctgcgcttcctctgcccagccatcatgtcgccctcactcttcaacctgctgcaggagtaccctgatgaccgcactgcccgcaccctcaccctcatcgccaaggtcacccagaacctggccaactttgccaaatttggcagcaaggaggaatacatgtccttcatgaaccagttcctagagcatgagtggaccaacatgcagcgcttcctgctggagatctccaaccccgagaccctctccaatacagccggcttcgagggctacatcgacctgggccgcgagctctccagcctgcactcactgctctgggaggccgtcagccagctggagcagagcatagtatccaaactgggacccctgcctcggatcctgagggacgtccacacagcactgagcaccccaggtagcgggcagctcccagggaccaatgacctggcctccacaccgggctctggcagcagcagcatctcagctgggctgcagaagatggtgattgagaacgatctttccggtctgatagatttcacccggttaccgtctccaacccccgaaaacaaggacttgttttttgtcacaaggtcctccggggtccagccctcacctgcccgcagctcgagttactcggaagccaacgagcctgatcttcagatggccaacggtggcaagagcctctccatggtggacctccaggacgcccgcacgctggatggggaggcaggctccccggcgggccccgacgtcctccccacagatgggcaggccgctgcagctcagctggtggccgggtggccggcccgggcaaccccagtgaacctggcagggctggccacggtgcggcgggcaggccagacaccaaccacaccaggcacctccgagggcgcgccaggccggccccagctgttggcaccgctctccttccagaaccctgtgtaccagatggcggctggcctgccgctgtcaccccgtggccttggcgactcaggctctgagggccacagctccctgagctcacacagcaacagcgaggagttggcggctgctgccaagctgggaagtttcagcactgccgcggaggagctggctcggcggcccggtgagctggcacggcgacagatgtcactgactgaaaaaggcgggcagcccacggtgccacggcagaacagtgctggcccccagaggaggatcgaccagcctccgcccccacccccgccgccacctcctgccccccgcggccggacgccccccaacctgctgagcaccctgcagtacccaagaccctcaagcggaaccctggcgtcggcctcacctgattgggtgggccccagtacccgcctgaggcagcagtcctcttcctccaagggggacagcccagaactgaagccacgggcagtgcacaagcagggcccttcacctgtgagccccaatgccctggaccgcacagccgcttggctcttgaccatgaacgcgcagttgttagaagacgagggcctgggcccagaccccccccacagggataggctaaggagtaaggacgagctcagccaagcagaaaaggacctggcggtgctgcaggacaagctgcgaatctccaccaagaagctggaggagtatgagaccctgttcaagtgccaggaggagacgacgcagaagctggtgctggagtaccaggcacggctggaggagggcgaggagcggctgcggcggcagcaggaggacaaggacatccagatgaagggcatcatcagcaggttgatgtccgtggaggaagaactgaagaaggaccacgcagagatgcaagcggctgtggactccaaacagaagatcattgatgcccaggagaagcgcattgcctcgttggatgccgccaatgcccgcctcatgagtgccctgacccagctgaaagagaggtacagcatgcaagcccgtaacggcatctcccccaccaaccccaccaaattgcagattactgagaacggcgagttcagaaacagcagcaattgttaacctgcctgaggagggaggaagctacccaaggagagggggactatggtggccaagggcagggtctcggcctggggaggcacccacggttgcagccccagcgcgggtgtcaggaggccgagcctcccctccctgccgctgtccaggaggcggccgcagagggagccaccagagactgaagcagcgtgaggcgaggtcaccagccgctccctgtggggtgcgggcagaagagactgcacgctggggagtggggacagcctgatggggcagggggcctgccaaaaatatgtctgttggttcctgaatgtggtgtgtccttgtcctcctggatctggccgagtgcatgtgtccccccacacctgtgccagggagggggcttcctggaggggggattcaagggctaggggcctacacctgtggcttcccctcgcctccttggggggcccgggactccctggcagccaggccctgtcatgtgggacctggcacttggcagatcagttggcaggcaggaagataggaggacacagagcaggaggtcagtgtcccctgcctgtctccatccgaagcacctgccactgcatgcagcctgttgggaccttcctggctgtgaggaactgaggattcctacccacccaccccctctgaacctgtccccagagcaccacctgctaccttcttccctgccttagttgtattgccagatagacccagtgagggccatggctttttcttgtgagctcttgtccctgtggggaggacccacagcttcccacacctcccacacaggcccaggctgatgctctagggctcccagaagccagagatctgggcggatctggccagatggctctgagcactgtatctgccttctcctggggcccagcacacccagggcacagtggtcctgtagggagtgccacctggtgctcaccctgaaagaaaaggtgatccttcctctgagtgatggtttaaaaaaagattctaacgcctgcaggccctgagaaggtggataactgtgattttttttcctttcacagtatgcattagaaacaaaagcccgcttgctcgcttgctggaacacaggggccttttaagttgagcgtgcgcactgcatgggaaatagcggccctggaggatgttagacttgctccctctccaagacagcagcagcctgcacctgccccgtgtgtgtggccggcctcctcctcacccttcccggcccccggccaaggacccaggcgctgcatacaggggaggggcgcaccccacagctggggccggttttcctcagctctaggctgttctgtagcttatctgcccctcccccactttcaagacagatgagcaggagcttgggtctctctcggcccctgtctgttcccagcccctgcagattctgagcaaaggccctgggtaagaagggtgggagtggggcctttgccagcagagccagggcagggcgagctgcaggaatcacccctctgcccctgcagctggaatgtgccacagaggccccacctgaagggtggatgtgctggaggggtggcccagagccatactgcgtccaccctgagctcggggacaggtgacagtggctgctctgggaaggggcttttagatgtaacctacaattcagttaggctagagacagatgctggtggaggaagggctgggccaccagggatcacagaccacaggaagatgggaggtggaagcagaggccctgcccccaccccttcctgtctcactcttctgtcttgtccccacccatgcgccttcgtgcctgagaccagggtggccacacaggcagggcctggctccagtctcatcctcccattgcccagtgagccctgctcttctctccccagccccctcccaccgctgcctcgtagagtgacctcggacagagcccccctagcaatacagggaggctcccggggcctggacaggcgggctcggaggctacccgctgtggccggtgccagctgcccttgcagggtgggtgagctctcaggccgagagccttatttacctagtgcaaaaactgtaaaagtgtacagactcttcacagatttttatcttaattgcaagtctgccgattttgtaaatgttcttggtgtttgactgtaatgtaactatctcacctaatggttgtacatatcctttggtcctggtgctgccgagggctggccgggactgctgctctcccaagggttttattttatttctgaatctagagaacagtattgggcaggaggaaaaggcttggtgtctgcggggggtgtcttccctgcctgtggcatttgtgtgttggctttgcagctgctgtctgagtagtggccactggggtgccttcactgggccagtcaacggggggctcctgcccaggccacagagaacctgagttcccgggagctgggccctgcctgcagccagggctggggttgccagaggccctggagggaaggacagtccctgctggggaagaacagccccggggccccctggtcaccgagactcagcctctgctggagaaagccacgccctccctgctagcacagaggcctgactgacttttttgcttaacttccatgttctgggtgatggaaactgccaaacctcctgtcagtgaggactctttccgactgcccagaaagtgggggtggaggaccgaggctacagctccacacgccccggtcccccagagcatctgccccaggtacacctccccctgcgccccgcacgactgcgggagccagactgtccagggaaacagcctctctcttttctacacactcagccacaaagccccccagctcccacaccgcgtcccagctcccctcttttgtaagtatgtgaaaaggaaaaaatgcaaacgttggagtttgggctggagctcctccctccagctgcgacttttaactatgtaataatgtacagaggaagctgttggtgttctaagactctgtgtggctgtgcaatttctgtacatttgcaattagaaatattaaagatttatttagctattttaa

SEQ ID NO: 124834 - DNA, 928 bp, Homo sapiens
  Payload ID: 4510
  Gene Symbol: DAB2IP
  Gene Name: DAB2 interacting protein
  ENST ID: ENST00000436835
  CDS Start-End: 242-928
ggaatacaaaaggaggaacccagacgctcatggagacagcctcggttcataaatcaggtggggccaggggctgggggcccacacgccatggagcccgactcccttctggaccaagacgactcctacgagtcgcctcaagaaaggccgggctctcggcgcagcctgcctggcagcctttccgagaagagccccagcatggagccctcggccgccacgccgttccgggtcacggtcccatctgatgccgaggctgaaggagtctcgctcccacgagtccctgctcagccccagcagtgcggtggaggcgctggacctcagcatggaggaagaggtggtcatcaagcccgtgcacagcagcatccttggccaggactactgcttcgaggtgacgacgtcatcaggaagcaagtgcttttcctgccggtctgcagctgagcgggataagtggatggagaacctccggcgagcggtgcatcccaacaaggacaacagccggcgtgtggagcacatcctgaagctgtgggtgatcgaggccaaggacctgccagccaagaagaagtacctgtgcgagctgtgcctggacgatgtgctctatgcccgcaccacgggcaagctcaagacggacaatgttttctggggcgagcacttcgagttccacaacttgccgcctctgcgcacggtcactgtccacctgtaccgggagaccgacaagaagaagaagaaggagcgcaacagttacctgggcctggtgagcctacctgctgcctcggtggccgggcggcagttcgtggagaagtggtacccggtggtgacgcccaaccccaagggcggcaagggccctggacccatgatccgcatcaaggcgcgctaccaaaccatcaccatcctgcccatggagatgtacaaagagttcgctgagcacatcacc

SEQ ID NO: 124835 - DNA, 4627 bp, Homo sapiens
  Payload ID: 4511
  Gene Symbol: DACH1
  Gene Name: dachshund family transcription factor 1
  ENST ID: ENST00000620444
  CDS Start-End: 424-1938
atctttgatcaatgtacttgccagggagagcccaagtccttcaaacctcctccttttcaccttcatccttaactttgtgctagagcgagacccacacaacaacagccgaccctccccgccccacccccacccccaaaccagccctcgatcccagcccccggagaggactcgcatttcgacttgcgggacacttttgtgcgttcctctccagagcgcctctcgtgctcgcccctcttgcgctcgctctttattaccttcacctccttttctcccccttctctccctttctccttctcgttctctcccggagttgttgttgcccccctcgctccttctccccccttttttccccttcccctcccgggggtgtgtggcaacttttcctctcgcttctcctccgtctgtttccccttatatgtgaccatggcagtgccggcggctttgatccctccgacccagctggtcccccctcaacccccaatctccacgtctgcttcctcctctggcaccaccacctccacctcttcggcgacttcgtctccggctccttccatcggacccccggcgtcctctgggccaactctgttccgcccggagcccatcgcttcggcggcggcggcggcggccacagtcacctctaccggcggcggcggcggcggcggcggcagcggaggcggcggcggcagcagcggcaacggaggcggcggtggcggcggcggcggtggcagcaactgcaaccccaacctggcggccgcgagcaacggcagcggcggcggcggcggcggcatcagcgctggcggcggcgtcgcttccagcacccccatcaacgccagcaccggcagcagcagcagcagcagtagcagcagcagcagcagcagcagtagtagcagcagcagcagtagcagcagcagctgcggccccctccccgggaaacccgtgtactcaaccccgtccccagtggaaaacacccctcagaataatgagtgcaaaatggtggatctgaggggggccaaagtggcttccttcacggtggagggctgcgagctgatctgcctgccccaggctttcgacctgttcctgaagcacttggtggggggcttgcatacggtctacaccaagctgaagcggctggagatcacgccggtggtgtgcaatgtggaacaagttcgcatcctgaggggactgggcgccatccagccaggagtgaaccgctgcaaactcatctccaggaaggacttcgagaccctctacaatgactgcaccaacgcaagttctagacctggaaggcctcctaagaggactcaaagtgtcacctccccagagaactctcacatcatgccgcattctgtccctggtctcatgtctcctgggataattccaccaacagatgagaccccgctttctacaccaaccgcaagagacagccttgacaaactctctctaactgggcatggacaaccactgcctccaggttttccatctccttttctgtttcctgatggactgtcttccatcgagactcttctgactaacatacaggggctgttgaaagttgccatagataatgccagagctcaagagaaacaggtccaactggaaaaaactgagctgaagatggattttttaagggaaagagaactaagggaaacacttgagaagcagttggctatggaacaaaagaatagagccatagttcaaaagaggctaaagaaggagaagaaggcaaagagaaaattgcaggaagcacttgagtttgagacgaaacggcgtgaacaagcagaacagacgctaaaacaggcagcttcaacagatagtctcagggtcttaaatgactctctgaccccagagatagaggctgaccgcagtggcggcagaacagatgctgaaaggacaatacaagatggaagactgtatttgaaaactactgtcatgtactgaatctttcctgttgaagaaatccatgttatagaaaagaactttgcagtcagacattcgtcatgggaaagttcagaaaaaaataaagtccttttaagggaacttcctgaattttgtgtattaatgttctttaaaagtttaagtattctacaaaaaaaaaaaaagttttctccattgattttcacctgtggttcataccagagacctgagaatgtttgtaaatgtacaagtatcaaagttcttacagttaattactgcaacttgctgctggacaattgtatacagagttaaaggcaggtctgaataagacctagctttgtttttttctaatggaatgaaccattttcctcttctgaaaattctgtatctgagcacatcaagagactcttgtagcagtggttacccagacttacagaattatgtcctccagaaaccagcaagaacacttggaatgaacgaatgaacttgtagggggcatagaggattcttgaaaaaaaaaaatgcaagagtgattttctgttacattcaatttcaaactctctaattgtgggttttctcctgaagaattttttttcacatactttccaaaagaccaacaaatggatgttgacaacaacccaatgaaataacattttgcatatctgaaaagaagcattgaatataagccaaaagctttcactgaaggtttttttttcttaaaaataaaaaaaaatatataagtgtaacatgttttcattccaaactggtagtggtatgtagaattaaagataataatgttgcttcttattcaaactgttggtcatatgtacagtatataaacataaaacacacaaggaaggtattatgtatgcagtagtatactagagtttaggaaaatgaaaattttagaaaatatgttttgtcaccctgttggtcagaaagatgtctttctggttttaacgcatgcaggcatgtaaatatttgtctggagtcacagtattaatgaatgagatcttaagcatctggtgacatcagaactctgtgtcagccacttttatttgtatattgaaccctagctagtgccccaagctgcactattgggaatggattgtggctgaacagcaaatcaaaacaccagaaatatttttatatgttaacgtcatattatgttaatgttgctgaaaacaaaacctaacaaaccttgatgtaccagtccaataccatgtagcgctgagtgataaagttaaaatgtgctgtgcttcccacccttgtcagagggaagggtggctatgtgttattttcactgtctttttgaaagttacagtatgtgttttcactttcgtgcagataactggaagtaaagcggcaaacagtgcttattacatgctaaagttaccttctctttgttttttgcatatctggaattacacctttaaagactgatatgaatcagtacggtcactatacattttatgatttttctgtcatcttaaaattgtatgatcgtaacattatttattaccacaaaacagcaaaatcttcaatgtctaagaaaactagcttaaaatgtttaaatatagttctgattgggtattaattacttgattaagaaaaaattaacattatagatactctggcattacgcttctataccttttaggtcttccttgcaatactggaacataattcttttgtgtagctcactattagccagctaagttcatctttttaataccataaaaaggttatatgtacagttcctattttagcttgcttacaaagggagcattatttttatttaaagtattgctagtaaatgatttgtagaaacttggttttctaagcatagttcttccataaccaccttttgttgtttgagcacaagggattcttttcctagttctatgtgtttgtttccctatatgcagtctttaaaggattacaacacttaaaattgaatggacttgtgtcaagctttttgcatcatacattttttgaaagatttttaaaaaagcctacaacttacatatgtagtagaatcagccattgctctgctcctggcatagagtcacctgtttgttatgtggattaaatagttttaaaatacatatttgaagacctttgagaatgctttagtgtttgatttgaaataaaaggaaattttagcaaggattaaagaaaaaagctatcagctgtatgttaagagagactcttactaacatgttgtaaatattacaattcatgaaatgttattgtaagtctgtaacttaattttttccctgttttagttatacaggttggtttggaaatttgtgttttggcataaacaagtaaaatgtgcccattttatggtttccatgcttttgtaatcctaaaaatattaatgtctagttgttctatattataaccacatttgcgctctatgcaagcccttggaacagaacatactcatcttcatgtaggacctatgaaaattgtctatttttatctatatatttaaagttttctaaaaatgataaaaggttattacgaattttgttgtacaaaatctgtacaaaaatctgtttttacatcataatgcaagaattggaaatttttctatggtagcctagttatttgagcctggtttcaatgtgagaaccacgtttactgttattgtatttaattttcttttccttttcaacaatctcctaataaaactgtctgaaatctc

SEQ ID NO: 124836 - DNA, 5233 bp, Homo sapiens
  Payload ID: 4511
  Gene Symbol: DACH1
  Gene Name: dachshund family transcription factor 1
  Uniprot ID: Q9UI36
  ENST ID: ENST00000613252
  CDS Start-End: 424-2544
atctttgatcaatgtacttgccagggagagcccaagtccttcaaacctcctccttttcaccttcatccttaactttgtgctagagcgagacccacacaacaacagccgaccctccccgccccacccccacccccaaaccagccctcgatcccagcccccggagaggactcgcatttcgacttgcgggacacttttgtgcgttcctctccagagcgcctctcgtgctcgcccctcttgcgctcgctctttattaccttcacctccttttctcccccttctctccctttctccttctcgttctctcccggagttgttgttgcccccctcgctccttctccccccttttttccccttcccctcccgggggtgtgtggcaacttttcctctcgcttctcctccgtctgtttccccttatatgtgaccatggcagtgccggcggctttgatccctccgacccagctggtcccccctcaacccccaatctccacgtctgcttcctcctctggcaccaccacctccacctcttcggcgacttcgtctccggctccttccatcggacccccggcgtcctctgggccaactctgttccgcccggagcccatcgcttcggcggcggcggcggcggccacagtcacctctaccggcggcggcggcggcggcggcggcagcggaggcggcggcggcagcagcggcaacggaggcggcggtggcggcggcggcggtggcagcaactgcaaccccaacctggcggccgcgagcaacggcagcggcggcggcggcggcggcatcagcgctggcggcggcgtcgcttccagcacccccatcaacgccagcaccggcagcagcagcagcagcagtagcagcagcagcagcagcagcagtagtagcagcagcagcagtagcagcagcagctgcggccccctccccgggaaacccgtgtactcaaccccgtccccagtggaaaacacccctcagaataatgagtgcaaaatggtggatctgaggggggccaaagtggcttccttcacggtggagggctgcgagctgatctgcctgccccaggctttcgacctgttcctgaagcacttggtggggggcttgcatacggtctacaccaagctgaagcggctggagatcacgccggtggtgtgcaatgtggaacaagttcgcatcctgaggggactgggcgccatccagccaggagtgaaccgctgcaaactcatctccaggaaggacttcgagaccctctacaatgactgcaccaacgcaagttctagacctggaaggcctcctaagaggactcaaagtgtcacctccccagagaactctcacatcatgccgcattctgtccctggtctcatgtctcctgggataattccaccaacaggtctgacagcagccgctgcagcagctgctgctgctaccaatgcagctattgctgaagcaatgaaggtgaaaaaaatcaaattagaagccatgagcaactatcatgccagtaataaccaacatggagcagactctgaaaacggggacatgaattcaagtgtcggactggaacttccttttatgatgatgccccaccctctaattcctgtcagcctacctccagcatctgtcaccatggcaatgagccagatgaaccacctcagcaccattgcaaatatggcagcagcagcacaagttcagagtcccccatccagagttgagacatcagttattaaggagcgtgttcctgatagcccctcacctgccccctctctggaggaggggagaaggcctggcagtcacccatcatcacatcgcagcagcagcgtgtccagctcccctgctcggactgagagctcttctgacagaatcccggtccatcagaatgggttgtccatgaaccagatgctgatgggcttatcaccaaatgtacttcctgggcccaaagagggagatttggccggtcatgacatgggacatgagtcaaaaaggatgcatattgaaaaagatgagaccccgctttctacaccaaccgcaagagacagccttgacaaactctctctaactgggcatggacaaccactgcctccaggttttccatctccttttctgtttcctgatggactgtcttccatcgagactcttctgactaacatacaggggctgttgaaagttgccatagataatgccagagctcaagagaaacaggtccaactggaaaaaactgagctgaagatggattttttaagggaaagagaactaagggaaacacttgagaagcagttggctatggaacaaaagaatagagccatagttcaaaagaggctaaagaaggagaagaaggcaaagagaaaattgcaggaagcacttgagtttgagacgaaacggcgtgaacaagcagaacagacgctaaaacaggcagcttcaacagatagtctcagggtcttaaatgactctctgaccccagagatagaggctgaccgcagtggcggcagaacagatgctgaaaggacaatacaagatggaagactgtatttgaaaactactgtcatgtactgaatctttcctgttgaagaaatccatgttatagaaaagaactttgcagtcagacattcgtcatgggaaagttcagaaaaaaataaagtccttttaagggaacttcctgaattttgtgtattaatgttctttaaaagtttaagtattctacaaaaaaaaaaaaagttttctccattgattttcacctgtggttcataccagagacctgagaatgtttgtaaatgtacaagtatcaaagttcttacagttaattactgcaacttgctgctggacaattgtatacagagttaaaggcaggtctgaataagacctagctttgtttttttctaatggaatgaaccattttcctcttctgaaaattctgtatctgagcacatcaagagactcttgtagcagtggttacccagacttacagaattatgtcctccagaaaccagcaagaacacttggaatgaacgaatgaacttgtagggggcatagaggattcttgaaaaaaaaaaatgcaagagtgattttctgttacattcaatttcaaactctctaattgtgggttttctcctgaagaattttttttcacatactttccaaaagaccaacaaatggatgttgacaacaacccaatgaaataacattttgcatatctgaaaagaagcattgaatataagccaaaagctttcactgaaggtttttttttcttaaaaataaaaaaaaatatataagtgtaacatgttttcattccaaactggtagtggtatgtagaattaaagataataatgttgcttcttattcaaactgttggtcatatgtacagtatataaacataaaacacacaaggaaggtattatgtatgcagtagtatactagagtttaggaaaatgaaaattttagaaaatatgttttgtcaccctgttggtcagaaagatgtctttctggttttaacgcatgcaggcatgtaaatatttgtctggagtcacagtattaatgaatgagatcttaagcatctggtgacatcagaactctgtgtcagccacttttatttgtatattgaaccctagctagtgccccaagctgcactattgggaatggattgtggctgaacagcaaatcaaaacaccagaaatatttttatatgttaacgtcatattatgttaatgttgctgaaaacaaaacctaacaaaccttgatgtaccagtccaataccatgtagcgctgagtgataaagttaaaatgtgctgtgcttcccacccttgtcagagggaagggtggctatgtgttattttcactgtctttttgaaagttacagtatgtgttttcactttcgtgcagataactggaagtaaagcggcaaacagtgcttattacatgctaaagttaccttctctttgttttttgcatatctggaattacacctttaaagactgatatgaatcagtacggtcactatacattttatgatttttctgtcatcttaaaattgtatgatcgtaacattatttattaccacaaaacagcaaaatcttcaatgtctaagaaaactagcttaaaatgtttaaatatagttctgattgggtattaattacttgattaagaaaaaattaacattatagatactctggcattacgcttctataccttttaggtcttccttgcaatactggaacataattcttttgtgtagctcactattagccagctaagttcatctttttaataccataaaaaggttatatgtacagttcctattttagcttgcttacaaagggagcattatttttatttaaagtattgctagtaaatgatttgtagaaacttggttttctaagcatagttcttccataaccaccttttgttgtttgagcacaagggattcttttcctagttctatgtgtttgtttccctatatgcagtctttaaaggattacaacacttaaaattgaatggacttgtgtcaagctttttgcatcatacattttttgaaagatttttaaaaaagcctacaacttacatatgtagtagaatcagccattgctctgctcctggcatagagtcacctgtttgttatgtggattaaatagttttaaaatacatatttgaagacctttgagaatgctttagtgtttgatttgaaataaaaggaaattttagcaaggattaaagaaaaaagctatcagctgtatgttaagagagactcttactaacatgttgtaaatattacaattcatgaaatgttattgtaagtctgtaacttaattttttccctgttttagttatacaggttggtttggaaatttgtgttttggcataaacaagtaaaatgtgcccattttatggtttccatgcttttgtaatcctaaaaatattaatgtctagttgttctatattataaccacatttgcgctctatgcaagcccttggaacagaacatactcatcttcatgtaggacctatgaaaattgtctatttttatctatatatttaaagttttctaaaaatgataaaaggttattacgaattttgttgtacaaaatctgtacaaaaatctgtttttacatcataatgcaagaattggaaatttttctatggtagcctagttatttgagcctggtttcaatgtgagaaccacgtttactgttattgtatttaattttcttttccttttcaacaatctcctaataaaactgtctgaaatctc

SEQ ID NO: 124837 - DNA, 4789 bp, Homo sapiens
  Payload ID: 4511
  Gene Symbol: DACH1
  Gene Name: dachshund family transcription factor 1
  ENST ID: ENST00000611519
  CDS Start-End: 424-2100
atctttgatcaatgtacttgccagggagagcccaagtccttcaaacctcctccttttcaccttcatccttaactttgtgctagagcgagacccacacaacaacagccgaccctccccgccccacccccacccccaaaccagccctcgatcccagcccccggagaggactcgcatttcgacttgcgggacacttttgtgcgttcctctccagagcgcctctcgtgctcgcccctcttgcgctcgctctttattaccttcacctccttttctcccccttctctccctttctccttctcgttctctcccggagttgttgttgcccccctcgctccttctccccccttttttccccttcccctcccgggggtgtgtggcaacttttcctctcgcttctcctccgtctgtttccccttatatgtgaccatggcagtgccggcggctttgatccctccgacccagctggtcccccctcaacccccaatctccacgtctgcttcctcctctggcaccaccacctccacctcttcggcgacttcgtctccggctccttccatcggacccccggcgtcctctgggccaactctgttccgcccggagcccatcgcttcggcggcggcggcggcggccacagtcacctctaccggcggcggcggcggcggcggcggcagcggaggcggcggcggcagcagcggcaacggaggcggcggtggcggcggcggcggtggcagcaactgcaaccccaacctggcggccgcgagcaacggcagcggcggcggcggcggcggcatcagcgctggcggcggcgtcgcttccagcacccccatcaacgccagcaccggcagcagcagcagcagcagtagcagcagcagcagcagcagcagtagtagcagcagcagcagtagcagcagcagctgcggccccctccccgggaaacccgtgtactcaaccccgtccccagtggaaaacacccctcagaataatgagtgcaaaatggtggatctgaggggggccaaagtggcttccttcacggtggagggctgcgagctgatctgcctgccccaggctttcgacctgttcctgaagcacttggtggggggcttgcatacggtctacaccaagctgaagcggctggagatcacgccggtggtgtgcaatgtggaacaagttcgcatcctgaggggactgggcgccatccagccaggagtgaaccgctgcaaactcatctccaggaaggacttcgagaccctctacaatgactgcaccaacgcaagttctagacctggaaggcctcctaagaggactcaaagtgtcacctccccagagaactctcacatcatgccgcattctgtccctggtctcatgtctcctgggataattccaccaacaggtctgacagcagccgctgcagcagctgctgctgctaccaatgcagctattgctgaagcaatgaaggtgaaaaaaatcaaattagaagccatgagcaactatcatgccagtaataaccaacatggagcagactctgaaaacggggacatgaattcaagtgtcgatgagaccccgctttctacaccaaccgcaagagacagccttgacaaactctctctaactgggcatggacaaccactgcctccaggttttccatctccttttctgtttcctgatggactgtcttccatcgagactcttctgactaacatacaggggctgttgaaagttgccatagataatgccagagctcaagagaaacaggtccaactggaaaaaactgagctgaagatggattttttaagggaaagagaactaagggaaacacttgagaagcagttggctatggaacaaaagaatagagccatagttcaaaagaggctaaagaaggagaagaaggcaaagagaaaattgcaggaagcacttgagtttgagacgaaacggcgtgaacaagcagaacagacgctaaaacaggcagcttcaacagatagtctcagggtcttaaatgactctctgaccccagagatagaggctgaccgcagtggcggcagaacagatgctgaaaggacaatacaagatggaagactgtatttgaaaactactgtcatgtactgaatctttcctgttgaagaaatccatgttatagaaaagaactttgcagtcagacattcgtcatgggaaagttcagaaaaaaataaagtccttttaagggaacttcctgaattttgtgtattaatgttctttaaaagtttaagtattctacaaaaaaaaaaaaagttttctccattgattttcacctgtggttcataccagagacctgagaatgtttgtaaatgtacaagtatcaaagttcttacagttaattactgcaacttgctgctggacaattgtatacagagttaaaggcaggtctgaataagacctagctttgtttttttctaatggaatgaaccattttcctcttctgaaaattctgtatctgagcacatcaagagactcttgtagcagtggttacccagacttacagaattatgtcctccagaaaccagcaagaacacttggaatgaacgaatgaacttgtagggggcatagaggattcttgaaaaaaaaaaatgcaagagtgattttctgttacattcaatttcaaactctctaattgtgggttttctcctgaagaattttttttcacatactttccaaaagaccaacaaatggatgttgacaacaacccaatgaaataacattttgcatatctgaaaagaagcattgaatataagccaaaagctttcactgaaggtttttttttcttaaaaataaaaaaaaatatataagtgtaacatgttttcattccaaactggtagtggtatgtagaattaaagataataatgttgcttcttattcaaactgttggtcatatgtacagtatataaacataaaacacacaaggaaggtattatgtatgcagtagtatactagagtttaggaaaatgaaaattttagaaaatatgttttgtcaccctgttggtcagaaagatgtctttctggttttaacgcatgcaggcatgtaaatatttgtctggagtcacagtattaatgaatgagatcttaagcatctggtgacatcagaactctgtgtcagccacttttatttgtatattgaaccctagctagtgccccaagctgcactattgggaatggattgtggctgaacagcaaatcaaaacaccagaaatatttttatatgttaacgtcatattatgttaatgttgctgaaaacaaaacctaacaaaccttgatgtaccagtccaataccatgtagcgctgagtgataaagttaaaatgtgctgtgcttcccacccttgtcagagggaagggtggctatgtgttattttcactgtctttttgaaagttacagtatgtgttttcactttcgtgcagataactggaagtaaagcggcaaacagtgcttattacatgctaaagttaccttctctttgttttttgcatatctggaattacacctttaaagactgatatgaatcagtacggtcactatacattttatgatttttctgtcatcttaaaattgtatgatcgtaacattatttattaccacaaaacagcaaaatcttcaatgtctaagaaaactagcttaaaatgtttaaatatagttctgattgggtattaattacttgattaagaaaaaattaacattatagatactctggcattacgcttctataccttttaggtcttccttgcaatactggaacataattcttttgtgtagctcactattagccagctaagttcatctttttaataccataaaaaggttatatgtacagttcctattttagcttgcttacaaagggagcattatttttatttaaagtattgctagtaaatgatttgtagaaacttggttttctaagcatagttcttccataaccaccttttgttgtttgagcacaagggattcttttcctagttctatgtgtttgtttccctatatgcagtctttaaaggattacaacacttaaaattgaatggacttgtgtcaagctttttgcatcatacattttttgaaagatttttaaaaaagcctacaacttacatatgtagtagaatcagccattgctctgctcctggcatagagtcacctgtttgttatgtggattaaatagttttaaaatacatatttgaagacctttgagaatgctttagtgtttgatttgaaataaaaggaaattttagcaaggattaaagaaaaaagctatcagctgtatgttaagagagactcttactaacatgttgtaaatattacaattcatgaaatgttattgtaagtctgtaacttaattttttccctgttttagttatacaggttggtttggaaatttgtgttttggcataaacaagtaaaatgtgcccattttatggtttccatgcttttgtaatcctaaaaatattaatgtctagttgttctatattataaccacatttgcgctctatgcaagcccttggaacagaacatactcatcttcatgtaggacctatgaaaattgtctatttttatctatatatttaaagttttctaaaaatgataaaaggttattacgaattttgttgtacaaaatctgtacaaaaatctgtttttacatcataatgcaagaattggaaatttttctatggtagcctagttatttgagcctggtttcaatgtgagaaccacgtttactgttattgtatttaattttcttttccttttcaacaatctcctaataaaactgtctgaaatctc

SEQ ID NO: 124838 - DNA, 2986 bp, Homo sapiens
  Payload ID: 4511
  Gene Symbol: DACH1
  Gene Name: dachshund family transcription factor 1
  ENST ID: ENST00000619232
  CDS Start-End: 1-2277
atggcagtgccggcggctttgatccctccgacccagctggtcccccctcaacccccaatctccacgtctgcttcctcctctggcaccaccacctccacctcttcggcgacttcgtctccggctccttccatcggacccccggcgtcctctgggccaactctgttccgcccggagcccatcgcttcggcggcggcggcggcggccacagtcacctctaccggcggcggcggcggcggcggcggcagcggaggcggcggcggcagcagcggcaacggaggcggcggtggcggcggcggcggtggcagcaactgcaaccccaacctggcggccgcgagcaacggcagcggcggcggcggcggcggcatcagcgctggcggcggcgtcgcttccagcacccccatcaacgccagcaccggcagcagcagcagcagcagtagcagcagcagcagcagcagcagtagtagcagcagcagcagtagcagcagcagctgcggccccctccccgggaaacccgtgtactcaaccccgtccccagtggaaaacacccctcagaataatgagtgcaaaatggtggatctgaggggggccaaagtggcttccttcacggtggagggctgcgagctgatctgcctgccccaggctttcgacctgttcctgaagcacttggtggggggcttgcatacggtctacaccaagctgaagcggctggagatcacgccggtggtgtgcaatgtggaacaagttcgcatcctgaggggactgggcgccatccagccaggagtgaaccgctgcaaactcatctccaggaaggacttcgagaccctctacaatgactgcaccaacgcaagttctagacctggaaggcctcctaagaggactcaaagtgtcacctccccagagaactctcacatcatgccgcattctgtccctggtctcatgtctcctgggataattccaccaacaggtctgacagcagccgctgcagcagctgctgctgctaccaatgcagctattgctgaagcaatgaaggtgaaaaaaatcaaattagaagccatgagcaactatcatgccagtaataaccaacatggagcagactctgaaaacggggacatgaattcaagtgtcggcagcagtgatggttcctgggataaggaaacactgccctcttccccatcccagggacctcaggcctctataacccacccccgcatgcctggagcacgtagccttccacttagtcatcctctcaaccatcttcagcagagccaccttctgccaaatggactggaacttccttttatgatgatgccccaccctctaattcctgtcagcctacctccagcatctgtcaccatggcaatgagccagatgaaccacctcagcaccattgcaaatatggcagcagcagcacaagttcagagtcccccatccagagttgagacatcagttattaaggagcgtgttcctgatagcccctcacctgccccctctctggaggaggggagaaggcctggcagtcacccatcatcacatcgcagcagcagcgtgtccagctcccctgctcggactgagagctcttctgacagaatcccggtccatcagaatgggttgtccatgaaccagatgctgatgggcttatcaccaaatgtacttcctgggcccaaagagggagatttggccggtcatgacatgggacatgagtcaaaaaggatgcatattgaaaaagatgagaccccgctttctacaccaaccgcaagagacagccttgacaaactctctctaactgggcatggacaaccactgcctccaggttttccatctccttttctgtttcctgatggactgtcttccatcgagactcttctgactaacatacaggggctgttgaaagttgccatagataatgccagagctcaagagaaacaggtccaactggaaaaaactgagctgaagatggattttttaagggaaagagaactaagggaaacacttgagaagcagttggctatggaacaaaagaatagagccatagttcaaaagaggctaaagaaggagaagaaggcaaagagaaaattgcaggaagcacttgagtttgagacgaaacggcgtgaacaagcagaacagacgctaaaacaggcagcttcaacagatagtctcagggtcttaaatgactctctgaccccagagatagaggctgaccgcagtggcggcagaacagatgctgaaaggacaatacaagatggaagactgtatttgaaaactactgtcatgtactgaatctttcctgttgaagaaatccatgttatagaaaagaactttgcagtcagacattcgtcatgggaaagttcagaaaaaaataaagtccttttaagggaacttcctgaattttgtgtattaatgttctttaaaagtttaagtattctacaaaaaaaaaaaaagttttctccattgattttcacctgtggttcataccagagacctgagaatgtttgtaaatgtacaagtatcaaagttcttacagttaattactgcaacttgctgctggacaattgtatacagagttaaaggcaggtctgaataagacctagctttgtttttttctaatggaatgaaccattttcctcttctgaaaattctgtatctgagcacatcaagagactcttgtagcagtggttacccagacttacagaattatgtcctccagaaaccagcaagaacacttggaatgaacgaatgaacttgtagggggcatagaggattcttgaaaaaaaaaaatgcaagagtgattttctgttacattcaatttcaaactctctaattgtgggttttctcctgaagaattttttttcacatactttccaaaagaccaacaaatggatgttgacaacaacccaatgaaataacattttgcatatctgaaaagaagcattgaatataagccaaaagctttcactgaaggtttttttttcttaaaaataaaaaaaaa

SEQ ID NO: 124839 - DNA, 2232 bp, Homo sapiens
  Payload ID: 4512
  Gene Symbol: DACH2
  Gene Name: dachshund family transcription factor 2
  Uniprot ID: Q96NX9
  ENST ID: ENST00000373125
  CDS Start-End: 1-1800
atggctgtctccgcatctccagtgatctctgcaacttccagcggcgccggcgtcccggggggcttattccgggccgaacccctgtactcgactcccagagagccccctcgtcttactcctaatatgatcaatagtttcgtggttaataaccacagcaacagtgccggaggcggcggcaggggcaacaccaacaccaacgagtgccgcatggtcgacatgcacgggatgaaggtggcttcgttcctgatggacggccaggaactgatctgcctgccgcaagtctttgatctttttctcaagcacctggtgggaggcttgcacactgtgtacaccaagctgaagagactggatatatcccccgtggtgtgtactgttgagcaggtccggatcctccgcgggctgggggccatccagcccggggtaaaccgctgcaaactcatcaccaggaaagacttcgaaactttgttcaccgattgcaccaatgccagaaggaagaggcaaatgacaagaaaacaagctgttaacagttcaagacccggcaggccccctaagcgttctttgggagtgttgcaggaaaatgcccgccttctgacccatgcagtcccaggcctcttatcgccaggacttatcactccgacaggtataacagctgcagcgatggctgaggcgatgaaacttcagaagatgaagcttatggctatgaacactcttcagggaaatggaagccaaaatgggaccgaatcagagcctgatgatcttaattctaacacaggtggaagtgaatcctcctgggataaagataagatgcagtctccatttgctgcacctggaccccaacatggaattgctcatgcagccctagctggccagccaggcattgggggtgctccaaccctcaatccactgcagcagaaccacctgctaaccaatagactggatctgccatttatgatgatgcctcatcccctacttccagtcagcttacctcctgcatcagttgccatggcaatgaatcagatgaaccatctcaatactattgccaacatggctgctgcagcacagattcacagtccactctccagagctggtacctctgttataaaggagcggatcccagagagtccttctcctgctccttctctagaagagaatcatcgtcctgggagccagacctcttcccacaccagcagcagtgtgtccagctctccctctcagatggatcatcatttggaaagaatggaagaggtaccagttcaaattccaataatgaagtcacccttggacaagatacagctgactcctgggcaggcattgcccgctggattccctggaccattcatttttgctgatagtctgtcctccgtggagactctgttgaccaacattcagggtctgctgaaagttgctttggataatgctcgcatccaggagaagcagattcaacaagaaaagaaggagctgcgactggagctctatagagagagagaaattagagaaaaccttgaaagacaacttgcagttgagcttcaaagcagaactactatgcaaaagcgcctgaagaaggagaaaaaaaccaagagaaaattgcaggaagccttggaatttgaatcaaagcgccgggagcaagtggagcaggcacttaagcaagccaccactagtgacagtggcctgaggatgttaaaagatactggaattccagatattgaaatagaaaacaatgggactcctcatgatagtgctgctatgcaaggaggtaactattactgtttagaaatggcacaacagttgtattcagcctgaaaggtcctcgctggctttacataaatgaagatgcttgtgattccagtttatctctgaaactattcaacatggagttatttcagttttgtttatcagcaaagctttgtttactgaaggagctatttaatctatgttacattaaaaaagaaacgcgtgtacattttaaaagcaatgatgtaaactttgttcttgcattagactgaccagtttaaaaatatgaactaaaacctaatggctaaagtaacttgaccatatttgatgcttttctatgctcatttcaacttggctttttgtcttttaaatttttaaaaaatgcagtagtgtgttagagactagaaagttatatgtatggtttccctgttctactatacataacgttaaagtacaccttctttgttaaaaatgtacttgctaaacttcagcgtaaataaa

SEQ ID NO: 124840 - DNA, 2418 bp, Homo sapiens
  Payload ID: 4512
  Gene Symbol: DACH2
  Gene Name: dachshund family transcription factor 2
  Uniprot ID: Q96NX9
  ENST ID: ENST00000373131
  CDS Start-End: 164-1879
gttgagcttgagcgtgagccggctgctgaagacttgcgaacagttcggagccagcgagagcgcgccagagagagcgagagtgagggagtgagtgcgaggggatctagaggagtcagggcgagaaagcgagggccggaggacccacgatagagacagagtgaccatggctgtctccgcatctccagtgatctctgcaacttccagcggcgccggcgtcccggggggcttattccgggccgaacccctgtactcgactcccagagagccccctcgtcttactcctaatatgatcaatagtttcgtggttaataaccacagcaacagtgccggaggcggcggcaggggcaacaccaacaccaacgagtgccgcatggtcgacatgcacgggatgaaggtggcttcgttcctgatggacggccaggaactgatctgcctgccgcaagtctttgatctttttctcaagcacctggtgggaggcttgcacactgtgtacaccaagctgaagagactggatatatcccccgtggtgtgtactgttgagcaggtccggatcctccgcgggctgggggccatccagcccggggtaaaccgctgcaaactcatcaccaggaaagacttcgaaactttgttcaccgattgcaccaatgccagttcaagacccggcaggccccctaagcgttctttgggagtgttgcaggaaaatgcccgccttctgacccatgcagtcccaggcctcttatcgccaggacttatcactccgacaggtataacagctgcagcgatggctgaggcgatgaaacttcagaagatgaagcttatggctatgaacactcttcagggaaatggaagccaaaatgggaccgaatcagagcctgatgatcttaattctaacacaggtggaagtgaatcctcctgggataaagataagatgcagtctccatttgctgcacctggaccccaacatggaattgctcatgcagccctagctggccagccaggcattgggggtgctccaaccctcaatccactgcagcagaaccacctgctaaccaatagactggatctgccatttatgatgatgcctcatcccctacttccagtcagcttacctcctgcatcagttgccatggcaatgaatcagatgaaccatctcaatactattgccaacatggctgctgcagcacagattcacagtccactctccagagctggtacctctgttataaaggagcggatcccagagagtccttctcctgctccttctctagaagagaatcatcgtcctgggagccagacctcttcccacaccagcagcagtgtgtccagctctccctctcagatggatcatcatttggaaagaatggaagaggtaccagttcaaattccaataatgaagtcacccttggacaagatacagctgactcctgggcaggcattgcccgctggattccctggaccattcatttttgctgatagtctgtcctccgtggagactctgttgaccaacattcagggtctgctgaaagttgctttggataatgctcgcatccaggagaagcagattcaacaagaaaagaaggagctgcgactggagctctatagagagagagaaattagagaaaaccttgaaagacaacttgcagttgagcttcaaagcagaactactatgcaaaagcgcctgaagaaggagaaaaaaaccaagagaaaattgcaggaagccttggaatttgaatcaaagcgccgggagcaagtggagcaggcacttaagcaagccaccactagtgacagtggcctgaggatgttaaaagatactggaattccagatattgaaatagaaaacaatgggactcctcatgatagtgctgctatgcaagcctgaacactgatgccggaactccaactgatcataggcacgaatagggaggtaactattactgtttagaaatggcacaacagttgtattcagcctgaaaggtcctcgctggctttacataaatgaagatgcttgtgattccagtttatctctgaaactattcaacatggagttatttcagttttgtttatcagcaaagctttgtttactgaaggagctatttaatctatgttacattaaaaaagaaacgcgtgtacattttaaaagcaatgatgtaaactttgttcttgcattagactgaccagtttaaaaatatgaactaaaacctaatggctaaagtaacttgaccatatttgatgcttttctatgctcatttcaacttggctttttgtcttttaaatttttaaaaaatgcagtagtgtgttagagactagaaagttatatgtatggtttccctgttctactatacataacgttaaagtacaccttctttgttaaaaatgtacttgctaaacttcagcgtaaataaaaacattttgactttg

SEQ ID NO: 124841 - DNA, 1775 bp, Homo sapiens
  Payload ID: 4512
  Gene Symbol: DACH2
  Gene Name: dachshund family transcription factor 2
  Uniprot ID: Q96NX9
  ENST ID: ENST00000508860
  CDS Start-End: 58-1356
atatgcacccaaagcactcttagttgcagccaaagcagtggaagaaggaagaggcaaatgacaagaaaacaagctgttaacagttcaagacccggcaggccccctaagcgttctttgggagtgttgcaggaaaatgcccgccttctgacccatgcagtcccaggcctcttatcgccaggacttatcactccgacaggtataacagctgcagcgatggctgaggcgatgaaacttcagaagatgaagcttatggctatgaacactcttcagggaaatggaagccaaaatgggaccgaatcagagcctgatgatcttaattctaacacaggtggaagtgaatcctcctgggataaagataagatgcagtctccatttgctgcacctggaccccaacatggaattgctcatgcagccctagctggccagccaggcattgggggtgctccaaccctcaatccactgcagcagaaccacctgctaaccaatagactggatctgccatttatgatgatgcctcatcccctacttccagtcagcttacctcctgcatcagttgccatggcaatgaatcagatgaaccatctcaatactattgccaacatggctgctgcagcacagattcacagtccactctccagagctggtacctctgttataaaggagcggatcccagagagtccttctcctgctccttctctagaagagaatcatcgtcctgggagccagacctcttcccacaccagcagcagtgtgtccagctctccctctcagatggatcatcatttggaaagaatggaagaggtaccagttcaaattccaataatgaagtcacccttggacaagatacagctgactcctgggcaggcattgcccgctggattccctggaccattcatttttgctgatagtctgtcctccgtggagactctgttgaccaacattcagggtctgctgaaagttgctttggataatgctcgcatccaggagaagcagattcaacaagaaaagaaggagctgcgactggagctctatagagagagagaaattagagaaaaccttgaaagacaacttgcagttgagcttcaaagcagaactactatgcaaaagcgcctgaagaaggagaaaaaaaccaagagaaaattgcaggaagccttggaatttgaatcaaagcgccgggagcaagtggagcaggcacttaagcaagccaccactagtgacagtggcctgaggatgttaaaagatactggaattccagatattgaaatagaaaacaatgggactcctcatgatagtgctgctatgcaaggaggtaactattactgtttagaaatggcacaacagttgtattcagcctgaaaggtcctcgctggctttacataaatgaagatgcttgtgattccagtttatctctgaaactattcaacatggagttatttcagttttgtttatcagcaaagctttgtttactgaaggagctatttaatctatgttacattaaaaaagaaacgcgtgtacattttaaaagcaatgatgtaaactttgttcttgcattagactgaccagtttaaaaatatgaactaaaacctaatggctaaagtaacttgaccatatttgatgcttttctatgctcatttcaacttggctttttgtcttttaaatttttaaaaaatgcagtagtgtgttagagactagaaagttatatgtatggtttccctgttctactatacataacgttaaagtacaccttctttgttaaaaatgtacttgctaaactt

SEQ ID NO: 124842 - DNA, 2494 bp, Homo sapiens
  Payload ID: 4512
  Gene Symbol: DACH2
  Gene Name: dachshund family transcription factor 2
  ENST ID: ENST00000461604
  CDS Start-End: 162-1484
tgagcttgagcgtgagccggctgctgaagacttgcgaacagttcggagccagcgagagcgcgccagagagagcgagagtgagggagtgagtgcgaggggatctagaggagtcagggcgagaaagcgagggccggaggacccacgatagagacagagtgaccatggctgtctccgcatctccagtgatctctgcaacttccagcggcgccggcgtcccggggggcttattccgggccgaacccctgtactcgactcccagagagccccctcgtcttactcctaatatgatcaatagtttcgtggttaataaccacagcaacagtgccggaggcggcggcaggggcaacaccaacaccaacgagtgccgcatggtcgacatgcacgggatgaaggtggcttcgttcctgatggacggccaggaactgatctgcctgccgcaagtctttgatctttttctcaagcacctggtgggaggcttgcacactgtgtacaccaagctgaagagactggatatatcccccgtggtgtgtactgttgagcaggtccggatcctccgcgggctgggggccatccagcccggggtaaaccgctgcaaactcatcaccaggaaagacttcgaaactttgttcaccgattgcaccaatgccagaaggaagaggcaaatgacaagaaaacaagctgttaacagttcaagacccggcaggccccctaagcgttctttgggagtgttgcaggaaaatgcccgccttctgacccatgcagtcccaggcctcttatcgccaggacttatcactccgacaggtataacagctgcagcgatggctgaggcgatgaaacttcagaagatgaagcttatggctatgaacactcttcagggaaatggaagccaaaatgggaccgaatcagagcctgatgatcttaattctaacacaggtggaagtgaatcctcctgggataaagataagatgcagtctccatttgctgcacctggaccccaacatggaattgctcatgcagccctagctggccagccaggcattgggggtgctccaaccctcaatccactgcagcagaaccacctgctaaccaatagactggatctgccatttatgatgatgcctcatcccctacttccagtcagcttacctcctgcatcagttgccatggcaatgaatcagatgaaccatctcaatactattgccaacatggctgctgcagcacagattcacagtccactctccagagctggtacctctgttataaaggagcggatcccagagagtccttctcctgctccttctctagaagagaatcatcgtcctgggagccagacctcttcccacaccagcagcagtgtgtccagctctccctctcagatggatcatcatttggaaagaatggttatgatgcccaacaatagagaggaacttattgttgatcaagataatggactaaccatcaaaaaattccaaaaagataattaagaagaggtaccagttcaaattccaataatgaagtcacccttggacaagatacagctgactcctgggcaggcattgcccgctggattccctggaccattcatttttgctgatagtctgtcctccgtggagactctgttgaccaacattcagggtctgctgaaagttgctttggataatgctcgcatccaggagaagcagattcaacaagaaaagaaggagctgcgactggagctctatagagagagagaaattagagaaaaccttgaaagacaacttgcagttgagcttcaaagcagaactactatgcaaaagcgcctgaagaaggagaaaaaaaccaagagaaaattgcaggaagccttggaatttgaatcaaagcgccgggagcaagtggagcaggcacttaagcaagccaccactagtgacagtggcctgaggatgttaaaagatactggaattccagatattgaaatagaaaacaatgggactcctcatgatagtgctgctatgcaaggaggtaactattactgtttagaaatggcacaacagttgtattcagcctgaaaggtcctcgctggctttacataaatgaagatgcttgtgattccagtttatctctgaaactattcaacatggagttatttcagttttgtttatcagcaaagctttgtttactgaaggagctatttaatctatgttacattaaaaaagaaacgcgtgtacattttaaaagcaatgatgtaaactttgttcttgcattagactgaccagtttaaaaatatgaactaaaacctaatggctaaagtaacttgaccatatttgatgcttttctatgctcatttcaacttggctttttgtcttttaaatttttaaaaaatgcagtagtgtgttagagactagaaagttatatgtatggtttccctgttctactatacataacgttaaagtacaccttctttgttaaaaatgtacttgctaaacttcagcgtaaataaaaacattttgactttgtc

SEQ ID NO: 124843 - DNA, 1764 bp, Homo sapiens
  Payload ID: 4512
  Gene Symbol: DACH2
  Gene Name: dachshund family transcription factor 2
  Uniprot ID: Q96NX9
  ENST ID: ENST00000510272
  CDS Start-End: 175-1317
atatgcacccaaagcactcttagttgcagccaaagcagtggaagttcaagacccggcaggccccctaagcgttctttgggagtgttgcaggaaaatgcccgccttctgacccatgcagtcccaggcctcttatcgccaggacttatcactccgacaggtataacagctgcagcgatggctgaggcgatgaaacttcagaagatgaagcttatggctatgaacactcttcagggaaatggaagccaaaatgggaccgaatcagagcctgatgatcttaattctaacacaggtggaagtgaatcctcctgggataaagataagatgcagtctccatttgctgcacctggaccccaacatggaattgctcatgcagccctagctggccagccaggcattgggggtgctccaaccctcaatccactgcagcagaaccacctgctaaccaatagactggatctgccatttatgatgatgcctcatcccctacttccagtcagcttacctcctgcatcagttgccatggcaatgaatcagatgaaccatctcaatactattgccaacatggctgctgcagcacagattcacagtccactctccagagctggtacctctgttataaaggagcggatcccagagagtccttctcctgctccttctctagaagagaatcatcgtcctgggagccagacctcttcccacaccagcagcagtgtgtccagctctccctctcagatggatcatcatttggaaagaatggaagaggtaccagttcaaattccaataatgaagtcacccttggacaagatacagctgactcctgggcaggcattgcccgctggattccctggaccattcatttttgctgatagtctgtcctccgtggagactctgttgaccaacattcagggtctgctgaaagttgctttggataatgctcgcatccaggagaagcagattcaacaagaaaagaaggagctgcgactggagctctatagagagagagaaattagagaaaaccttgaaagacaacttgcagttgagcttcaaagcagaactactatgcaaaagcgcctgaagaaggagaaaaaaaccaagagaaaattgcaggaagccttggaatttgaatcaaagcgccgggagcaagtggagcaggcacttaagcaagccaccactagtgacagtggcctgaggatgttaaaagatactggaattccagatattgaaatagaaaacaatgggactcctcatgatagtgctgctatgcaaggaggtaactattactgtttagaaatggcacaacagttgtattcagcctgaaaggtcctcgctggctttacataaatgaagatgcttgtgattccagtttatctctgaaactattcaacatggagttatttcagttttgtttatcagcaaagctttgtttactgaaggagctatttaatctatgttacattaaaaaagaaacgcgtgtacattttaaaagcaatgatgtaaactttgttcttgcattagactgaccagtttaaaaatatgaactaaaacctaatggctaaagtaacttgaccatatttgatgcttttctatgctcatttcaacttggctttttgtcttttaaatttttaaaaaatgcagtagtgtgttagagactagaaagttatatgtatggtttccctgttctactatacataacgttaaagtacaccttctttgttaaaaatgtacttgctaaacttcagcgtaaataaaaacattttgactttg

SEQ ID NO: 124844 - DNA, 5582 bp, Homo sapiens
  Payload ID: 4512
  Gene Symbol: DACH2
  Gene Name: dachshund family transcription factor 2
  ENST ID: ENST00000484479
  CDS Start-End: 1-750
attgccaacatggctgctgcagcacagattcacagtccactctccagagctggtacctctgttataaaggagcggatcccagagagtccttctcctgctccttctctagaagagaatcatcgtcctgggagccagacctcttcccacaccagcagcagtgtgtccagctctccctctcagatggatcatcatttggaaagaatggaagaggtaccagttcaaattccaataatgaagtcacccttggacaagatacagctgactcctgggcaggcattgcccgctggattccctggaccattcatttttgctgatagtctgtcctccgtggagactctgttgaccaacattcaggtcaacaatatttctataaacaaaataaatggtctgctgaaagttgctttggataatgctcgcatccaggagaagcagattcaacaagaaaagaaggagctgcgactggagctctatagagagagagaaattagagaaaaccttgaaagacaacttgcagttgagcttcaaagcagaactactatgcaaaagcgcctgaagaaggagaaaaaaaccaagagaaaattgcaggaagccttggaatttgaatcaaagcgccgggagcaagtggagcaggcacttaagcaagccaccactagtgacagtggcctgaggatgttaaaagatactggaattccagatattgaaatagaaaacaatgggactcctcatgatagtgctgctatgcaagcctgaacactgatgccggaactccaactgatcataggcacgaatagggtgctgtagcagttacctgcttatctagtgttgtaaattatttagaattcatactcaaatccttaaaatatggaacctttaattactgtttgttcattactgataaatagaaccttacacatacaggaaaaatgtcctagagaatgggtttcacaggtttttaggggatagtcataataatgactgaacacattttacacttctttaacctctttctttcaaggagttagttcatagtgcttcaaaaacattatcacattaattcacacagaatcctagtggggtaagtaggtggaagaatttttaagacagagaaaatgctatttctaaatggtgtgagacaaattaaaatgcaggcacacctactttaagctgcaattactgtgaaataacttcttgtctgacctggtatttaacaggaattatatcaggtggtgaatcatttgtgcaaatgatcgatatttgttatcactgctttggagctctcatttctaaaagaaacacttggcctgtagtgttctctaagaaaatataaggagctctagtttttagattttaccacacccagtttttcctttgaactgttgatggtggagcaagtcctttaacccctttctactagcacattcctgatttgtaaagaatgcaatgataaaaacagatacccaagctgctaaaaatacccctttactattttcttctctcctcccatccccaatcttgcttcctctttattaagctattaacaagcaaacagaatgaaaaatctataggcataagaaaagagaaagatgggtcagtgagattatggatattttatactgttcactctctggtctagacatagccagattcctaacatgttcaaatgattaggaacatttggcttgaattgcccaggaaatggcctcaaatatttttaactgtttacttagaggagatctgaccattggctgggggcagatacctgttatcattattttgatgcctactaaaaatctaatagagcagcattccaatgtgttatatggtactctaatgatcaaaaagatttaatgctcctcctaaagtgccctccttatattaaacaatatataatccattgtgttgttttcacgtctgccctagcattaagttctgatgtgacagaagcaccaagcatctcctgcaaaaagccaactgagtttttatccattttctagtaagaggttccccatggcagtacatgcaatttctgccggaatggccacccactctaaacacttaaaaatattacattaattcatatcgatgtgacatttcagtaattccaagctctgaaggaatgttttctaaagcataagcatttggattctggtattcttcatgggctgtagaaggtctgcttatatagagtaggtatactgttttagcccaattcagtgaaataatgccaaattagaaataagtcatggagaaggattgaagcaagtcaaataaaaacttttattaatatcaaatatctgaaataaataacagtgacaggtgactaaaaatataacatccaagaaagtctcatcattaaatggaatttccaaattaagttacttcaaaataaactagtgtcttttgtttaaataagtagataagtttaacttaccttgtttgaactatgaggactcctcatgtgtatttttttctggccttttcccatatatctgccttgtttatgatacatgattttagctattccggctcataggcttaggatatataccacagggcaagtctcacatttacttgagtttggagcagctatttgtggcccagtaaagataactcaactgattaggagaggttcatctcctgtgtggagtgtccacactgaccttctgtgtcatggcatatgcccatgtcaggcagtgctgtgctaaaggaaggattacatggacttttgtttttactttaaaaatggtcacatttgtatgtatcaaattcccctttttacctatctgataaatcccaaagcaataaactctgtcagctctccccaaatgtcagtgtgtgtccctctttttaagttctcaagctcggtaacattcccctggagagactttgttagtttctcttcctgatctttaatcttattgacatccagagttcatatcagatcatctctgtttagagctcaagaacaaacccttataagaacatgaaacattccattactaattagctgtttcctgttcctaatgaagcgagcacactgggtctggattaaaattcagctactactcctctctgtttatggttccagatgtttttggtttatgtaggagattactttgacagctactactaagtgataaatcactcatattatagctgaaatgcattttgaaattgaaatgtggcaaactttgagattgctccaaggatcagtgtcagcagttcattactggcatcttccttatgatcattcagcattggcacatgtaaaacagtaaccaaatatgtgtcaacattatacaacatgctacacaggggtctgtttcgctactgtcctcaaaattgggagaaaaagttttactacggtgaaatctcaatttattgtattctggtagaaaagttgattcacttaatattgttttcttcttgctagcctagtttttctttcaatttttgagcagctatgggaactattcctaataggccttgtaagcagacacataaaggatgtgggcaaatatttctgtctctaaataaaggcaagaaataaacataacaaaagtagaaatttttcagaaactgcatttttctaaaggacaaatggtgattgtctttcgctattcattgctgagttcatgtaccctttttaaggggacatagtgtgtgctattgctttccagtttgtaatgttcacagtttgtgttgcatgatttaagctttagctatattgtataaatttcaatcctggtaaaatgactgtcatttcatgtcaaagagctttcctttgacatttaggctgtgtatacaaaggatgaggtagactggaggactgagcaaatatttggtcaattcatcagagtaaatattctcagactccacaaaggagttggaacaattaccagtgtccaaaaattcaagctttgttttcttctggtccctggaaaagtttaagtgaattccatgggcttcttgggaaaatgtctggttgccctctgatgaagtccaaccctccataagtctgactaacccaaaccccaaatcttttattcatctattaccttactacatctttatttttggttctgaggtattatctagaaaattctgccactcaccatgataccttatacacagaaagaataaagattttaaagatattatacacaaggttaaaaaagggtatactttcctcctaataagcttgaccagattgacttaatattttagattagacatattagtccaacaatgataatgtcctctccattatatgtgaaaataaagcacttgactcagaaacattatctttaagtatttctcaagcacaggtaatggatttgtacggattcatccacatttcttttcctacttcttttgtaaccaaaagccaatctttgtgatgtatctaaatagagactcaggttataagccattgctatggaaaataacaaggtttgacaaaaagaggtagaataaatttttttttaaaaatttccaacaataacttttacccacccaaattaaatattatctaactctaggatggcatgggctcttttaatgactatcatttagagggataccggtttgactaaacactgtagctgaaacgatattccaaactagtctcccttcatgcagtatacacagtctcagggttaacccgggagaggaaattttaaatgtacaaagctgtcattatcttagatcataaccagatactcttttccccctgttttggtaaaccacagggatggtatttcagatgcaccattatatacaaaaaaaaaagtaatatagattattacagacattataatatagttcatgaagagcctttatcagtcttcaatgtctccggtgctgtggaaagaagaacagaagctatagcatgaaatttgaaggatctttgaaaactgacagatgaaaatatagaaatgttaagaaatgttaaattttaccaacactaaattgagcctgttacatcagatcattttaggttcctgaagatagaagttttagtatttttaagcacgtatcagaatgactcttcataagaactaacttgttttctttttttttaaggaggtaactattactgtttagaaatggcacaacagttgtattcagcctgaaaggtcctcgctggctttacataaatgaagatgcttgtgattccagtttatctctgaaactattcaacatggagttatttcagttttgtttatcagcaaagctttgtttactgaaggagctatttaatctatgttacattaaaaaagaaacgcgtgtacattttaaaagcaatgatgtaaactttgttcttgcattagactgaccagtttaaaaatatgaactaaaacctaatggctaaagtaacttgaccatatttgatgcttttctatgctcatttcaacttggctttttgtcttttaaatttttaaaaaatgcagtagtgtgttagagactagaaagttatatgtatggtttccctgttctactatacataacgttaaagtacaccttctttgttaaaaatgtacttgctaaacttcagcgtaaataaaaacattttgactttg

SEQ ID NO: 124845 - DNA, 1927 bp, Homo sapiens
  Payload ID: 4512
  Gene Symbol: DACH2
  Gene Name: dachshund family transcription factor 2
  ENST ID: ENST00000506327
  CDS Start-End: 1-528
atggctgtctccgcatctccagtgatctctgcaacttccagcggcgccggcgtcccggggggcttattccgggccgaacccctgtactcgactcccagagagccccctcgtcttactcctaatatgatcaatagtttcgtggttaataaccacagcaacagtgccggaggcggcggcaggggcaacaccaacaccaacgagtgccgcatggtcgacatgcacgggatgaaggtggcttcgttcctgatggacggccaggaactgatctgcctgccgcaagtctttgatctttttctcaagcacctggtgggaggcttgcacactgtgtacaccaagctgaagagactggatatatcccccgtggtgtgtactgttgagcaggtccggatcctccgcgggctgggggccatccagcccggggtaaaccgctgcaaactcatcaccaggaaagacttcgaaactttgttcaccgattgcaccaatgccagagtttcgctctgttgcccaggctgcagtgcagtggtgtgatcttggctcgctgcaacttccgcctcccaggttcaagggattcttgtgcctcagcctcccgagtagctggaattacagttcaagacccggcaggccccctaagcgttctttgggagtgttgcaggaaaatgcccgccttctgacccatgcagtcccaggcctcttatcgccaggacttatcactccgacaggtataacagctgcagcgatggctgaggcgatgaaacttcagaagatgaagcttatggctatgaacactcttcagggaaatggaagccaaaatgggaccgaatcagagcctgatgatcttaattctaacacaggtggaagtgaatcctcctgggataaagataagatgcagtctccatttgctgcacctggaccccaacatggaattgctcatgcagccctagctggccagccaggcattgggggtgctccaaccctcaatccactgcagcagaaccacctgctaaccaatagactggatctgccatttatgatgatgcctcatcccctacttccagtcagcttacctcctgcatcagttgccatggcaatgaatcagatgaaccatctcaatactattgccaacatggctgctgcagcacagattcacagtccactctccagagctggtacctctgttataaaggagcggatcccagagagtccttctcctgctccttctctagaagagaatcatcgtcctgggagccagacctcttcccacaccagcagcagtgtgtccagctctccctctcagatggatcatcatttggaaagaatggaagaggtaccagttcaaattccaataatgaagtcacccttggacaagatacagctgactcctgggcaggcattgcccgctggattccctggaccattcatttttgctgatagtctgtcctccgtggagactctgttgaccaacattcagggtctgctgaaagttgctttggataatgctcgcatccaggagaagcagattcaacaagaaaagaaggagctgcgactggagctctatagagagagagaaattagagaaaaccttgaaagacaacttgcagttgagcttcaaagcagaactactatgcaaaagcgcctgaagaaggagaaaaaaaccaagagaaaattgcaggaagccttggaatttgaatcaaagcgccgggagcaagtggagcaggcacttaagcaagccaccactagtgacagtggcctgaggatgttaaaagatactggaattccagatattgaaatagaaaacaatgggactcctcatgatagtgctgctatgcaaggaggtaactattactgtttagaaatggcacaacagttgtattcagcctgaaaggtcctcgctggctttacataaatgaagatgcttgtgattccagtt

SEQ ID NO: 124846 - DNA, 1731 bp, Homo sapiens
  Payload ID: 4512
  Gene Symbol: DACH2
  Gene Name: dachshund family transcription factor 2
  ENST ID: ENST00000613770
  CDS Start-End: 1-1284
tctgttaacagttcaagacccggcaggccccctaagcgttctttgggagtgttgcaggaaaatgcccgccttctgacccatgcagtcccaggcctcttatcgccaggacttatcactccgacaggtataacagctgcagcgatggctgaggcgatgaaacttcagaagatgaagcttatggctatgaacactcttcagggaaatggaagccaaaatgggaccgaatcagagcctgatgatcttaattctaacacaggtggaagtgaatcctcctgggataaagataagatgcagtctccatttgctgcacctggaccccaacatggaattgctcatgcagccctagctggccagccaggcattgggggtgctccaaccctcaatccactgcagcagaaccacctgctaaccaatagactggatctgccatttatgatgatgcctcatcccctacttccagtcagcttacctcctgcatcagttgccatggcaatgaatcagatgaaccatctcaatactattgccaacatggctgctgcagcacagattcacagtccactctccagagctggtacctctgttataaaggagcggatcccagagagtccttctcctgctccttctctagaagagaatcatcgtcctgggagccagacctcttcccacaccagcagcagtgtgtccagctctccctctcagatggatcatcatttggaaagaatggaagaggtaccagttcaaattccaataatgaagtcacccttggacaagatacagctgactcctgggcaggcattgcccgctggattccctggaccattcatttttgctgatagtctgtcctccgtggagactctgttgaccaacattcagggtctgctgaaagttgctttggataatgctcgcatccaggagaagcagattcaacaagaaaagaaggagctgcgactggagctctatagagagagagaaattagagaaaaccttgaaagacaacttgcagttgagcttcaaagcagaactactatgcaaaagcgcctgaagaaggagaaaaaaaccaagagaaaattgcaggaagccttggaatttgaatcaaagcgccgggagcaagtggagcaggcacttaagcaagccaccactagtgacagtggcctgaggatgttaaaagatactggaattccagatattgaaatagaaaacaatgggactcctcatgatagtgctgctatgcaaggaggtaactattactgtttagaaatggcacaacagttgtattcagcctgaaaggtcctcgctggctttacataaatgaagatgcttgtgattccagtttatctctgaaactattcaacatggagttatttcagttttgtttatcagcaaagctttgtttactgaaggagctatttaatctatgttacattaaaaaagaaacgcgtgtacattttaaaagcaatgatgtaaactttgttcttgcattagactgaccagtttaaaaatatgaactaaaacctaatggctaaagtaacttgaccatatttgatgcttttctatgctcatttcaacttggctttttgtcttttaaatttttaaaaaatgcagtagtgtgttagagactagaaagttatatgtatggtttccctgttctactatacataacgttaaagtacaccttctttgttaaaaatgtacttgctaaacttcagcgtaaataaaaacattttgactttg

SEQ ID NO: 124847 - DNA, 10765 bp, Homo sapiens
  Payload ID: 4513
  Gene Symbol: DCHS1
  Gene Name: dachsous cadherin-related 1
  Uniprot ID: Q96JQ0
  ENST ID: ENST00000299441
  CDS Start-End: 413-10309
gcggagggcggggggaggggaggggagggggcgcggggccgcggcagcggagctcgcatcctcggcggggcggctgtgcaggaggcggcgcccgggcgtcagcggacggaccgatcgacggccaagggcgcgcggaccgacggcggctgcccggaggggatcgcgggcctcggagacagcgactgcggacgatgcgcggcctcaggccccgcgcgagcgggcgctgcccggggggctgaccgcggccggacggcgccccagcaccgggcgagggagcccgcgtcgcgcggaggtcagggagcctgagctggagccagggccccagtgggacctgacccaaagtctgaggtcaagctgggcccagagcctggcctggagctggagcccaaggcacagctggactacccttgtcatgcagaaggagctgggcattgtgccttcctgccctggcatgaagagccccaggccccacctcctgctaccattgctgctgctgctgctgctgctgctgggggctggggtgccaggtgcctggggtcaggctgggagcctggacttgcagattgatgaggagcagccagcgggtacactgattggcgacatcagtgcggggcttccggcaggcacggcagctcctctcatgtacttcatctctgcccaagagggcagcggcgtgggcacagacctggccattgacgaacacagtggggtcgtccgtacagcccgtgtcttggaccgtgagcagcgggaccgctaccgcttcactgcagtcactcctgatggtgccaccgtagaagttacagtgcgagtggctgacatcaacgaccatgctccagccttcccacaggctcgggctgccctgcaggtacctgagcatacagcttttggcacccgctacccactggagcctgctcgtgatgcagatgctgggcgtctgggaacccagggctatgcgctatctggtgatggggctggagagaccttccggctggagacacgccccggtccagatgggactccagtacctgagctggtagttactggggaactggaccgagagaaccgctcacactatatgctacagctggaggcctatgatggtggttcacccccccggagggcccaggccctgctggacgtgacactgctggacatcaatgaccatgccccggctttcaatcagagccgctaccatgctgtggtgtctgagagcctggcccctggcagtcctgtcttgcaggtgttcgcatctgatgccgatgctggtgtcaatggggctgtgacttacgagatcaaccggaggcagagcgagggtgatggacccttctccatcgacgcacacacggggctgctgcagttagagcggccactggactttgagcagcggcgggtccatgaactggtggtgcaagcacgagatggtggggctcaccctgagctgggctcggcctttgtgactgtgcatgtgcgagatgccaatgacaatcagccctccatgactgtcatctttctcagtgcagatggctccccccaagtgtctgaggccgccccacctggacagctcgttgctcgcatctctgtgtcagacccagatgatggtgactttgcccatgtcaatgtgtccctggaaggtggagagggccactttgccctaagcacccaagacagcgtcatctatctggtgtgtgtggctcggcggctggatcgagaggagagggatgcctataacttgagggttacagccacagactcaggctcacctccactgcgggctgaggctgcctttgtgctgcacgtcactgatgtcaacgacaatgcacctgcctttgaccgccagctctaccgacctgagcccctgcctgaggttgcgctgcctggcagctttgtagtgcgggtgactgctcgggatcctgaccaaggcaccaatggtcaggtcacttatagcctagcccctggcgcccacacccactggttctccattgaccccacctcaggcattatcactacggctgcctcactggactatgagttggaacctcagccacagctgattgtggtggccacagatggtggcctgccccctctagcctcctctgccacagttagcgtggccctgcaagatgtgaatgataatgagccccaattccagaggactttctacaatgcctcactgcctgagggcacccagcctggaacttgcttcctgcaggtgacagccacagacgcggatagtggcccatttggcctcctctcctattccttgggtgctggacttgggtcctccggatctcccccattccgcattgatgcccacagcggtgatgtgtgcacaacccggaccctggaccgtgaccaggggccctcaagctttgacttcacagtgacagctgtggatgggggaggcctcaagtccatggtatatgtgaaggtgtttctgtcagacgagaatgacaaccctcctcagttttatccacgggagtatgctgccagtataagtgcccagagtccaccaggcacagctgtgctgaggttgcgtgcccatgaccctgaccagggatcccatgggcgactctcctaccatatcctggctggcaacagccccccactttttaccttggatgagcaatcagggctgttgacagtagcctggcccttggccagacgggccaattctgtggtgcagctggagatcggggctgaggacggaggtggcctacaggcagaacccagtgcccgagtggacatcagcattgtgcctggaacccccacaccacccatatttgagcaactacagtatgttttttctgtgccagaggatgtggcaccaggcaccagtgtgggcatagtccaggcacacaacccaccaggtcgcttggcacctgtgaccctttccctatcaggtggggatccccgaggactcttctccctagatgcggtatcaggactgttgcaaacacttcgccctctggaccgggagctactgggaccagtgttggagctggaggtgcgagcaggcagtggagtgcccccagctttcgctgtagctcgggtgcgtgtgctgctggatgatgtgaatgacaactcccctgcctttcctgcacctgaagacacggtattgctaccaccaaacactgccccagggactcccatctatacactgcgggctcttgaccccgactcaggtgttaacagtcgagtcacctttaccctgcttgctgggggtggtggagccttcaccgtggaccccaccacaggccatgtacggcttatgaggcctctggggccctcaggagggccagcccatgagctggagctggaggcccgggatgggggctccccaccacgcaccagccactttcgactacgggtggtggtacaggatgtgggaacccgtgggctggctccccgattcaacagccctacctaccgtgtggacctgccctcaggcaccactgctggaactcaggtcctgcaagtgcaggcccaagcaccagatgggggccctatcacctatcaccttgcagcagagggagcaagtagcccctttggcctggagccacagagtgggtggctatgggtgcgggcagcactagaccgtgaggcccaggaattgtacatactgaaggtaatggcagtgtctgggtccaaagctgagttggggcagcagacaggcacagccaccgtgagggtcagcatcctcaaccagaatgaacacagtccccgcttgtctgaggatcccaccttcctggctgtggctgagaaccagcccccagggaccagcgtgggccgagtctttgccactgaccgagactcaggacccaatggacgtctgacctacagcctgcaacagctgtctgaagacagcaaggccttccgcatccacccccagactggagaagtgaccacactccaaaccctggaccgtgagcagcagagcagctatcagctcctggtgcaggtgcaggatggagggagcccaccccgcagcaccacaggcactgtgcatgttgcagtgcttgacctcaacgacaacagccccacgttcctgcaggcttcaggagctgctggtgggggcctccctatacaggtaccagaccgcgtgcctccgggaacactggtgacgactctgcaggcgaaggatccagatgagggggagaatgggaccatcttgtacacgctaactggtcctggctcagagcttttctctctgcaccctcactcaggggagctgctcactgcagctcccctgatccgagcagagcggccccactatgtgctgacactgagtgctcatgaccaaggcagccctcctcgaagtgccagcctccagctgctggtgcaggtgcttccctcagctcgcttggccgagccgcccccagatctcgcagagcgggacccagcggcaccagtgcctgtcgtgctgacggtgacagcagctgagggactgcggcccggctctctgttgggctcggtggcagcgccagagcccgcgggtgtgggtgcactcacctacacactggtgggcggtgccgatcccgagggcaccttcgcgctggatgcggcctcagggcgcttgtacctggcgcggcccctggacttcgaagctggcccgccgtggcgcgcgcttacggtacgcgctgaggggccgggaggcgcgggcgcgcggctgctgcgagtgcaggtgcaagtgcaggacgagaatgagcatgcgcccgcctttgcgcgcgacccgctggcgctggcgctgccagagaacccggagcccggcgcagcgctgtacactttccgcgcgtcggacgccgacggccccggccccaatagcgacgtgcgctaccgcctgctgcgccaggagccgcccgtgccggcgcttcgcctggacgcgcgcaccggggcgctcagcgctccgcgcggcctggaccgagagaccactcccgcgctgctgctgctggtggaagccaccgaccggcccgccaacgccagccgccgtcgtgcagcgcgcgtttcagcgcgcgtcttcgtcacggatgagaatgacaacgcgcctgtcttcgcctcgccgtcacgcgtgcgcctcccagaggaccagccgcctgggcccgcggccctgcacgtggtagcccgggacccggatctgggcgaggctgcacgcgtgtcctatcggctggcatctggcggggacggccacttccggctgcactcaagcactggagcgctgtccgtggtgcggccgttggaccgcgaacaacgagctgagcacgtactgacagtggtggcctcagaccacggctccccgccgcgctcggccacgcaggtcctgaccgtcagtgtcgctgacgtcaacgacgaggcgcctactttccagcagcaggagtacagcgtcctcttgcgtgagaacaaccctcctggcacatctctgctcaccctgcgagcaaccgaccccgacgtgggggccaacgggcaagtgacttatggaggcgtctctagcgaaagcttttctctggatcctgacactggtgttctcacgactcttcgggccctggatcgagaggaacaggaggagatcaacctgacagtgtatgcccaggacaggggctcacctcctcagttaacgcatgtcactgttcgagtggctgtggaggatgagaatgaccatgcaccaacctttgggagtgcccatctctctctggaggtgcctgagggccaggacccccagacccttaccatgcttcgggcctctgatccagatgtgggagccaatgggcagttgcagtaccgcatcctagatggggacccatcaggagcctttgtcctagaccttgcttctggagagtttggcaccatgcggccactagacagagaagtggagccagctttccagctgaggatagaggcccgggatggaggccagccagctctcagtgccacgctgcttttgacagtgacagtgctggatgccaatgaccatgctccagcctttcctgtgcctgcctactcggtggaggtgccggaggatgtgcctgcagggaccctgctgctgcagctacaggctcatgaccctgatgctggagctaatggccatgtgacctactacctgggcgccggtacagcaggagccttcctgctggagcccagctctggagaactgcgcacagctgcagccttggacagagaacagtgtcccagctacaccttttctgtgagtgcagtggatggtgcagctgctgggcccctaagcaccacagtgtctgtcaccatcacggtgcgcgatgtcaatgaccatgcacccaccttccccaccagtcctctgcgcctacgtctgccccgcccaggccccagcttcagtaccccaaccctggctctggccacactgagagctgaagatcgtgatgctggtgccaatgcttccattctgtaccggctggcaggcacaccacctcctggcactactgtggactcttacactggtgaaatccgcgtggcccgctctcctgtagctctaggcccccgagatcgtgtcctcttcattgtggccactgatcttggccgtccagctcgctctgccactggtgtgatcattgttggactgcagggggaagctgagcgtggaccccgctttccccgggctagcagtgaggctacgattcgtgagaatgcgcccccagggactcctattgtctcccccagggccgtccatgcaggaggcacaaatggacccatcacctacagcattctcagtgggaatgagaaagggacattctccatccagcctagtacaggtgccatcacagttcgctcagcagaggggctagacttcgaggtgagtccacggctgcgactggtgctgcaggcagagagtggaggagcctttgccttcactgtgctgaccctgaccctgcaagatgccaacgacaatgctccccgtttcctgcggccccattatgtggccttccttcctgagtcccggcccttggaggggcccctgctgcaggtggaggcggatgacctggatcaaggctctggaggacagatttcctacagtctggctgcatcccagccggcacgtggattgttccacgtagacccaaccacaggcactatcactaccacagccatcctggaccgtgagatctgggctgaaacacggttggtgctgatggccacagacagagggagcccagccctggtgggctcagctaccttgacggtgatggtcatcgacaccaatgacaatcgccccaccatcccccaaccctgggagctccgagtgtcagaagatgcgttattgggctcagagattgcacaggtaacagggaatgatgtggactcaggacccgtgctgtggtatgtgctaagcccatctgggccccaggatcccttcagtgttggccgctatggaggccgtgtctccctcacggggcccctggactttgagcagtgtgaccgctaccagctgcagctgctggcacatgatgggcctcatgagggccgtgccaacctcacagtgcttgtggaggatgtcaatgacaatgcacctgccttctcacagagcctctaccaggtaatgctgcttgagcacacacccccaggcagtgccattctctccgtctctgccactgatcgggactcaggtgccaacggtcacatttcctaccacctggcttcccctgccgatggcttcagtgttgaccccaacaatgggaccctgttcacaatagtgggaacagtggccttgggccatgacgggtcaggagcagtggatgtggtgctggaagcacgagaccacggggctccaggccgggcagcacgagccacagtgcacgtgcagctgcaggaccagaacgaccacgccccgagcttcacattgtcacactaccgtgtggctgtgactgaagacctgccccctggctccactctgctcaccctggaggctacagatgctgatggaagccgcagccatgccgctgtggactacagcatcatcagtggcaactggggccgagtcttccagctggaacccaggctggctgaggctggggagagtgctggaccaggcccccgggcactgggctgcctggtgttgcttgaacctctagactttgaaagcctgacacagtacaatctaacagtggctgcagctgaccgtgggcagccaccccaaagctcagtcgtgccagtcactgtcactgtactagatgtcaatgacaacccacctgtctttacccgagcatcctaccgtgtgacagtacctgaggacacacctgttggagctgagctgctgcatgtagaggcctctgacgctgaccctggccctcatggcctcgtgcgtttcactgtcagctcaggcgacccatcagggctctttgagctggatgagagctcaggcaccttgcgactggcccatgccctggactgtgagacccaggctcgacatcagcttgtagtacaggctgctgaccctgctggtgcacactttgctttggcaccagtgacaattgaggtccaggatgtgaatgatcatggcccagccttcccactgaacttactcagcaccagcgtggccgagaatcagcctccaggcactctcgtgaccactctgcatgcaatcgacggggatgctggggcttttgggaggctccgttacagcctgttggaggctgggccaggacctgagggccgtgaggcatttgcactgaacagctcaacaggggagttgcgtgcgcgagtgccctttgactatgagcacacagaaagcttccggctgctggtgggtgctgctgatgctgggaatctctcagcctctgtcactgtgtcggtgctagtgactggagaggatgagtatgaccctgtatttctggcaccagctttccacttccaagtgcccgaaggtgcccggcgtggccacagcttgggtcacgtgcaggccacagatgaggatgggggtgccgatggcctggttctgtattcccttgccacctcttccccctattttggtattaaccagactacaggagccctgtacctgcgggtggacagtcgggcaccaggcagcggaacagccacctctgggggtgggggccggacccggcgggaagcaccacgggagctgaggctggaggtgatagcacgggggcctctgcctggttcccggagtgccacagtgcctgtgaccgtggatatcacccacaccgcactgggcctggcacctgacctcaacctgctattagtaggggccgtggcagcctccttgggagttgtggtggtgcttgcactggcagccctggtcctaggacttgttcgggcccgtagccgcaaggctgaggcagcccctggcccaatgtcacaggcagcacccctagccagtgactcactgcagaaactgggccgggagccacctagtccaccaccctctgagcacctctatcaccagactcttcccagctatggtgggccaggagctggaggaccctacccccgtggtggctccttggacccttcacattcaagtggccgaggatcagcagaggctgcagaggatgatgagatccgcatgatcaatgagttcccccgtgtggccagtgtggcctcctctctggctgcccgtggccctgactcaggcatccagcaggatgcagatggtctgagtgacacatcctgcgaaccacctgcccctgacacctggtataagggccgaaaggcagggctgctgctgccaggtgcaggagccactctctacagagaggaggggcccccagccactgccacagccttcctggggggctgtggcctgagccctgcacccactggggactatggcttcccagcagatggcaagccatgtgtggcaggtgcgctgacagccattgtggccggcgaggaggagctccgtggcagctataactgggactacctgctgagctggtgccctcagttccaaccactggccagtgtcttcacagagatcgctcggctcaaggatgaagctcggccatgtcccccagctccccgtatcgacccaccacccctcatcactgccgtggcccacccaggagccaagtctgtgccccccaagccagcaaacacagctgcagcccgggccatcttcccaccagcttctcaccgctcccccatcagccatgaaggctccctgtcctcagctgccatgtcccccagcttctcaccctctctgtctcctctggctgctcgctcacccgttgtctcaccatttggggtggcccagggtccctcagcctcagcactcagcgcagagtctggcctggagccacctgatgacacggagctgcacatctagctgtggcccaggctgggccccgacctgggatgcgcacagtgtccccaacgcaggccccactctgagcctgccctgggcagcctcggactatgactggctacggggaggccaccaccaggccccagctctccaccctgaactccccagccccctcagagtactaggaccacagaagccctgttgctcactgacctgtgaccaggtccaatgtggggagaaatatgaaggaggtagcagccctgggttctcctcagtgagggatccctgccctgcaccagcaccctgagatggagctgagactttatttattgggggtagggggatggaggaggtccctccaacatgtttggacccagctcctttgggttccactgacacccctgcccctgcccctgcccagaaccaagtgccatttctcactctggagccttaataaactgcaatttgtatccagtc

SEQ ID NO: 124848 - DNA, 5064 bp, Homo sapiens
  Payload ID: 4514
  Gene Symbol: DCHS2
  Gene Name: dachsous cadherin-related 2
  ENST ID: ENST00000339452
  CDS Start-End: 362-4471
aataatgcacctgactttaccaggggggaacaaccagccgagtagaacaaggaacagatgtaaagggaataaaaggagagagaaaaagagatgagattcgtttaaagaaatccaggggcagaagaggtggctgccgcggcagaggcagctagagcttacttccctgtctgcgtgagctgcaggcagaggacgctttcaccagttgcagatgtaacctcgggaattcctgggccgtcggtttgtttgccaaacaaagtcttttcttctctggctcagacactgaagaggctcctggatttttctgcgatcctgccacaagctggcagttacccgagagccttcccaaggagctggaggagaaatgagcccttgtgggcggaagatgggcgaagggcgtcagcagcggcgggctccggtcgggaagctccttctgctccccgggaggagagatacaccccatgggcggtcaggcagcagcggcgccaggacgcagcgctccctgctctggctcttggtgcacgtgtggctgtgggcggcctcgggctcctctgcccagttgttcaacctcaccctttccgtagatgaggggcttcccccggacacgctggtaggtgacatccgcgccgggctgccggccgcgcagcagcaggaggggagcggcttctttctgtcggaggactccgatgactccccgctgctggacgacttccacgtgcacccggacaccggcatcatccgcactgcgcggcgcctggaccgcgagcggcgggaccactacagcttcgtcgccgccacgctgctgggcgctgtggtgcaggtggagattcgcgtcaacgacgtgaatgaccactcgccccgctttcccctcgactccctgcaactcgacgtctccgagctcagcccgccagggaccgccttccgcctgccagttgcccacgatccggacgccggactgttcagcactcagggctacaccctggtgcaaccgtccgacctgcccaaggaccccgcaggcccgttcttccagttgcgctaccggactccggggccactaccgtcaccgcttttgccaggctcctcgtcacccctggagcctctagatctggtgctgctgcggcgcttggaccgagaggaggcggcggcgcaccggctgcagatcgaggcatgggacggcggccgaccccggcgcaccggcctcctgagcgtggagctgcgcgtgctggatgagaacgacaacccgccggtctttgagcaggacgagtaccgcgccgcggtgcgcgaggacgcccagccgggcgccgaggtctgtcgcgtgcgcgccaccgaccgcgacctggggcccaatggcttcgtgcgctacagcgtccgcgcccggcaagtgcctggggcgggtagcggcggcggggcactgggcgacgcggcctacttcgcggtggaggagctgagcggcgtggtgcgagtgtggagacctctggaccgcgaggcacaggcctggcaccagttggtggtggaggcccgcgatggaggcgccgagcctgaggttgccacggtgcgcgtgtccatcgccgtgctggacgtgaatgacaaccggccagcaattcacgtgctctttctcacagagggaggcgtcgcccgtgtctctgaaggcgcccgaccgggcgactacgtggctcgcgtctcggtgtctgacgcggacggtgactgggagaaggaagatgaggccacaggggagcttggtgtgggtcttggagacgggagcatctctctgtccttggaaggcggagagggagacttcgcgttgctacccggcggccccccaggggtatttttcctttgcgtggaggggcccctggacagagagagccgcgatctgtatgagttactactggtggccacggacgcggggtccccgccgctgagcacggaggagacgctgctactccgggtcgctgacctcaatgaccaaccacctctcttcagccaacagcattacaaggcctcagtgtccgaggccgcggcccctggcactgtagtcatgtgggtcagcgcctccgatgccgacgaggcaggcagtgatcacgcctggctgcgctacactgtagtccaactctcggctccctgcaatctcggctccctgcaatcaaagatggtccacaccgcagagtgtggaccatcttttgccattgattccgaaagcggtgcgatcagcactatccggactctagaccgagaggtccaggaggcggtggagctgaaagtggtggcccaggacctcggagagcccccactctctgccacctgcctggtgagcatcaccgtagatgatgtgaatgacaatgagcccatcttctggaggcaggtgtacaatgccaccattgcagagcatgccccggttggacactgctttctgcaggtgacagcctctgatgcagattcaggactctatggctttattgaatattctctttatgatggattcctgagctatgaagcacctcaggcattccggatcgaccctcatgatgggcaaatctgtgtttctcaagatatcgacagggaaagggatccagctacctatgatctcctggtggaagctaaggatgggggtgggctaagtgcccaagcctttgttcgtgtggacctggaggacgtgaatgataatcatcctgtgtttaacccatcaacctatgtgacgagcatcagtgatgagacccagccaggcaccgagatcatcaatgttcttgccactgaccaggactctgggatatatgggacagtggcttatgagcttattccaggaaacgtgtcgtccctttttaccattgactccaccacaggaattatttacttaacattacctcttagtcatttggaatctaccacactttcgttgatggtctctgctcaagacggtggtgggctcacagctgtcattaatgccgatgtcaccatacacattttccagacaactctggcacctgctgagtttgaaaggcctaagtacactttcttagtttatgaagatgtgcctgaagatagtcccattggaacagtgaaagcaagagagcccttgaactcctcagaaccaatcttttacaggatttcttctggtgatctcggcggaaagttctccattcacccgcggctgggcactattcgcacccggaagcccctggatcacgagacgcagcccgtggttgtgctcacggtgcaggcgcagctcggcagcgccccagcctgcagcagcaccgaggtcaacataacagtcatggatgtcaatgacaaccacccagcgttcctcaggacctcggatgagattagaatatcccagaccacgccccctggcacagccttgtacctcgcacgtgcggaagacagagacagtgggcggaacggactcatccggtactccatcgccagcccgcagccaggcgtctttgccatcgacagagccctgggggtgctgttcctcaacggcagcctgggcgcgggcgagcagcgggagctcacgctgactctcagggccgaggaccaaggcgtgcatcctcaggcagccctgctggtgctgacagtcgttatcgagaaacgcgaacacagcccatcctggactttcgaacatttggtctatcaagtggaagtcagtgagtctctctcaccgatgacacaaatgctgcaaacacaggcgcacccacttggcccccagcgtgcagcctcgcctcttaggtactcgctggaacccagcgtagactctgctatgtttggaatccgcccttacacgggctggatttatttgcggcgacagtttgactatgaatccacccaaacatataattttagagtgtttgcttggatccccgaggacggattcttgcaaaatgtgagcactacagtcattgttcgtgtctgggatgagaatgacaattcccccaccttcttgcatgatgtgttgtttttgaaagtcgaagagagccctgttccccaaggggtaataggcaaaattacagctattgacatggactctggaaagaatggacagctattatatttccttttgtctgatggaaaattcttcaagatgaatcctaatacaggagagttaatcaattgggtggcactggatcgtgagcaccgggggcaccatgagatgactgtgctagtgacagaccgcggctccccaccacgaaacgccaccatggcggtttacgtctcagttactgacatcaatgataacaggcccttcttcccccagtgtctccctggaaaggagttacacgtgaaggttctggaaggtcaaccagtaaatatgttggttacaactgtgtttgcaaaggatcctgatgaaggaaataatgcagaagttacatactcagtatcttcagctagacctatgcctctgaagggaaaaacagcatttgggaagcagtcgtgcaaaaaacaaacaaacaaacaaacaaacaaaatcctgacctgaatctggtcagttctctagatctgcctcccaatttaaggaaaacataagaatagaggaacatattatgctacacgttggagatgcaacagcaaatctagatcatggaaaatgtcaggatacaagttccagtttattcaacaaataaattgcaaggacaaatagagagatgggtggcaggaatccatagattaaagaaatatgcaatatatggactttattttgatcttaatgtaaacaagaaaaataaagagtatttatgggatggttgaaaatttgaaaacttactgaatatttggtgatactgtgaaccattattaatttttaaggtataatatggtactgtgatgattgtgttaaaatatttattttttaaagatgcattttgaaatatatacagaagaaataatatgacttctggaacttacttcaaaaaaaatgggagaagcgaagtatatacatggggaatagatgaaataagattggccatgagctgatcattgttgaagctaggtgatggactcgtgaaagtttattataccattttgtccacttttttgtatgcattttccataataaaaatttttaaaaagtga

SEQ ID NO: 124849 - DNA, 11249 bp, Homo sapiens
  Payload ID: 4514
  Gene Symbol: DCHS2
  Gene Name: dachsous cadherin-related 2
  ENST ID: ENST00000357232
  CDS Start-End: 1-8750
tgagactggatgagataacgaaatcagagaatgaagacggagaaaagaagatgtttactcagcagtttgaaagtactgatgcctgtgtatatgaggtgtatgtgaaaataaattccattgtgaaatctcagagtcagtgtggattgaaaagaggtagtcccgagactgagctctggggtgctatagtgttcagaagccaggaagagaacgcaaaaccagtgaaggaaactgaggtgacagcctctgatgcagattcaggactctatggctttattgaatattctctttatgatggattcctgagctatgaagcacctcaggcattccggatcgaccctcatgatgggcaaatctgtgtttctcaagatatcgacagggaaagggatccagctacctatgatctcctggtggaagctaaggatggggatgagcagagaatgacacatttagccctggtgaagggtgggctaagtgcccaagcctttgttcgtgtggacctggaggacgtgaatgataatcatcctgtgtttaacccatcaacctatgtgacgagcatcagtgatgagacccagccaggcaccgagatcatcaatgttcttgccactgaccaggactctgggatatatgggacagtggcttatgagcttattccaggaaacgtgtcgtccctttttaccattgactccaccacaggactctatagtccagaggtagaaattctgagtgctgtcaacttttcagcagacaaggaagtaatgaacagtttagagatgtttttacctctgctaaggcacttcaagaaggttgaaagagatgaggaagctgcagaaaaaaaatttgaagctagcagaggttggttcatgaggtttaagggaagacgccatctccattacctaaaagtgcaagatgaagcagcaagtgctgatggagaagctgcagcaaggtatgtagcaaatctagctaagattcttggtgaaggaattatttacttaacattacctcttagtcatttggaatctaccacactttcgttgatggtctctgctcaagacggtggtgggctcacagctgtcattaatgccgatgtcaccatacacattttccagacaactctggcacctgctgagtttgaaaggcctaagtacactttcttagtttatgaagatgtgcctgaagatagtcccattggaacagtgaaagcaagagagcccttgaactcctcagaaccaatcttttacaggatttcttctggtgatctcggcggaaagttctccattcacccgcggctgggcactattcgcacccggaagcccctggatcacgagacgcagcccgtggttgtgctcacggtgcaggcgcagctcggcagcgccccagcctgcagcagcaccgaggtcaacataacagtcatggatgtcaatgacaaccacccagcgttcctcaggacctcggatgagattagaatatcccagaccacgccccctggcacagccttgtacctcgcacgtgcggaagacagagacagtgggcggaacggactcatccggtactccatcgccagcccgcagccaggcgtctttgccatcgacagagccctgggggtgctgttcctcaacggcagcctgggcgcgggcgagcagcgggagctcacgctgactctcagggccgaggaccaaggcgtgcatcctcaggcagccctgctggtgctgacagtcgttatcgagaaacgcgaacacagcccatcctggactttcgaacatttggtctatcaagtggaagtcagtgagtctctctcaccgatgacacaaatgctgcaaacacaggcgcacccacttggcccccagcgtgcagcctcgcctcttaggtactcgctggaacccagcgtagactctgctatgtttggaatccgcccttacacgggctggatttatttgcggcgacagtttgactatgaatccacccaaacatataattttagagtgtttgcttggatccccgaggacggattcttgcaaaatgtgagcactacagtcattgttcgtgtctgggatgagaatgacaattcccccaccttcttgcatgatgtgttgtttttgaaagtcgaagagagccctgttccccaaggggtaataggcaaaattacagctattgacatggactctggaaagaatggacagctattatatttccttttgtctgatggaaaattcttcaagatgaatcctaatacaggtccagcaggcaccatctatgtcataacctgggcagatggtgctgctgcctttagtgggacagactttgcattcagttctgatgaacttcaagcctttgttctcaagtctctgttctgtgaattaggagaaggagagttaatcaattgggtggcactggatcgtgagcaccgggggcaccatgagatgactgtgctagtgacagaccgcggctccccaccacgaaacgccaccatggcggtttacgtctcagttactgacatcaatgataacaggcccttcttcccccagtgtctccctggaaaggagttacacgtgaaggttctggaaggtcaaccagtaaatatgttggttacaactgtgtttgcaaaggatcctgatgaaggaaataatgcagaagttacatactcagtatcttcagaagatagttctgatcactttaagattgacgccaacaatggtgaaataagaacaaccacaatactttcgtatgattatagaccttcctacagaatgagtgtcattgccactgaccagggagtgcctcctcttcaaggacaggcagttgttaatattcaggtgatcccactatccaaagggagagcaatcatgtctcagaatattagacatttaattataccagaaaatttgaagcccacaaaaataatgagcttgataaagtcatctgatcaccttcaacaacattataatggaaagttacattttagtattgttgcagatgataaggatggacactttgaaatagacagctcaaccggagacttgtttctttctaaggaacttgattatgagacgacatctcattatcttttcagagtgattactacagaccatagcaaaaacctttccctgagtagcacagtcttccttagtatcgatgtggaagatcagaatgaccattccccatctttccaggatgagctcattgtgatcagtgtagaggagaatgttcccataggaaccctggtgtatgtcttcaatgccaaagatgatgacggcagttttttgaacagtagaatacaatactacattgaatcccacaaccctggcacgaatccatttctcatccacccctcatttggcacactagtcactgtgtcccgtcttgacagagaaagcattccaactgtcatcctgacagtaacagcatctgatcaggctgtgaatgtgacagaccggcgactgagatcactgacagcacaaatagtgattttggatgtaaatgaccacaaccccacttttatttctttccccaatgcccatgtcaaagaggatgtcacagtgggctccttggtccaccacataactgctcacgatccagacgaaggaaggaatggaaaagtaacatacagcatcctctcaggaaatgaaaacatgacgtttatgctagatgagtcatcaggcttactaaccacaacctgtcctttggattatgaaatgaaaactcagcatattctgactgttctggcactggatgatggcacaccagcactttcttcatcccagactttgacagttactgttcttgatgtaaatgatgaagctccagtatttaagcagcacctgtatgaagcctcagtgaaagaaaaccaaaatccaggggagtttgttaccagggttgaagctctggacagagattcaggagtcaattccaagcttcagtttgaaatcatgccaggtgcttcatttgaattattcgagataaattctgacactggagaggtagtgacaaccaccatacttgacagagaaattcaagaagtcttcacccttcgagtactagtacgagatgggggattcccttcattgtccagcaccacaacaatcctctgcactgttgaagatgaaaacgatcacgcaccagagtttattgtttccagttatgacattgaggttctggaaaaccaggaaccagaggttgtctatacggttttagcctctgatatggatgctggcaataacagagctgttgaatatcacataattgatggaaatactgatgagtgctttactataaatgagatgtcaggagaactctcaaccactcgtgctttggaccgggagcaaatcagcaattttacccttgtcattctgtgctctgacctgggagatccacctaggagctctgtaatacacctgcaagttagagttttggatgccaatgaccacagtccttcttttcccacactttattaccagtcctctgtgagagaagatgctgaagtgggaacagtggttcttgtgctttcagctgtggacaaggatgaaggcctgaatgggcaaactgagtattttctgactgatgaggcttctggtgcattcaccattgatcctatgtcaggcacattgaaaaccagcaacaccctcgaccgtgaagccagatctcagcatacatttagtgctgtggccagagactgtagcatccagggttcacgaagcaccactgtaattataaaagtatatgtcactgatgttaatgacaatgatccagttttggaacagaacccttttgatgtgtttctttcccccgagtcgcctacaaaccagacaactgtcattgtgagagctgatgacctggacttggggcccaatggaactgtggtttttagttttgcagagacccagtcaatgttttctattgataaatacacaggagaaattcaatttcagcaaaatccatcttcagaatacttccctatctggctgcagttaaaagttacagaccagggcattccagccaggacaaccacgggtctcttggtcattcacatggaaggagaagatgtaaagatttccttcagccaccacctgtataaagggctcgtgactgaaaattgtgaggcaggtacttctattgtgactgttaaagcttttgctcctgactcaattcaggacagcatgaaatattcaatttttagtggaaatgaagatggagttctttccctgtgctctaagtcaggacaactcactgtgaaagaacccaagtttcttgattttgaagtcagaaatgaggttcaactcatcgttttagctgaaagtagtgggcatagagcctattgcaaagtagcagtcttgatacaggatgagaatgataattcaccatgctttgaacaaagcatttaccaggcatcagtgtctgaaagccaactctacaatgctcatgtcatacaggtttttgctaccgacttggacagtggtttgaacggcctgattgagtattctattctgtctggcaaccaagaagaagcattccagattgatgcactgagtggtgtgataacaacaaaagcgattctagattacgagctcaccagctcctacagcttgattgtccaagccacagataaagggatgcccaggctttctaatacgactgtaatcaaggtacaggtgactgatataaatgacaatgccccagcttttctcccctctgaagcagtggaaattacagaagattctttgcctggtgtaattgtgactcatgtgtcagttcatgatgtggatttgaattcagctttcatattcagttttgccaaagagagtaatcctggaaccaagtttgctattgatcagaacactggagtggtggtgttggtgaaaacattggattttgaagaaatgactgaatatgagctgctcatccaaatttctgattcagtgcactacacagagggagcacttgtagtccgtgtgctggatgtcaatgataatccaccagtgttttctcaagatttctatcaggtcacagttcctgaatcaatacctgtggggtattcagtgctgactctgtcagccacagacttagaaagcaatgagaacatttcttacagaattctatcctcttctaaggaattctccattgatcctaagaatggcacaatatttactatcagtcccgtattacttctggatacaatatcaacaactcaatttcttgtggaagccagtgatggtggaaatcctgacctgagagctcttactttagtggagataggaatagaagatatgaacaattatgcccctgaattcacagtcaaatcctataatcttagcctaagtgaggatgctctggttggaagcacgcttgttacattttcaaacatcgaccatgactggacccgtgaaaacacatatgttgaatattccatcatcagtggtaattcacagaacaattttcatgtggaaactaagttctttcattcagaatatccttataagcaagtcggttatcttgtgttgcttcacagtctggacagagaagcaagtgctagccatgagcttgtcattctggcatctgacagtggctgccctccattgagttccacagctgtcatatcaatacaagtacttgatgtcaatgacaatcccccaaacttcagcagcctgagctatcacacccatgtcaaggaaagcacccctctagggagtcacatcactgtggtctcagcaaatgaccgtgacacagggtcacatgcagaaatcatctacaacatcatctctggaaatgagaagggacatttttacttagaagaaaacactggagttctttatttgattaaacctctggattatgaaaaaatgacaaaattcaccttaactgtccaagcttcagatgcagaaaagaaacatttttcttttgcagttgtgtttgtcagtgtcctggatgataacgaccatgcacctcagtttatgttctcaagcttcagctgtattgttccagaaaatctgcctatttcctctaccatatgctctataaatgctctggattttgatgctggtccgtatggagaattgacctattctattgtatcaccctgttttctcactcatggaatgtcttatgatcatgatctcttcctcattgaccctttgacaggggatattcatgctaagcaaatccttgactatgaaaatggcaataaatactgcctcacagtccaagccaaagacaaaggtgatgcaactgcctccttagtggtctgggtggatattgaagggatagatgaatttgagcccattttcactcaagatcagtattttttcaccctcccagaaaagaataaagacagacagttgattggcagagtggaagcctcagatgcagatgctggtattgatggagtcattctttactcccttggaacctcatctcctttcttttcagtaaataaaaccaatggaaatatttatttgattagagcccttcccctaataaaaagtcaactcaacaaagaagacaccttggaaatgaaaataatcgctcatagtcccaaatcagattccaagtttgcatcttgcactgtttttgtgaatgtgtctttctcctctgaaggaacacccttggcagtgttcgccagcagcttttcaatcagcctggtggtctcctttttagtgtttctgatactcatctgcattctaattgtaatgattttaagacataaacaaaaagacacaataaacaattatgaggagaagaaaacctcatctttagatgcggacttgagagtgacccgggatgccagtgtgctcaaagccttccagaaaactgacgactgcagtaacgaggtggtccctgtggatgccactccggaatggttgagtttaataagtatcatggagaaggatattgtcaatctgtacagacactcaaactccagtggccactgttctgtggaaggagaaactgcagaagataaggaaatccagaggataaatgagcatccctacagaaagtgctcagactcagctctgagtgaccacgagtccagggtgccagactcgggtatcccgagggactcagaccagctctcctgcctatctggggaaactgatgtgatggtgactgccgaaacagcagaagccagccaaacatttggggaaggagatcaaggggaaggctgcagcaccacctgtgctcaaaataatgtgttaccccagacagttcagaagagagaggcaaaagagagcatcctggctgacgttagaaaagagtctgtctttatttcaggtgatcaggaagtaaggtgtgcagctctttcaactcagacgacctctgatcatgatggaaaagacaactatcactggaattatcttcttagttgggagcccaaattccaacctcttgcctcagtatttaatgatattgcaaaactaaaggatgaacatttgcatatgcctggcattccaaaagagaagaaatcttttgtttttccaccccctttgataacagcagtagcccagcctgggattaaagcagtcccaccaagaatgccggcagtaaacctggggcaggtgcctccgaaacacccacgctctcccatcccctaccatcttggttctctgccagaaggcatgactcccaatttttctccatctctttccctattgacgatgcagcctcctgccttgtctccactgttgagagaaggagaattattaggaacacacatcagtggtacatgccatgaacttaaagcagaagatgaagttcaaatatgaaaccactgggatgccaagtacctgctcaccattggtcatgaatgaatgaacaaaatgttttcaagccagcaactcgagattgggctcatttttatctaaaagcaagtgatgtaatttagttagagtttttaaaacttccccattaaagtttctccaatttcttccagccttaatgaaaagttatttcctcttttaatccttatgtgttgctctcaggactcacatttgtatatattaagtagtgtatattctgtcagacctgttgtctgtatgattagacttccaaaggacacagtgaacttaactgactgccagaatgtttatatggaaacaaaatatagtgtactctggtcacattgctgctgatcacactgctatatcaaaaacaaactagtaaaggctaaatggagaatgagtttaggtcagaacatatagcagagaggggaagtctagaggaataaactttcattttaagataaagcaatagttggtggatctgatatatttagaggagtatttctccatttttccccatataccacacctgtagagtttagccataattgaatttcaatgtggagtcttttggaaaactaataaaaaattcagaaggaaatttgtcataactctgtgacaatagggagaaacaaataggatttataatgataggtaatataaataattattcatgattcaataaaccagaaatgcatgttcctgatagagggccaggattgatactcgcaatatttatgtggtttgctaccacctgaaacatattatcttggccttctttacaaacagaatggcttttttttcaggtcttgtcttataagtaggtgtgggtaaagacattaaacttcaaaggttaatttatagcaatgtcttcattttattttcttctagatacagtaacttttttgtgtgaaataatttatccactcaatgtcagtttttaaaatttgtgtagataaaaatcatgtcattagctaatgataaatctcatagagtaatttagcaatatatttttaaatgaagttttttatggaaatgtttctactataaaagttaagaatagaagtcagaagtctttttaccatttgctcacacacttgcagctttaatttaactgtcattagatggagcagtttggcacatggttaaaatgactctgtacaattactattttagaaatatagcagtgctagatggtgctcacatacaatgctctagccttctttctgataagcctgggaatccctcacagattctcatccctttcaggaaggtggacagcatcctgacgatggtggttcagaagtcctcttcctgtggtcagcatgagggccaggtgttaggctaacagtttaggaattctaatgtgaaatctaaagggtatcgtgtggctttcttagtagttaggatgggcttctactacagatatagttcctttgtgttcttcttccataggcctcatctgtgaaattttgtgacataatttctctttactaaaaaatattgcaaggtgcagtgtttgatgtctggttttgtagataagtaattctacagcttcctatgctgatattttctattatctatctatgctgactgagattgggaacaaatgtataaagctatattacaaattgtatgaaacatgaaggtttttgaataagcctgaaatcctaggaaaaatcctttaggagtagaaaatttaaatactatgggactgatatatgatgtttctccttttcttcctggcatctggggaagaagatttcatgacttatgtaaaaaaaaaacccacacatatttaatcatttatgtgttccagtatttattatctctgactcttttgaaaacattgctttgagcatagaaagaaaccctatactatattttcctaattatatatggaagttttcttttcacaatagaattatttctggaaactaagaacattttgttgtttttaattaaacaggttcttcatttacttatgcttaaaaagagttattcatctacctattccctaagttagttatttattactgtgatttatttactcattatggatgtgattctgtatgttttctagccattgcataacaagagaagacatgtaatagagcttttttaccaatatttaatggatttttaattgatgggtttatcagtctgtatccagtgccacaatgccaccaaacaagtactacaagtgggaatggggttaaaaatgtgaacacgctggttaagtgtttgcaataaatcgtatgtcagctctttcaactagagtgctttttttcctaagtaaacaatataatttgtacatttttccttcaagtttaatattaacttgcctcatatgttctgggttactttgctgatctatgcactggctttagcactctggagggggtacagaacttgttagtggaaaatcatattaagccccaaattcataagctataaaataaaagacagttgtctcttgtggaa

SEQ ID NO: 124850 - DNA, 8912 bp, Homo sapiens
  Payload ID: 4514
  Gene Symbol: DCHS2
  Gene Name: dachsous cadherin-related 2
  Uniprot ID: Q6V1P9
  ENST ID: ENST00000623607
  CDS Start-End: 1-8751
atgagactggatgagataacgaaatcagagaatgaagacggagaaaagaagatgtttactcagcagtttgaaagtactgatgcctgtgtatatgaggtgtatgtgaaaataaattccattgtgaaatctcagagtcagtgtggattgaaaagaggtagtcccgagactgagctctggggtgctatagtgttcagaagccaggaagagaacgcaaaaccagtgaaggaaactgaggtgacagcctctgatgcagattcaggactctatggctttattgaatattctctttatgatggattcctgagctatgaagcacctcaggcattccggatcgaccctcatgatgggcaaatctgtgtttctcaagatatcgacagggaaagggatccagctacctatgatctcctggtggaagctaaggatggggatgagcagagaatgacacatttagccctggtgaagggtgggctaagtgcccaagcctttgttcgtgtggacctggaggacgtgaatgataatcatcctgtgtttaacccatcaacctatgtgacgagcatcagtgatgagacccagccaggcaccgagatcatcaatgttcttgccactgaccaggactctgggatatatgggacagtggcttatgagcttattccaggaaacgtgtcgtccctttttaccattgactccaccacaggactctatagtccagaggtagaaattctgagtgctgtcaacttttcagcagacaaggaagtaatgaacagtttagagatgtttttacctctgctaaggcacttcaagaaggttgaaagagatgaggaagctgcagaaaaaaaatttgaagctagcagaggttggttcatgaggtttaagggaagacgccatctccattacctaaaagtgcaagatgaagcagcaagtgctgatggagaagctgcagcaaggtatgtagcaaatctagctaagattcttggtgaaggaattatttacttaacattacctcttagtcatttggaatctaccacactttcgttgatggtctctgctcaagacggtggtgggctcacagctgtcattaatgccgatgtcaccatacacattttccagacaactctggcacctgctgagtttgaaaggcctaagtacactttcttagtttatgaagatgtgcctgaagatagtcccattggaacagtgaaagcaagagagcccttgaactcctcagaaccaatcttttacaggatttcttctggtgatctcggcggaaagttctccattcacccgcggctgggcactattcgcacccggaagcccctggatcacgagacgcagcccgtggttgtgctcacggtgcaggcgcagctcggcagcgccccagcctgcagcagcaccgaggtcaacataacagtcatggatgtcaatgacaaccacccagcgttcctcaggacctcggatgagattagaatatcccagaccacgccccctggcacagccttgtacctcgcacgtgcggaagacagagacagtgggcggaacggactcatccggtactccatcgccagcccgcagccaggcgtctttgccatcgacagagccctgggggtgctgttcctcaacggcagcctgggcgcgggcgagcagcgggagctcacgctgactctcagggccgaggaccaaggcgtgcatcctcaggcagccctgctggtgctgacagtcgttatcgagaaacgcgaacacagcccatcctggactttcgaacatttggtctatcaagtggaagtcagtgagtctctctcaccgatgacacaaatgctgcaaacacaggcgcacccacttggcccccagcgtgcagcctcgcctcttaggtactcgctggaacccagcgtagactctgctatgtttggaatccgcccttacacgggctggatttatttgcggcgacagtttgactatgaatccacccaaacatataattttagagtgtttgcttggatccccgaggacggattcttgcaaaatgtgagcactacagtcattgttcgtgtctgggatgagaatgacaattcccccaccttcttgcatgatgtgttgtttttgaaagtcgaagagagccctgttccccaaggggtaataggcaaaattacagctattgacatggactctggaaagaatggacagctattatatttccttttgtctgatggaaaattcttcaagatgaatcctaatacaggtccagcaggcaccatctatgtcataacctgggcagatggtgctgctgcctttagtgggacagactttgcattcagttctgatgaacttcaagcctttgttctcaagtctctgttctgtgaattaggagaaggagagttaatcaattgggtggcactggatcgtgagcaccgggggcaccatgagatgactgtgctagtgacagaccgcggctccccaccacgaaacgccaccatggcggtttacgtctcagttactgacatcaatgataacaggcccttcttcccccagtgtctccctggaaaggagttacacgtgaaggttctggaaggtcaaccagtaaatatgttggttacaactgtgtttgcaaaggatcctgatgaaggaaataatgcagaagttacatactcagtatcttcagaagatagttctgatcactttaagattgacgccaacaatggtgaaataagaacaaccacaatactttcgtatgattatagaccttcctacagaatgagtgtcattgccactgaccagggagtgcctcctcttcaaggacaggcagttgttaatattcaggtgatcccactatccaaagggagagcaatcatgtctcagaatattagacatttaattataccagaaaatttgaagcccacaaaaataatgagcttgataaagtcatctgatcaccttcaacaacattataatggaaagttacattttagtattgttgcagatgataaggatggacactttgaaatagacagctcaaccggagacttgtttctttctaaggaacttgattatgagacgacatctcattatcttttcagagtgattactacagaccatagcaaaaacctttccctgagtagcacagtcttccttagtatcgatgtggaagatcagaatgaccattccccatctttccaggatgagctcattgtgatcagtgtagaggagaatgttcccataggaaccctggtgtatgtcttcaatgccaaagatgatgacggcagttttttgaacagtagaatacaatactacattgaatcccacaaccctggcacgaatccatttctcatccacccctcatttggcacactagtcactgtgtcccgtcttgacagagaaagcattccaactgtcatcctgacagtaacagcatctgatcaggctgtgaatgtgacagaccggcgactgagatcactgacagcacaaatagtgattttggatgtaaatgaccacaaccccacttttatttctttccccaatgcccatgtcaaagaggatgtcacagtgggctccttggtccaccacataactgctcacgatccagacgaaggaaggaatggaaaagtaacatacagcatcctctcaggaaatgaaaacatgacgtttatgctagatgagtcatcaggcttactaaccacaacctgtcctttggattatgaaatgaaaactcagcatattctgactgttctggcactggatgatggcacaccagcactttcttcatcccagactttgacagttactgttcttgatgtaaatgatgaagctccagtatttaagcagcacctgtatgaagcctcagtgaaagaaaaccaaaatccaggggagtttgttaccagggttgaagctctggacagagattcaggagtcaattccaagcttcagtttgaaatcatgccaggtgcttcatttgaattattcgagataaattctgacactggagaggtagtgacaaccaccatacttgacagagaaattcaagaagtcttcacccttcgagtactagtacgagatgggggattcccttcattgtccagcaccacaacaatcctctgcactgttgaagatgaaaacgatcacgcaccagagtttattgtttccagttatgacattgaggttctggaaaaccaggaaccagaggttgtctatacggttttagcctctgatatggatgctggcaataacagagctgttgaatatcacataattgatggaaatactgatgagtgctttactataaatgagatgtcaggagaactctcaaccactcgtgctttggaccgggagcaaatcagcaattttacccttgtcattctgtgctctgacctgggagatccacctaggagctctgtaatacacctgcaagttagagttttggatgccaatgaccacagtccttcttttcccacactttattaccagtcctctgtgagagaagatgctgaagtgggaacagtggttcttgtgctttcagctgtggacaaggatgaaggcctgaatgggcaaactgagtattttctgactgatgaggcttctggtgcattcaccattgatcctatgtcaggcacattgaaaaccagcaacaccctcgaccgtgaagccagatctcagcatacatttagtgctgtggccagagactgtagcatccagggttcacgaagcaccactgtaattataaaagtatatgtcactgatgttaatgacaatgatccagttttggaacagaacccttttgatgtgtttctttcccccgagtcgcctacaaaccagacaactgtcattgtgagagctgatgacctggacttggggcccaatggaactgtggtttttagttttgcagagacccagtcaatgttttctattgataaatacacaggagaaattcaatttcagcaaaatccatcttcagaatacttccctatctggctgcagttaaaagttacagaccagggcattccagccaggacaaccacgggtctcttggtcattcacatggaaggagaagatgtaaagatttccttcagccaccacctgtataaagggctcgtgactgaaaattgtgaggcaggtacttctattgtgactgttaaagcttttgctcctgactcaattcaggacagcatgaaatattcaatttttagtggaaatgaagatggagttctttccctgtgctctaagtcaggacaactcactgtgaaagaacccaagtttcttgattttgaagtcagaaatgaggttcaactcatcgttttagctgaaagtagtgggcatagagcctattgcaaagtagcagtcttgatacaggatgagaatgataattcaccatgctttgaacaaagcatttaccaggcatcagtgtctgaaagccaactctacaatgctcatgtcatacaggtttttgctaccgacttggacagtggtttgaacggcctgattgagtattctattctgtctggcaaccaagaagaagcattccagattgatgcactgagtggtgtgataacaacaaaagcgattctagattacgagctcaccagctcctacagcttgattgtccaagccacagataaagggatgcccaggctttctaatacgactgtaatcaaggtacaggtgactgatataaatgacaatgccccagcttttctcccctctgaagcagtggaaattacagaagattctttgcctggtgtaattgtgactcatgtgtcagttcatgatgtggatttgaattcagctttcatattcagttttgccaaagagagtaatcctggaaccaagtttgctattgatcagaacactggagtggtggtgttggtgaaaacattggattttgaagaaatgactgaatatgagctgctcatccaaatttctgattcagtgcactacacagagggagcacttgtagtccgtgtgctggatgtcaatgataatccaccagtgttttctcaagatttctatcaggtcacagttcctgaatcaatacctgtggggtattcagtgctgactctgtcagccacagacttagaaagcaatgagaacatttcttacagaattctatcctcttctaaggaattctccattgatcctaagaatggcacaatatttactatcagtcccgtattacttctggatacaatatcaacaactcaatttcttgtggaagccagtgatggtggaaatcctgacctgagagctcttactttagtggagataggaatagaagatatgaacaattatgcccctgaattcacagtcaaatcctataatcttagcctaagtgaggatgctctggttggaagcacgcttgttacattttcaaacatcgaccatgactggacccgtgaaaacacatatgttgaatattccatcatcagtggtaattcacagaacaattttcatgtggaaactaagttctttcattcagaatatccttataagcaagtcggttatcttgtgttgcttcacagtctggacagagaagcaagtgctagccatgagcttgtcattctggcatctgacagtggctgccctccattgagttccacagctgtcatatcaatacaagtacttgatgtcaatgacaatcccccaaacttcagcagcctgagctatcacacccatgtcaaggaaagcacccctctagggagtcacatcactgtggtctcagcaaatgaccgtgacacagggtcacatgcagaaatcatctacaacatcatctctggaaatgagaagggacatttttacttagaagaaaacactggagttctttatttgattaaacctctggattatgaaaaaatgacaaaattcaccttaactgtccaagcttcagatgcagaaaagaaacatttttcttttgcagttgtgtttgtcagtgtcctggatgataacgaccatgcacctcagtttatgttctcaagcttcagctgtattgttccagaaaatctgcctatttcctctaccatatgctctataaatgctctggattttgatgctggtccgtatggagaattgacctattctattgtatcaccctgttttctcactcatggaatgtcttatgatcatgatctcttcctcattgaccctttgacaggggatattcatgctaagcaaatccttgactatgaaaatggcaataaatactgcctcacagtccaagccaaagacaaaggtgatgcaactgcctccttagtggtctgggtggatattgaagggatagatgaatttgagcccattttcactcaagatcagtattttttcaccctcccagaaaagaataaagacagacagttgattggcagagtggaagcctcagatgcagatgctggtattgatggagtcattctttactcccttggaacctcatctcctttcttttcagtaaataaaaccaatggaaatatttatttgattagagcccttcccctaataaaaagtcaactcaacaaagaagacaccttggaaatgaaaataatcgctcatagtcccaaatcagattccaagtttgcatcttgcactgtttttgtgaatgtgtctttctcctctgaaggaacacccttggcagtgttcgccagcagcttttcaatcagcctggtggtctcctttttagtgtttctgatactcatctgcattctaattgtaatgattttaagacataaacaaaaagacacaataaacaattatgaggagaagaaaacctcatctttagatgcggacttgagagtgacccgggatgccagtgtgctcaaagccttccagaaaactgacgactgcagtaacgaggtggtccctgtggatgccactccggaatggttgagtttaataagtatcatggagaaggatattgtcaatctgtacagacactcaaactccagtggccactgttctgtggaaggagaaactgcagaagataaggaaatccagaggataaatgagcatccctacagaaagtgctcagactcagctctgagtgaccacgagtccagggtgccagactcgggtatcccgagggactcagaccagctctcctgcctatctggggaaactgatgtgatggtgactgccgaaacagcagaagccagccaaacatttggggaaggagatcaaggggaaggctgcagcaccacctgtgctcaaaataatgtgttaccccagacagttcagaagagagaggcaaaagagagcatcctggctgacgttagaaaagagtctgtctttatttcaggtgatcaggaagtaaggtgtgcagctctttcaactcagacgacctctgatcatgatggaaaagacaactatcactggaattatcttcttagttgggagcccaaattccaacctcttgcctcagtatttaatgatattgcaaaactaaaggatgaacatttgcatatgcctggcattccaaaagagaagaaatcttttgtttttccaccccctttgataacagcagtagcccagcctgggattaaagcagtcccaccaagaatgccggcagtaaacctggggcaggtgcctccgaaacacccacgctctcccatcccctaccatcttggttctctgccagaaggcatgactcccaatttttctccatctctttccctattgacgatgcagcctcctgccttgtctccactgttgagagaaggagaattattaggaacacacatcagtggtacatgccatgaacttaaagcagaagatgaagttcaaatatgaaaccactgggatgccaagtacctgctcaccattggtcatgaatgaatgaacaaaatgttttcaagccagcaactcgagattgggctcatttttatctaaaagcaagtgatgtaatttagttagagtttttaaaacttccccattaaagtttctccaatttc

SEQ ID NO: 124851 - DNA, 1266 bp, Homo sapiens
  Payload ID: 4515
  Gene Symbol:
  Gene Name: DADB-110M10.7
  ENST ID: ENST00000428105
  CDS Start-End: 4-1152
cccatggcagtcttattcctcctcctgttcctatgtggaactccccaggctgcagacaacatgcaggccatctatgtggccttgggggaggcagtagagctgccatgtccctcaccacctactctacatggggacgaacacctgtcatggttctgcagccctgcagcaggctccttcaccaccctggtagcccaagtccaagtgggcaggccagccccagaccctggaaaaccaggaagggaatccaggctcagactgctggggaactattctttgtggttggagggatccaaagaggaagatgccgggcggtactggtgcgctgtgctaggtcagcaccacaactaccagaactggagggtgtacgacgtcttggtgctcaaaggatcccagttatctgcaagggctgcagatggatccccctgcaatgtcctcctgtgctctgtggtccccagcagacgcatggactctgtgacctggcaggaagggaagggtcccgtgaggggccgtgttcagtccttctggggcagtgaggctgccctgctcttggtgtgtcctggggaggggctttctgagcccaggagccgaagaccaagaatcatccgctgcctcatgactcacaacaaaggggtcagctttagcctggcagcctccatcgatgcttctcctgccctctgtgccccttccacgggctgggacatgccttggattctgatgctgctgctcacaatgggccagggagttgtcatcctggccctcagcatcgtgctctggaggcagagggtccgtggggctccaggcagaggaaaccgaatgcggtgctacaactgtggtggaagccccagcagttcttgcaaagaggccgtgaccacctgtggcgagggcagaccccagccaggcctggaacagatcaagctacctggaaaccccccagtgaccttgattcaccaacatccagcctgcgtcgcagcccatcattgcaatcaagtggagacagagtcggtgggagacgtgacttatccagcccacagggactgctacctgggagacctgtgcaacagcgccgtggcaagccatgtggcccctgcaggcattttggctgcagcagctaccgccctgacctgtctcttgccaggactgtggagcggatagggggagtaggagtagagaagggaacaagggagcaagggaacaagggacatctgaacatctaatgtgagaagagaaacatccttctgtgagtcattaaaatctatgaaccactct

SEQ ID NO: 124852 - DNA, 1264 bp, Homo sapiens
  Payload ID: 4516
  Gene Symbol:
  Gene Name: DADB-127H9.10
  ENST ID: ENST00000443952
  CDS Start-End: 119-805
cttcgcctgccgcggtcgggtccgcggcctgcgctgtagcggtcgccgccgttccctggaagtagcaacttccctaccccaccccagtcctggtccccgtccagccgctgacgtgaagatgagcagctcagaggaggtgtcctggatttcctggttctgtgggctccgtggcaatgaattcttctgtgaagtggatgaagactacatccaggacaaatttaatcttactggactcaatgagcaggtccctcactatcgacaagctctagacatgatcttggacctggagcctgatgaagaactggaagacaaccccaaccagagtgacctgattgagcaggcagccgagatgctttatggattgatccacgcccgctacatccttaccaaccgtggcatcgcccagatgttggaaaagtaccagcaaggagactttggttactgtcctcgtgtgtactgtgagaaccagccaatgcttcccattggcctttcagacatcccaggtgaagccatggtgaagctctactgccccaagtgcatggatgtgtacacacccaagtcatcaagacaccatcacacggatggcgcctacttcggcactggtttccctcacatgctcttcatggtgcatcccgagtaccggcccaagagacctgccaaccagtttgtgcccagttcctgttcccgacatccggacgtgccacttctgcctcgtagaagacccttctgtaggatgcatttcaggctcagagaagtgtaccatcagcagctcatccctgtgcatggtgatcaccatctattatgatgtcaaggttcgcttcatcgttcgaggctgtggacagtacatttcctaccgctgccaagaaaaacgcaacacctactttgcagagtactggtatcaggcccagtgctgtcagtacgattattgcaactcctggtcaagcccccaactccagagctctctgccggagccccatgacaggcccctggccctgcctctgtctgactcccagattcagtggttctaccaggccctgaacctctccctgcccctccccaatttccatgctgggacggagcctgatggcctggaccccatggtcacactgtccctgaacctgggcttgtcttttgctgagctgcgccgcatgtacttgttcctcaatagttcaggacttttggttcttccccaggctggactcttgacacctcacccttcctgaattccacagtgcaaatatctttctgtaacaccctcagcatc

SEQ ID NO: 124853 - DNA, 807 bp, Homo sapiens
  Payload ID: 4516
  Gene Symbol:
  Gene Name: DADB-127H9.10
  ENST ID: ENST00000443812
  CDS Start-End: 1-639
gactttggttactgtcctcgtgtgtactgtgagaaccagccaatgcttcccattggtgtgctggtcatggtgggcttcacagtaggaaaggttcctgttcccgacatccggacgtgccacttctgcctcgtagaagacccttctgtaggatgcatttcaggctcagagaagtgtaccatcagcagctcatccctgtgcatggtgatcaccatctattatgatgtcaaggttcgcttcatcgttcgaggctgtggacagtacatttcctaccgctgccaagaaaaacgcaacacctactttgcagagtactggtatcaggcccagtgctgtcagtacgattattgcaactcctggtcaagcccccaactccagagctctctgccggagccccatgacaggcccctggccctgcctctgtctgactcccagattcagtggttctaccaggccctgaacctctccctgcccctccccaatttccatgctgggacggagcctgatggcctggaccccatggtcacactgtccctgaacctgggcttgtcttttgctgagctgcgccgcatgtacttgttcctcaatagttcaggacttttggttcttccccaggctggactcttgacacctcacccttcctgaattccacagtgcaaatatctttctgtaacaccctcagcatcctgcactgccctctctgaaaacacccacattctttggtcactgtgatttcttaggcctccgtctgttgtaccactagcatctatatgacttttgtgtaattttctctcttgaactctggtgctgttt

SEQ ID NO: 124854 - DNA, 1256 bp, Homo sapiens
  Payload ID: 4516
  Gene Symbol:
  Gene Name: DADB-127H9.10
  ENST ID: ENST00000615363
  CDS Start-End: 342-1256
gcttctcgttgtgccccgcccgcaagcgccctcctccgggccttcgtgacagccaggtcgtgcgcgggtcatcctgggattggtagttcgctttctctcatttagccagtttctttctctaccggggactccgtgtcccggcatccaccgcggcacctgacccttggcgcttgcgtgtttgccctcttccccaccctccctaatttccactccccccaccccacttcgcctgccgcggtcgggtccgcggcctgcgctgtagcggtcgccgccgttccctggaagtagcaacttccctaccccaccccagtcctggtccccgtccagccgctgacgtgaagatgagcagctcagaggaggtgtcctggatttcctggttctgtgggctccgtggcaatgaattcttctgtgaagtggatgaagactacatccaggacaaatttaatcttactggactcaatgagcaggtccctcactatcgacaagctctagacatgatcttggacctggagcctgatgaagaactggaagacaaccccaaccagagtgacctgattgagcaggcagccgagatgctttatggattgatccacgcccgctacatccttaccaaccgtggcatcgcccagatgttggaaaagtaccagcaaggagactttggttactgtcctcgtgtgtactgtgagaaccagccaatgcttcccattgttcctgttcccgacatccggacgtgccacttctgcctcgtagaagacccttctgtaggatgcatttcaggctcagagaagtgtaccatcagcagctcatccctgtgcatggtgatcaccatctattatgatgtcaaggttcgcttcatcgttcgaggctgtggacagtacatttcctaccgctgccaagaaaaacgcaacacctactttgcagagtactggtatcaggcccagtgctgtcagtacgattattgcaactcctggtcaagcccccaactccagagctctctgccggagccccatgacaggcccctggccctgcctctgtctgactcccagattcagtggttctaccaggccctgaacctctccctgcccctccccaatttccatgctgggacggagcctgatggcctggaccccatggtcacactgtccctgaacctgggcttgtcttttgctgagctgcgccgcatgtacttgttcctcaatagttcaggacttttggttcttccccaggctggactcttgacacctcacccttcctga

SEQ ID NO: 124855 - DNA, 1181 bp, Homo sapiens; identical to SEQ ID NO: 114625
  Payload ID: 4516
  Gene Symbol:
  Gene Name: DADB-127H9.10
  ENST ID: ENST00000614071
  CDS Start-End: 13-699

SEQ ID NO: 124856 - DNA, 827 bp, Homo sapiens
  Payload ID: 4516
  Gene Symbol:
  Gene Name: DADB-127H9.10
  ENST ID: ENST00000612713
  CDS Start-End: 342-827
gcttctcgttgtgccccgcccgcaagcgccctcctccgggccttcgtgacagccaggtcgtgcgcgggtcatcctgggattggtagttcgctttctctcatttagccagtttctttctctaccggggactccgtgtcccggcatccaccgcggcacctgacccttggcgcttgcgtgtttgccctcttccccaccctccctaatttccactccccccaccccacttcgcctgccgcggtcgggtccgcggcctgcgctgtagcggtcgccgccgttccctggaagtagcaacttccctaccccaccccagtcctggtccccgtccagccgctgacgtgaagatgagcagctcagaggaggtgtcctggatttcctggttctgtgggctccgtggcaatgaattcttctgtgaagtggatgaagactacatccaggacaaatttaatcttactggactcaatgagcaggtccctcactatcgacaagctctagacatgatcttggacctggagcctgatgaagaactggaagacaaccccaaccagagtgacctgattgagcaggcagccgagatgctttatggattgatccacgccctgcctctgtctgactcccagattcagtggttctaccaggccctgaacctctccctgcccctccccaatttccatgctgggacggagcctgatggcctggaccccatggtcacactgtccctgaacctgggcttgtcttttgctgagctgcgccgcatgtacttgttcctcaatagttcaggacttttggttcttccccaggctggactcttgacacctcacccttcctga

SEQ ID NO: 124857 - DNA, 1968 bp, Homo sapiens
  Payload ID: 4517
  Gene Symbol: DALRD3
  Gene Name: DALR anticodon binding domain containing 3
  Uniprot ID: Q5D0E6
  ENST ID: ENST00000313778
  CDS Start-End: 743-1873
attgtcgctttcgctacccgcggggccgggcgagcgggaagctcggcacagtgggagcctggtggtgggtctcctggggccggtcgcaatgggtttccgggggtcccgcggctgctctgtggaccccttcggcccctggtgctccgggcgctggcagcgtcaccggacaaaggccaccgagcgcgggggtgtccccgaggtggacgcgcgggtttacttcctctccggccccacgggcgcgcttccctcctgacggattccgaagcccgccccaccaccgtcaccgcaccagtggcccaggcttcgtgggaccaacagggctaatcctgccccacggatctaatccggatcgggacccggtcccaggggaggcccccacctccccttctattgttctgtggcccaggttccggagcatttgctccatgccctcgcctgcctgcagggccccggtgtggccccggtgctgcgctgcgcgccgacccccgcgggtctgtctctccaactgcagcggtccgccgtcttcgagcgcgtcctcagcgccgtggccgcctatgccacgcccgcctcgcctgcctcgctgggccagcgcgtcttactacactgcccagcactgcgcagctccccctgcgcactccgcttgagccagctgcgtacggtgctcgtggccgatcacctggcgcgagccctgcgcgctcacggggtgtgcgtgcgcctagtgccagctgtgcgggatccgcacatgctgaccttcctgcagcaactgcgggtggactggcccgctgcctcggagagagcttcctcccacaccctgaggagccacgcccttgaagaacttacctctgctaatgacgggaggacactgtcccctggcatcctaggcagactgtgtctgaaggagctggtggaagaacagggccgcacagctggctatgaccccaacctggacaactgtctggtgactgaggatctcctctctgtgctggctgagctgcaagaggctctatggcattggcccgaggacagccacccaggcctggctggggcctcagatactggtacaggcggctgcctggttgtacatgttgttagctgtgaggaggagttccagcaacagaagttggacctgctttggcagaagttggttgacaaggctccactcagacagaagcacctcatctgtggccctgtgaaagtagctggtgcacctggcactctgatgactgcccctgagtactacgagttccggcatacccaggtgtgcaaggcctcagcactgaagcatggtggggatctggcacaagacccagcctggacagagatctttggtgttctctctgtggccaccatcaagtttgagatgctgagcacagccccacagagtcagctcttcctggctctggctgacagcagtatctccacgaagggcacaaagagtggcacctttgtcatgtataattgtgcccgtcttgccacactctttgagagttacaagtgtagtatggaacaaggtctgtaccccacttttcctcctgtgagcagtctggacttctcactgctacatgatgagggtgagtggttgttgctcttcaacagtatcctcccctttccggatctgctgagccggacagcagtgctggactgcacagccccggggctccacattgctgtacgcacagagatgatatgcaagttcctggtacagctcagcatggatttcagctcctactacaaccgggtacacatcctgggggagcctcgaccacacctctttggtcagatgttcgtccgcctgcagcttctgagagctgtgcgtgaggtgctccatactggcctggctatgctgggtctccctccactgagccacatttaaggccacagaggctccaatacctgggaatgttcacaaagtcatcaactggaaaaaaagcaaaaacccacggccaaaataaattggtactgtttgtt

SEQ ID NO: 124858 - DNA, 1739 bp, Homo sapiens
  Payload ID: 4517
  Gene Symbol: DALRD3
  Gene Name: DALR anticodon binding domain containing 3
  Uniprot ID: Q5D0E6
  ENST ID: ENST00000341949
  CDS Start-End: 8-1639
ggtcaccatggcgaccaggcgccttggggtcggggagacgctgggggccctcaacgcggccctggggccaggcggtccggtgtggatcaaggagacgcgcacccgccacctgcgttcccgagactttctggcaccgcaccgcgcgctgcaggcgcgcttcgatgacggccaggttccggagcatttgctccatgccctcgcctgcctgcagggccccggtgtggccccggtgctgcgctgcgcgccgacccccgcgggtctgtctctccaactgcagcggtccgccgtcttcgagcgcgtcctcagcgccgtggccgcctatgccacgcccgcctcgcctgcctcgctgggccagcgcgtcttactacactgcccagcactgcgcagctccccctgcgcactccgcttgagccagctgcgtacggtgctcgtggccgatcacctggcgcgagccctgcgcgctcacggggtgtgcgtgcgcctagtgccagctgtgcgggatccgcacatgctgaccttcctgcagcaactgcgggtggactggcccgctgcctcggagagagcttcctcccacaccctgaggagccacgcccttgaagaacttacctctgctaatgacgggaggacactgtcccctggcatcctaggcagactgtgtctgaaggagctggtggaagaacagggccgcacagctggctatgaccccaacctggacaactgtctggtgactgaggatctcctctctgtgctggctgagctgcaagaggctctatggcattggcccgaggacagccacccaggcctggctggggcctcagatactggtacaggcggctgcctggttgtacatgttgttagctgtgaggaggagttccagcaacagaagttggacctgctttggcagaagttggttgacaaggctccactcagacagaagcacctcatctgtggccctgtgaaagtagctggtgcacctggcactctgatgactgcccctgagtactacgagttccggcatacccaggtgtgcaaggcctcagcactgaagcatggtggggatctggcacaagacccagcctggacagagatctttggtgttctctctgtggccaccatcaagtttgagatgctgagcacagccccacagagtcagctcttcctggctctggctgacagcagtatctccacgaagggcacaaagagtggcacctttgtcatgtataattgtgcccgtcttgccacactctttgagagttacaagtgtagtatggaacaaggtctgtaccccacttttcctcctgtgagcagtctggacttctcactgctacatgatgagggtgagtggttgttgctcttcaacagtatcctcccctttccggatctgctgagccggacagcagtgctggactgcacagccccggggctccacattgctgtacgcacagagatgatatgcaagttcctggtacagctcagcatggatttcagctcctactacaaccgggtacacatcctgggggagcctcgaccacacctctttggtcagatgttcgtccgcctgcagcttctgagagctgtgcgtgaggtgctccatactggcctggctatgctgggtctccctccactgagccacatttaaggccacagaggctccaatacctgggaatgttcacaaagtcatcaactggaaaaaaagcaaaaacccacggccaaaataaattggtactgtttgttacaaa

SEQ ID NO: 124859 - DNA, 654 bp, Homo sapiens
  Payload ID: 4517
  Gene Symbol: DALRD3
  Gene Name: DALR anticodon binding domain containing 3
  ENST ID: ENST00000438585
  CDS Start-End: 1-554
acccagcctggacagagatctttggtgttctctctgtggccaccatcaagtttgagatgctgagcacagccccacagagtcagctcttcctggctctggctgacagcagtatctccacgaagggcacaaagagtggcacctttgtcatgtataattgtgcccgtcttgccacactctttgagagttacaagtgtagtatggaacaaggtctgtaccccacttttcctcctgtgagcagtctggacttctcactgctacatgatgagggtgagtggttgttgctcttcaacagtatcctcccctttccggatctgctgagccggacagcagtgctggactgcacagccccggggctccacattgctgtacgcacagagatgatatgcaagttcctggtacagctcagcatggatttcagctcctactacaaccgggagcctcgaccacacctctttggtcagatgttcgtccgcctgcagcttctgagagctgtgcgtgaggtgctccatactggcctggctatgctgggtctccctccactgagccacatttaaggccacagaggctccaatacctgggaatgttcacaaagtcatcaactggaaaaaaagcaaaaacccacggccaaaataaattggtactgtttgttacaaa

SEQ ID NO: 124860 - DNA, 881 bp, Homo sapiens
  Payload ID: 4517
  Gene Symbol: DALRD3
  Gene Name: DALR anticodon binding domain containing 3
  ENST ID: ENST00000420952
  CDS Start-End: 1-881
atggcgaccaggcgccttggggtcggggagacgctgggggccctcaacgcggccctggggccaggcggtccggtgtggatcaaggagacgcgcacccgccacctgcgttcccgagactttctggcaccgcaccgcgcgctgcaggcgcgcttcgatgacggccagcggtccgccgtcttcgagcgcgtcctcagcgccgtggccgcctatgccacgcccgcctcgcctgcctcgctgggccagcgcgtcttactacactgcccagcactgcgcagctccccctgcgcactccgcttgagccagctgcgtacggtgctcgtggccgatcacctggcgcgagccctgcgcgctcacggggtgtgcgtgcgcctagtgccagctgtgcgggatccgcacatgctgaccttcctgcagcaactgcgggtggactggcccgctgcctcggagagagcttcctcccacaccctgaggagccacgcccttgaagaacttacctctgctaatgacgggaggacactgtcccctggcatcctaggcagactgtgtctgaaggagctggtggaagaacagggccgcacagctggctatgaccccaacctggacaactgtctggtgactgaggatctcctctctgtgctggctgagctgcaagaggctctatggcattggcccgaggacagccacccaggcctggctggggcctcagatactggtacaggcggctgcctggttgtacatgttgttagctgtgaggaggagttccagcaacagaagttggacctgctttggcagaagttggttgacaaggctccactcagacagaagcacctcatctgtggccctgtgaaagtagctggtgcacctggcactctgatgactgc

SEQ ID NO: 124861 - DNA, 2014 bp, Homo sapiens
  Payload ID: 4517
  Gene Symbol: DALRD3
  Gene Name: DALR anticodon binding domain containing 3
  ENST ID: ENST00000440857
  CDS Start-End: 704-1864
cccgaggtggacgcgcgggtttacttcctctccggccccacgggcgcgcttccctcctgacggattccgaagcccgccccaccaccgtcaccgcaccagtggcccaggcttcgtgggaccaacagggctaatcctgccccacggatctaatccggatcgggacccggtcccaggggaggcccccacctccccttctattgttctgtggcccaggcgccttggggtcggggagacgctgggggccctcaacgcggccctggggccaggcggtccggtgtggatcaaggagacgcgcacccgccacctgcgttcccgagactttctggcaccgcaccgcgcgctgcaggcgcgcttcgatgacggccaggttccggagcatttgctccatgccctcgcctgcctgcagggccccggtgtggccccggtgctgcgctgcgcgccgacccccgcgggtctgtctctccaactgcagcggtccgccgtcttcgagcgcgtcctcagcgccgtggccgcctatgccacgcccgcctcgcctgcctcgctgggccagcgcgtcttactacactgcccagcactgcgcagctccccctgcgcactccgcttgagccagctgcgtacggtgctcgtggccgatcacctggcgcgagccctgcgcgctcacggggtgtgcgtgcgcctagtgccagctgtgcgggatccgcacatgctgaccttcctgcagcaactgcgggtggactggcccgctgcctcggagagagcttcctcccacaccctgaggagccacgcccttgaagaacttacctctgctaatgacgggaggacactgtcccctggcatcctaggcagactgtgtctgaaggagctggtggaagaacagggccgcacagctggctatgaccccaacctggacaactgtctggtgactgaggatctcctctctgtgctggctgagctgcaagaggctctatggcattggcccgaggacagccacccaggcctggctggggcctcagatactggtacaggcggctgcctggttgtacatgttgttagctgtgaggaggagttccagcaacagaagttggacctgctttggcagaagttggttgacaaggctccactcagacagaagcacctcatctgtggccctgtgaaagtagctggtgcacctggcactctgatgactgcccctgagtactacgagttccggcatacccaggtgtgcaaggcctcagcactgaagcatggtggggatctggcacaagacccagcctggacagagatctttggtgttctctctgtggccaccatcaagtttgagatgctgagcacagccccacagagtcagctcttcctggctctggctgacagcagtatctccacgaagggcacaaagagtggcacctttgtcatgtataattgtgcccgtcttgccacactctttgagagttacaagtgtagtatggaacaaggtctgtaccccacttttcctcctgtgagcagtctggacttctcactgctacatgatgagggtgagtggttgttgctcttcaacagtatcctcccctttccggatctgctgagccggacagcagtgctggactgcacagccccggggctccacattgctgtacgcacagagatggtgaggcatagacaaccaggacactctacactctattctttattctggcctggggcacaagagcaaagagatgggccagtgactcagtctctgtctctagatatgcaagttcctggtacagctcagcatggatttcagctcctactacaaccgggagcctcgaccacacctctttggtcagatgttcgtccgcctgcagcttctgagagctgtgcgtgaggtgctccatactggcctggctatgctgggtctccctccactgagccacatttaaggccacagaggctccaatacctgggaatgttcacaaagtcatcaactggaaaaaaagcaaaaacccacggccaaaataaattggtactgtttgtt

SEQ ID NO: 124862 - DNA, 1706 bp, Homo sapiens
  Payload ID: 4517
  Gene Symbol: DALRD3
  Gene Name: DALR anticodon binding domain containing 3
  Uniprot ID: Q5D0E6
  ENST ID: ENST00000441576
  CDS Start-End: 1-1551
atggcgaccaggcgccttggggtcggggagacgctgggggccctcaacgcggccctggggccaggcggtccggtgtggatcaaggagacgcgcacccgccacctgcgttcccgagactttctggcaccgcaccgcgcgctgcaggcgcgcttcgatgacggccaggttccggagcatttgctccatgccctcgcctgcctgcagggccccggtgtggccccggtgctgcgctgcgcgccgacccccgcgggtctgtctctccaactgcagcggtccgccgtcttcgagcgcgtcctcagcgccgtggccgcctatgccacgcccgcctcgcctgcctcgctgggccagcgcgtcttactacactgcccagcactgcgcagctccccctgcgcactccgcttgagccagctgcgtacggtgctcgtggccgatcacctggcgcgagccctgcgcgctcacggggtgtgcgtgcgcctagtgccagctgtgcgggatccgcacatgctgaccttcctgcagcaactgcgggtggactggcccgctgcctcggagagagcttcctcccacaccctgaggagccacgcccttgaagaacttacctctgctaatgacgggaggacactgtcccctggcatcctaggcagactgtgtctgaaggagctggtggaagaacagggccgcacagctggctatgaccccaacctggacaactgtctggtgactgaggatctcctctctgtgctggctgagctgcaagaggctctatggcattggcccgaggacagccacccaggcctggctggggcctcagatactggtacaggcggctgcctggttgtacatgttgttagctgtgaggaggagttccagcaacagaagttggacctgctttggcagaagttggttgacaaggctccactcagacagaagcacctcatctgtggccctgtgaaagtagctggtgcacctggcactctgatgactgcccctgagtactacgagttccggcatacccaggtgtgcaaggcctcagcactgaagcatggtggggatctggcacaagacccagcctggacagagatctttggtgttctctctgtggccaccatcaagtttgagatgctgagcacagccccacagagtcagctcttcctggctctggctgacagcagtatctccacgaagggcacaaagagtggcacctttgtcatgtataattgtgcccgtcttgccacactctttgagagttacaagtgtagtatggaacaaggtctgtaccccacttttcctcctgtgagcagtctggacttctcactgctacatgatgagtatcctcccctttccggatctgctgagccggacagcagtgctggactgcacagccccggggctccacattgctgtacgcacagagatgatatgcaagttcctggtacagctcagcatggatttcagctcctactacaaccgggtacacatcctgggggagcctcgaccacacctctttggtcagatgttcgtccgcctgcagcttctgagagctgtgcgtgaggtgctccatactggcctggctatgctgggtctccctccactgagccacatttaaggccacagaggctccaatacctgggaatgttcacaaagtcatcaactggaaaaaaagcaaaaacccacggccaaaataaattggtactgtttgttacaaa

SEQ ID NO: 124863 - DNA, 839 bp, Homo sapiens
  Payload ID: 4517
  Gene Symbol: DALRD3
  Gene Name: DALR anticodon binding domain containing 3
  ENST ID: ENST00000496568
  CDS Start-End: 623-839
ccggaaggtgctgggctggcagtcgccggccctagggggctggatggtcgagggcgcggggtccaagctcaccagggaagctcaacgggcggacagcgcagcgagggtcgcgctcggtacaagctacgtagcgcgagagcggtggccatggctgaccaacgcgcggcgaagtcgtcaccggcgccgttagtccccgggttgggagggccctgcggagcctgacccagcgtggctgcagcgccccctgcgtcccggagggcaccgcacagctcgaccggcccagcaggttccggagcatttgctccatgccctcgcctgcctgcagggccccggtgtggccccggtgctgcgctgcgcgccgacccccgcgggtctgtctctccaactgcagcggtccgccgtcttcgagcgcgtcctcagcgccgtggccgcctatgccacgcccgcctcgcctgcctcgctgggccagcgcgtcttactacactgcccagcactgcgcagctccccctgcgcactccgcttgagccagctgcgtacggtgctcgtggccgatcacctggcgcgagccctgcgcgctcacggggtgtgcgtgcgcctagtgccagctgtgcgggatccgcacatgctgaccttcctgcagcaactgcgggtggactggcccgctgcctcggagagagcttcctcccacaccctgaggagccacgcccttgaagaacttacctctgctaatgacgggaggacactgtcccctggcatcctaggcagactgtgtctgaaggagctggtggaagaacagggccgcacagctggctatgaccccaacctggacaactgtctgg

SEQ ID NO: 124864 - DNA, 1266 bp, Homo sapiens
  Payload ID: 4518
  Gene Symbol:
  Gene Name: DAMA-236L13.19
  ENST ID: ENST00000439683
  CDS Start-End: 4-1152
cccatggcagtcttattcctcctcctgttcctatgtggaactccccaggctgcagacaacatgcaggccatctatgtggccttgggggaggcagtagagctgccatgtccctcaccacctactctacatggggacgaacacctgtcatggttctgcagccctgcagcaggctccttcaccaccctggtagcccaagtccaagtgggcaggccagccccagaccctggaaaaccaggaagggaatccaggctcagactgctggggaactattctttgtggttggagggatccaaagaggaagatgccgggcggtactggtgcgctgtgctaggtcagcaccacaactaccagaactggagggtgtacgacgtcttggtgctcaaaggatcccagttatctgcaagggctgcagatggatccccctgcaatgtcctcctgtgctctgtggtccccagcagacgcatggactctgtgacctggcaggaagggaagggtcccgtgaggggccgtgttcagtccttctggggcagtgaggctgccctgctcttggtgtgtcctggggaggggctttctgagcccaggagccgaagaccaagaatcatccgctgcctcatgactcacaacaaaggggtcagctttagcctggcagcctccatcgatgcttctcctgccctctgtgccccttccacgggctgggacatgccttggattctgatgctgctgctcacaatgggccagggagttgtcatcctggccctcagcatcgtgctctggaggcagagggtccgtggggctccaggcagaggaaaccgaatgcggtgctacaactgtggtggaagccccagcagttcttgcaaagaggccgtgaccacctgtggcgagggcagaccccagccaggcctggaacagatcaagctacctggaaaccccccagtgaccttgattcaccaacatccagcctgcgtcgcagcccatcattgcaatcaagtggagacagagtcggtgggagacgtgacttatccagcccacagggactgctacctgggagacctgtgcaacagcgccgtggcaagccatgtggcccctgcaggcattttggctgcagcagctaccgccctgacctgtctcttgccaggactgtggagcggatagggggagtaggagtagagaagggaacaagggagcaagggaacaagggacatctgaacatctaatgtgagaagacaaacatccttctgtgagtcattaaaatctatgaaccactct

SEQ ID NO: 124865 - DNA, 1270 bp, Homo sapiens
  Payload ID: 4519
  Gene Symbol:
  Gene Name: DAMA-236L13.20
  ENST ID: ENST00000457089
  CDS Start-End: 119-805
cttcgcctgccgcggtcgggtccgcggcctgcgctgtagcggtcgccgccgttccctggaagtagcaacttccctaccccaccccagtcctggtccccgtccagccgctgacgtgaagatgagcagctcagaggaggtgtcctggatttcctggttctgtgggctccgtggcaatgaattcttctgtgaagtggatgaagactacatccaggacaaatttaatcttactggactcaatgagcaggtccctcactatcgacaagctctagacatgatcttggacctggagcctgatgaagaactggaagacaaccccaaccagagtgacctgattgagcaggcagccgagatgctttatggattgatccacgcccgctacatccttaccaaccgtggcatcgcccagatgttggaaaagtaccagcaaggagactttggttactgtcctcgtgtgtactgtgagaaccagccaatgcttcccattggcctttcagacatcccaggtgaagccatggtgaagctctactgccccaagtgcatggatgtgtacacacccaagtcatcaagacaccatcacacggatggcgcctacttcggcactggtttccctcacatgctcttcatggtgcatcccgagtaccggcccaagagacctgccaaccagtttgtgcccagttcctgttcccgacatccggacgtgccacttctgcctcgtagaagacccttctgtaggatgcatttcaggctcagagaagtgtaccatcagcagctcatccctgtgcatggtgatcaccatctattatgatgtcaaggttcgcttcatcgttcgaggctgtggacagtacatttcctaccgctgccaagaaaaacgcaacacctactttgcagagtactggtatcaggcccagtgctgtcagtacgattattgcaactcctggtcaagcccccaactccagagctctctgccggagccccatgacaggcccctggccctgcctctgtctgactcccagattcagtggttctaccaggccctgaacctctccctgcccctccccaatttccatgctgggacggagcctgatggcctggaccccatggtcacactgtccctgaacctgggcttgtcttttgctgagctgcgccgcatgtacttgttcctcaatagttcaggacttttggttcttccccaggctggactcttgacacctcacccttcctgaattccacagtgcaaatatctttctgtaacaccctcagcatcctgcac

SEQ ID NO: 124866 - DNA, 807 bp, Homo sapiens; identical to SEQ ID NO: 124853
  Payload ID: 4519
  Gene Symbol:
  Gene Name: DAMA-236L13.20
  ENST ID: ENST00000451335
  CDS Start-End: 1-639

SEQ ID NO: 124867 - DNA, 1255 bp, Homo sapiens; identical to SEQ ID NO: 114624
  Payload ID: 4519
  Gene Symbol:
  Gene Name: DAMA-236L13.20
  ENST ID: ENST00000622393
  CDS Start-End: 341-1255

SEQ ID NO: 124868 - DNA, 1181 bp, Homo sapiens; identical to SEQ ID NO: 114625
  Payload ID: 4519
  Gene Symbol:
  Gene Name: DAMA-236L13.20
  ENST ID: ENST00000620322
  CDS Start-End: 13-699

SEQ ID NO: 124869 - DNA, 826 bp, Homo sapiens; identical to SEQ ID NO: 114619
  Payload ID: 4519
  Gene Symbol:
  Gene Name: DAMA-236L13.20
  ENST ID: ENST00000611721
  CDS Start-End: 341-826

SEQ ID NO: 124870 - DNA, 4506 bp, Homo sapiens
  Payload ID: 4520
  Gene Symbol: DDB1
  Gene Name: damage-specific DNA binding protein 1, 127kDa
  Uniprot ID: Q16531
  ENST ID: ENST00000301764
  CDS Start-End: 399-3821
gggagtctgcgggcgagctcggaggacactggcgcacctcccccgccggctcacggccgcatccgccacatccgaaggcgccgcgacttcccggagaccccgaagcgtgcgctctcatccgggtcctgcgggcgctggcggaaagaggcgaggcggtgcctccgggggcggggcctccttcggttggcggcctcgggcttcgggagtcctccaagaggccaggtgaggccgtcccgtgatgccccgcgccccggccgctctggcctgcaacgtgtctctggggcggaggcagcggcagtggagttcgctgcgcgctgttgggggccacctgtcttttcgcttgtgtccctctttctagtgtcgcgctcgagtcccgacgggccgctccaagcctcgacatgtcgtacaactacgtggtaacggcccagaagcccaccgccgtgaacggctgcgtgaccggacactttacttcggccgaagacttaaacctgttgattgccaaaaacacgagattagagatctatgtggtcaccgccgaggggcttcggcccgtcaaagaggtgggcatgtatgggaagattgcggtcatggagcttttcaggcccaagggggagagcaaggacctgctgtttatcttgacagcgaagtacaatgcctgcatcctggagtataaacagagtggcgagagcattgacatcattacgcgagcccatggcaatgtccaggaccgcattggccgcccctcagagaccggcattattggcatcattgaccctgagtgccggatgattggcctgcgtctctatgatggccttttcaaggttattccactagatcgcgataataaagaactcaaggccttcaacatccgcctggaggagctgcatgtcattgatgtcaagttcctatatggttgccaagcacctactatttgctttgtctaccaggaccctcaggggcggcacgtaaaaacctatgaggtgtctctccgagaaaaggaattcaataagggcccttggaaacaggaaaatgtcgaagctgaagcttccatggtgatcgcagtcccagagccctttgggggggccatcatcattggacaggagtcaatcacctatcacaatggtgacaaatacctggctattgcccctcctatcatcaagcaaagcacgattgtgtgccacaatcgagtggaccctaatggctcaagatacctgctgggagacatggaaggccggctcttcatgctgcttttggagaaggaggaacagatggatggcaccgtcactctcaaggatctccgtgtagaactccttggagagacctctattgctgagtgcttgacataccttgataatggtgttgtgtttgtcgggtctcgcctgggtgactcccagcttgtgaagctcaacgttgacagtaatgaacaaggctcctatgtagtggccatggaaacctttaccaacttaggacccattgtcgatatgtgcgtggtggacctggagaggcaggggcaggggcagctggtcacttgctctggggctttcaaggaaggttctttgcggatcatccggaatggaattggaatccacgagcatgccagcattgacttaccaggcatcaaaggattatggccactgcggtctgaccctaatcgtgagactgatgacactttggtgctctcttttgtgggccagacaagagttctcatgttaaatggagaggaggtagaagaaaccgaactgatgggtttcgtggatgatcagcagactttcttctgtggcaacgtggctcatcagcagcttatccagatcacttcagcatcggtgaggttggtctctcaagaacccaaagctctggtcagtgaatggaaggagcctcaggccaagaacatcagtgtggcctcctgcaatagcagccaggtggtggtggctgtaggcagggccctctactatctgcagatccatcctcaggagctccggcagatcagccacacagagatggaacatgaagtggcttgcttggacatcaccccattaggagacagcaatggactgtcccctctttgtgccattggcctctggacggacatctcggctcgtatcttgaagttgccctcttttgaactactgcacaaggagatgctgggtggagagatcattcctcgctccatcctgatgaccacctttgagagtagccattacctcctttgtgccttgggagatggagcgcttttctactttgggctcaacattgagacaggtctgttgagcgaccgtaagaaggtgactttgggcacccagcccaccgtattgaggacttttcgttctctttctaccaccaacgtctttgcttgttctgaccgccccactgtcatctatagcagcaaccacaaattggtcttctcaaatgtcaacctcaaggaagtgaactacatgtgtcccctcaattcagatggctatcctgacagcctggcgctggccaacaatagcaccctcaccattggcaccatcgatgagatccagaagctgcacattcgcacagttcccctctatgagtctccaaggaagatctgctaccaggaagtgtcccagtgtttcggggtcctctccagccgcattgaagtccaagacacgagtgggggcacgacagccttgaggcccagcgctagcacccaggctctgtccagcagtgtaagctccagcaagctgttctccagcagcactgctcctcatgagacctcctttggagaagaggtggaggtgcacaacctacttatcattgaccaacacacctttgaagtgcttcatgcccaccagtttctgcagaatgaatatgccctcagtctggtttcctgcaagctgggcaaagaccccaacacttacttcattgtgggcacagcaatggtgtatcctgaagaggcagagcccaagcagggtcgcattgtggtctttcagtattcggatggaaaactacagactgtggctgaaaaggaagtgaaaggggccgtgtactctatggtggaatttaacgggaagctgttagccagcatcaatagcacggtgcggctctatgagtggacaacagagaaggagctgcgcactgagtgcaaccactacaacaacatcatggccctctacctgaagaccaagggcgacttcatcctggtgggcgaccttatgcgctcagtgctgctgcttgcctacaagcccatggaaggaaactttgaagagattgctcgagactttaatcccaactggatgagtgctgtggaaatcttggatgatgacaattttctgggggctgaaaatgcctttaacttgtttgtgtgtcaaaaggatagcgctgccaccactgacgaggagcggcagcacctccaggaggttggtcttttccacctgggcgagtttgtcaatgtcttttgccacggctctctggtaatgcagaatctgggtgagacttccacccccacacaaggctcggtgctcttcggcacggtcaacggcatgatagggctggtgacctcactgtcagagagctggtacaacctcctgctggacatgcagaatcgactcaataaagtcatcaaaagtgtggggaagatcgagcactccttctggagatcctttcacaccgagcggaagacagaaccagccacaggtttcatcgacggtgacttgattgagagtttcctggatattagccgccccaagatgcaggaggtggtggcaaacctacagtatgacgatggcagcggtatgaagcgagaggccactgcagacgacctcatcaaggttgtggaggagctaactcggatccattagccaagggcagggggcccctttgctgaccctccccaaaggctttgccctgctgccctccccctcctctccaccatcgtcttcttggccatgggaggcctttccctaagccagctgcccccagagccacagttcccctatgtggaagtggggcgggcttcatagagacttgggaatgagctgaaggtgaaacattttctccctggatttttaccagtctcacatgattccagccatcaccttagaccaccaagccttgattggtgttgccagttgtcctccttccggggaaggattttgcagttctttggctgaaaggaagctgtgcgtgtgtgtgtgtgtatgtgtgtgtgtgtatgtgtatctcacactcatgcattgtcctctttttatttagattggcagtgtagggagttgtgggtagtggggaagagggttaggagggtttcattgtctgtgaagtgagaccttccttttacttttcttctattgcctctgagagcatcaggcctagaggcctgactgccaagccatgggtagcctgggtgtaaaacctggagatggtggatgatccccacgccacagcccttttgtctctgcaaactgccttcttcggaaagaagaaggtgggaggatgtgaattgttagtttctgagttttaccaaataaagtagaatataagaagaaa

SEQ ID NO: 124871 - DNA, 3906 bp, Homo sapiens
  Payload ID: 4520
  Gene Symbol: DDB1
  Gene Name: damage-specific DNA binding protein 1, 127kDa
  ENST ID: ENST00000540166
  CDS Start-End: 395-3673
acaatctcatcggcggttgccatctgtcagagggagccaggaatgagctgcatctggggggccttggccttagggcggcctgtgccagagggaccacctacctttatccggcgcacaccagcttccccgtggatccctgcggatagatgtggtcactgctgacccactcaaggcctggggatttgctcatcgtttttatcaaggactcacacagtgctggactcacacaagccagaagagggtttagggaccagtgctatccctggtttcagtggcctgaaaggatggaaaaggaaaggaagtcaagtgaggcctccaggactctgcttgatcaacaccacacaaccactggagtgtcgcgctcgagtcccgacgggccgctccaagcctcgacatgtcgtacaactacgtggtaacggcccagaagcccaccgccgtgaacggctgcgtgaccggacactttacttcggccgaagacttaaacctgttgattgccaaaaacacgagattagagatctatgtggtcaccgccgaggggcttcggcccgtcaaagaggtgggcatgtatgggaagattgcggtcatggagcttttcaggcccaagggggagagcaaggacctgctgtttatcttgacagcgaagtacaatgcctgcatcctggagtataaacagagtggcgagagcattgacatcattacgcgagcccatggcaatgtccaggaccgcattggccgcccctcagagaccggcattattggcatcattgaccctgagtgccggatgattggcctgcgtctctatgatggccttttcaaggttattccactagatcgcgataataaagaactcaaggccttcaacatccgcctggaggagctgcatgtcattgatgtcaagttcctatatggttgccaagcacctactatttgctttgtctaccaggaccctcaggggcggcacgtaaaaacctatgaggtgtctctccgagaaaaggaattcaataagggcccttggaaacaggaaaatgtcgaagctgaagcttccatggtgatcgcagtcccagagccctttgggggggccatcatcattggacaggagtcaatcacctatcacaatggtgacaaatacctggctattgcccctcctatcatcaagcaaagcacgattgtgtgccacaatcgagtggaccctaatggctcaagatacctgctgggagacatggaaggccggctcttcatgctgcttttggagaaggaggaacagatggatggcaccgtcactctcaaggatctccgtgtagaactccttggagagacctctattgctgagtgcttgacataccttgataatggtgttgtgtttgtcgggtctcgcctgggtgactcccagcttgtgaagctcaacgttgacagtaatgaacaaggctcctatgtagtggccatggaaacctttaccaacttaggacccattgtcgatatgtgcgtggtggacctggagaggcaggggcaggggcagctggtcacttgctctggggctttcaaggaaggttctttgcggatcatccggaatggaattggaatccacgagcatgccagcattgacttaccaggcatcaaaggattatggccactgcggtctgaccctaatcgtgagactgatgacactttggtgctctcttttgtgggccagacaagagttctcatgttaaatggagaggaggtagaagaaaccgaactgatgggtttcgtggatgatcagcagactttcttctgtggcaacgtggctcatcagcagcttatccagatcacttcagcatcggtgaggttggtctctcaagaacccaaagctctggtcagtgaatggaaggagcctcaggccaagaacatcagtgtggcctcctgcaatagcagccaggtggtggtggctgtaggcagggccctctactatctgcagatccatcctcaggagctccggcagatcagccacacagagatggaacatgaagtggcttgcttggacatcaccccattaggagacagcaatggactgtcccctctttgtgccattggcctctggacggacatctcggctcgtatcttgaagttgccctcttttgaactactgcacaaggagatgctgggtggagagatcattcctcgctccatcctgatgaccacctttgagagtagccattacctcctttgtgccttgggagatggagcgcttttctactttgggctcaacattgagacaggtctgttgagcgaccgtaagaaggtgactttgggcacccagcccaccgtattgaggacttttcgttctctttctaccaccaacgtctttgcttgttctgaccgccccactgtcatctatagcagcaaccacaaattggtcttctcaaatgtcaacctcaaggaagtgaactacatgtgtcccctcaattcagatggctatcctgacagcctggcgctggccaacaatagcaccctcaccattggcaccatcgatgagatccagaagctgcacattcgcacagttcccctctatgagtctccaaggaagatctgctaccaggaagtgtcccagtgtttcggggtcctctccagccgcattgaagtccaagacacgagtgggggcacgacagccttgaggcccagcgctagcacccaggctctgtccagcagtgtaagctccagcaagctgttctccagcagcactgctcctcatgagacctcctttggagaagaggtggaggtgcacaacctacttatcattgaccaacacacctttgaagtgcttcatgcccaccagtttctgcagaatgaatatgccctcagtctggtttcctgcaagctgggcaaagaccccaacacttacttcattgtgggcacagcaatggtgtatcctgaagaggcagagcccaagcagggtcgcattgtggtctttcagtattcggatggaaaactacagactgtggctgaaaaggaagtgaaaggggccgtgtactctatggtggaatttaacgggaagctgttagccagcatcaatagcacggtgcggctctatgagtggacaacagagaaggagctgcgcactgagtgcaaccactacaacaacatcatggccctctacctgaagaccaagggcgacttcatcctggtgggcgaccttatgcgctcagtgctgctgcttgcctacaagcccatggaaggaaactttgaagagattgctcgagactttaatcccaactggatgagtgctgtggaaatcttggatgatgacaattttctgggggctgaaaatgcctttaacttgtttgtgtgtcaaaaggatagcgctgccaccactgacgaggagcggcagcacctccaggaggttggtcttttccacctgggcgagtttgtcaatgtcttttgccacggctctctggtaatgcagaatctgggtgagacttccacccccacacaaggctcggtgctcttcggcacggtcaacggcatgatagggctggtgacctcactgtcagagagctggtacaacctcctgctggacatgcagaatcgactcaataaagtcatcaaaagtgtggggaagatcgagcactccttccacctggagatcctttcacaccgagcggaagacagaaccagccacaggtttcatcgacggtgacttgattgagagtttcctggatattagccgccccaagatgcaggaggtggtggcaaacctacagtatgacgatggcagcggtatgaagcgagaggccactgcagacgacctcatcaaggttgtggaggagctaactcggatccattagccaagggcagggggcccctttgctgaccctccccaaaggctttgccctgctgccctccccctcctctccaccatcgtcttcttgg

SEQ ID NO: 124872 - DNA, 540 bp, Homo sapiens
  Payload ID: 4520
  Gene Symbol: DDB1
  Gene Name: damage-specific DNA binding protein 1, 127kDa
  ENST ID: ENST00000543627
  CDS Start-End: 213-540
ctggaggctgcagggctgacggctctcctggctcattaaggttccctacggagaaatactggttttgtgtttgaggttcgaatttgtagagcaataggggcactaataacgttgggcaagcagaccggtgggccctttgaagtctgaagaatcaacgcgcaaaagggaggagtgtcgcgctcgagtcccgacgggccgctccaagcctcgacatgtcgtacaactacgtggtaacggcccagaagcccaccgccgtgaacggctgcgtgaccggacactttacttcggccgaagacttaaacctgttgattgccaaaaacacgagattagagatctatgtggtcaccgccgaggggcttcggcccgtcaaagaggtgggcatgtatgggaagattgcggtcatggagcttttcaggcccaagggggagagcaaggacctgctgtttatcttgacagcgaagtacaatgcctgcatcctggagtataaacagagtggcgagagcattgacatcattacgcgagcccatggcaatgtccagg

SEQ ID NO: 124873 - DNA, 1220 bp, Homo sapiens
  Payload ID: 4520
  Gene Symbol: DDB1
  Gene Name: damage-specific DNA binding protein 1, 127kDa
  ENST ID: ENST00000535283
  CDS Start-End: 803-1220
gcctggcccagtgctgggtttgccttgttgacgatgcgcttggattgttaaggacaccgatgttcagaacccgggaagagtcatcttaacccacattctcagctgaatatgcagaccccaagcttgcatgtttatatacaccctaatcatgattccaaaacaaaactgttgttcagagttggaggtagctgagtgtggatggaggtattggtagactgccaggagggcagggggtgtggacaaaacagtgttttcatataaagctctgggacttcttcatttgacttggtctgtcagataaaagttttgtgagactttagatgaagactggaagaagtgaacactttctccggcattctcaattagagcctgccactgtaactgtaatagagtaaaattggaggggcaagaggcatgagaagggattacgcagtcattgtcatttggaggacacacggctcttaggtccagtccagttttcttagtctgattagggaagtagctttgttgaatgcatgaactgagactctttgaggtgccggatttggcaagaaggggagtagctggagggagttggagaagtatgtgaagtaaatgagaattctggaggtatttagacataagtgataggattattttgaagggatgggaggcccttcccctgagttcaaaagttagagggtctgttctttcaggacactttacttcggccgaagacttaaacctgttgattgccaaaaacacgagattagagatctatgtggtcaccgccgaggggcttcggcccgtcaaagaggtgggcatgtatgggaagattgcggtcatggagcttttcaggcccaagggggagagcaaggacctgctgtttatcttgacagcgaagtacaatgcctgcatcctggagtataaacagagtggcgagagcattgacatcattacgcgagcccatggcaatgtccaggaccgcattggccgcccctcagagaccggcattattggcatcattgaccctgagtgccggatgattggcctgcgtctctatgatggccttttcaaggttattccactagatcgcgataataaagaactcaaggccttcaacatccgcctggaggagctgcatgtcattgatgtcaagttcctatatggttgccaagcacctactatttgctttgtctaccaggtactggatcaggaagagagagcgagaaactgtgagg

SEQ ID NO: 124874 - DNA, 558 bp, Homo sapiens
  Payload ID: 4520
  Gene Symbol: DDB1
  Gene Name: damage-specific DNA binding protein 1, 127kDa
  ENST ID: ENST00000542337
  CDS Start-End: 121-558
aagaggcgaggcggtgcctccgggggcggggcctccttcggttggcggcctcgggcttcgggagtcctccaagaggccagtgtcgcgctcgagtcccgacgggccgctccaagcctcgacatgtcgtacaactacgtggtaacggcccagaagcccaccgccgtgaacggctgcgtgaccggacactttacttcggccgaagacttaaacctgttgattgccaaaaacacgagattagagatctatgtggtcaccgccgaggggcttcggcccgtcaaagaggtgggcatgtatgggaagattgcggtcatggagcttttcaggcccaagggggagagcaaggacctgctgtttatcttgacagcgaagtacaatgcctgcatcctggagtataaacagagtggcgagagcattgacatcattacgcgagcccatggcaatgtccaggaccgcattggccgcccctcagagaccggcattattggcatcattgaccctgagtgccggatgattggcctgcgtctctatgatggccttttcaaggttattccactagat

SEQ ID NO: 124875 - DNA, 805 bp, Homo sapiens
  Payload ID: 4520
  Gene Symbol: DDB1
  Gene Name: damage-specific DNA binding protein 1, 127kDa
  ENST ID: ENST00000539426
  CDS Start-End: 310-805
gccccgggggcggccgggcaggagtgggcccggcgaatggaaggcgctggcggccgaggaacctcccccagcaccgcgacctcgaaagagtcgtccctgtacgcgctttttgggggttggaagccgctctcgagggtcccctttcgtcctggggaggtcattcggcctcgagaacagggcgggcccagtgagacagaggagtgacactttacttcggccgaagacttaaacctgttgattgccaaaaacacgagattagagatctatgtggtcaccgccgaggggcttcggcccgtcaaagaggtgggcatgtatgggaagattgcggtcatggagcttttcaggcccaagggggagagcaaggacctgctgtttatcttgacagcgaagtacaatgcctgcatcctggagtataaacagagtggcgagagcattgacatcattacgcgagcccatggcaatgtccaggaccgcattggccgcccctcagagaccggcattattggcatcattgaccctgagtgccggatgattggcctgcgtctctatgatggccttttcaaggttattccactagatcgcgataataaagaactcaaggccttcaacatccgcctggaggagctgcatgtcattgatgtcaagttcctatatggttgccaagcacctactatttgctttgtctaccaggaccctcaggggcggcacgtaaaaacctatgaggtgtctctccgagaaaaggaattcaataagggcccttggaaacaggaaaatgtcgaagctgaagcttccatggtgatcgcag

SEQ ID NO: 124876 - DNA, 571 bp, Homo sapiens
  Payload ID: 4520
  Gene Symbol: DDB1
  Gene Name: damage-specific DNA binding protein 1, 127kDa
  ENST ID: ENST00000543658
  CDS Start-End: 86-571
gctgttgggggccacctgtcttttcgcttgtgtccctctttctagtgtcgcgctcgagtcccgacgggccgctccaagcctcgacatgtcgtacaactacgtggtaacggcccagaagcccaccgccgtgaacggctgcgtgaccggacactttacttcggccgaagacttaaacctgttgattgccaaaaacacgagattagagatctatgtggtcaccgccgaggggcttcggcccgtcaaagaggtgggcatgtatgggaagattgcggtcatggagcttttcaggcccaaggctctgtccagcagtgtaagctccagcaagctgttctccagcagcactgctcctcatgagacctcctttggagaagaggtggaggtgcacaacctacttatcattgaccaacacacctttgaagtgcttcatgcccaccagtttctgcagaatgaatatgccctcagtctggtttcctgcaagctgggcaaagaccccaacacttacttcattgtgggcacagcaatggtgtatcctgaagaggcagagcccaagcagggtcgcattgtggtcttt

SEQ ID NO: 124877 - DNA, 1870 bp, Homo sapiens
  Payload ID: 4521
  Gene Symbol: DDB2
  Gene Name: damage-specific DNA binding protein 2, 48kDa
  Uniprot ID: Q92466
  ENST ID: ENST00000256996
  CDS Start-End: 196-1479
ctccgagacgggtggggccggagctccaagctggtttgaacaagccctgggcatgtttggcgggaagttggcttagctcggctacctgtggccccgcagttttgtagtccccgccttgtttctccccagaggcctctcaatcctccctccatgatcttcgcatagagcacagtaccccttcacacggaggacgcgatggctcccaagaaacgcccagaaacccagaagacctccgagattgtattacgccccaggaacaagaggagcaggagtcccctggagctggagcccgaggccaagaagctctgtgcgaagggctccggtcctagcagaagatgtgactcagactgcctctgggtggggctggctggcccacagatcctgccaccatgccgcagcatcgtcaggaccctccaccagcataagctgggcagagcttcctggccatctgtccagcaggggctccagcagtcctttttgcacactctggattcttaccggatattacaaaaggctgccccctttgacaggagggctacatccttggcgtggcacccaactcaccccagcaccgtggctgtgggttccaaagggggagatatcatgctctggaattttggcatcaaggacaaacccaccttcatcaaagggattggagctggagggagcatcactgggctgaagtttaaccctctcaataccaaccagttttacgcctcctcaatggagggaacaactaggctgcaagactttaaaggcaacattctacgagtttttgccagctcagacaccatcaacatctggttttgtagcctggatgtgtctgctagtagccgaatggtggtcacaggagacaacgtggggaacgtgatcctgctgaacatggacggcaaagagctttggaatctcagaatgcacaaaaagaaagtgacgcatgtggccctgaacccatgctgtgattggttcctggccacagcctccgtagatcaaacagtgaaaatttgggacctgcgccaggttagagggaaagccagcttcctctactcgctgccgcacaggcatcctgtcaacgcagcttgtttcagtcccgatggagcccggctcctgaccacggaccagaagagcgagatccgagtttactctgcttcccagtgggactgccccctgggcctgatcccgcaccctcaccgtcacttccagcacctcacacccatcaaggcagcctggcatcctcgctacaacctcattgttgtgggccgatacccagatcctaatttcaaaagttgtaccccttatgaattgaggacgatcgacgtgttcgatggaaactcagggaagatgatgtgtcagctctatgacccagaatcttctggcatcagttcgcttaatgaattcaatcccatgggggacacgctggcctctgcaatgggttaccacattctcatctggagccaggaggaagccaggacacggaagtgagagacactaaagaaggtgtgggccagacaaggccttggagcccacacatgggatcaagtcctgcaagcagaggtggcgatttgttaaagggccaaaagtatccaaggttagggttggagcaggggtgctgggacctggggcactgtgggactgggacacttttatgttaatgctctggacttgcctccagagactgctccagagttggtgacacagctgtcccaagggcccctctgtatctagcctggaaccaaggttatcttggaactaaatgacttttctcctctcagtgggtggtagcagagggatcaagcagttatttgatttgtgctcacttttgatatggccaataaaaccataccgactgagcttctgcgtggatcttccagaa

SEQ ID NO: 124878 - DNA, 717 bp, Homo sapiens
  Payload ID: 4521
  Gene Symbol: DDB2
  Gene Name: damage-specific DNA binding protein 2, 48kDa
  Uniprot ID: Q92466
  ENST ID: ENST00000378600
  CDS Start-End: 1-717
atggctcccaagaaacgcccagaaacccagaagacctccgagattgtattacgccccaggaacaagaggagcaggagtcccctggagctggagcccgaggccaagaagctctgtgcgaagggctccggtcctagcagaagatgtgactcagactgcctctgggtggggctggctggcccacagatcctgccaccatgccgcagcatcgtcaggaccctccaccagcataagctgggcagagcttcctggccatctgtccagcaggggctccagcagtcctttttgcacactctggattcttaccggatattacaaaaggctgccccctttgacaggagggctacatccttggcgtggcacccaactcaccccagcaccgtggctgtgggttccaaagggggagatatcatgctctggaattttggcatcaaggacaaacccaccttcatcaaaggggcagcctggcatcctcgctacaacctcattgttgtgggccgatacccagatcctaatttcaaaagttgtaccccttatgaattgaggacgatcgacgtgttcgatggaaactcagggaagatgatgtgtcagctctatgacccagaatcttctggcatcagttcgcttaatgaattcaatcccatgggggacacgctggcctctgcaatgggttaccacattctcatctggagccaggaggaagccaggacacggaagtga

SEQ ID NO: 124879 - DNA, 1591 bp, Homo sapiens
  Payload ID: 4521
  Gene Symbol: DDB2
  Gene Name: damage-specific DNA binding protein 2, 48kDa
  Uniprot ID: Q92466
  ENST ID: ENST00000378601
  CDS Start-End: 146-880
gcatgtttggcgggaagttggcttagctcggctacctgtggccccgcagttttgtagtccccgccttgtttctccccagaggcctctcaatcctccctccatgatcttcgcatagagcacagtaccccttcacacggaggacgcgatggctcccaagaaacgcccagaaacccagaagacctccgagattgtattacgccccaggaacaagaggagcaggagtcccctggagctggagcccgaggccaagaagctctgtgcgaagggctccggtcctagcagaagatgtgactcagactgcctctgggtggggctggctggcccacagatcctgccaccatgccgcagcatcgtcaggaccctccaccagcataagctgggcagagcttcctggccatctgtccagcaggggctccagcagtcctttttgcacactctggattcttaccggatattacaaaaggctgccccctttgacaggagggctacatccttggcgtggcacccaactcaccccagcaccgtggctgtgggttccaaagggggagatatcatgctctggaattttggcatcaaggacaaacccaccttcatcaaagggattggagctggagggagcatcactgggctgaagtttaaccctctcaataccaaccagttttacgcctcctcaatggagggaacaactaggctgcaagactttaaaggcaacattctacgagtttttgccagctcagacaccatcaacatctggttttgtagcctggatgtgtctgctagtagccgaatggtggtcacaggagacaacgtggggaacgtgatcctgctgaacatggacggcaaagagcttgtttcagtcccgatggagcccggctcctgaccacggaccagaagagcgagatccgagtttactctgcttcccagtgggactgccccctgggcctgatcccgcaccctcaccgtcacttccagcacctcacacccatcaaggcagcctggcatcctcgctacaacctcattgttgtgggccgatacccagatcctaatttcaaaagttgtaccccttatgaattgaggacgatcgacgtgttcgatggaaactcagggaagatgatgtgtcagctctatgacccagaatcttctggcatcagttcgcttaatgaattcaatcccatgggggacacgctggcctctgcaatgggttaccacattctcatctggagccaggaggaagccaggacacggaagtgagagacactaaagaaggtgtgggccagacaaggccttggagcccacacatgggatcaagtcctgcaagcagaggtggcgatttgttaaagggccaaaagtatccaaggttagggttggagcaggggtgctgggacctggggcactgtgggactgggacacttttatgttaatgctctggacttgcctccagagactgctccagagttggtgacacagctgtcccaagggcccctctgtatctagcctggaaccaaggttatcttggaactaaatgacttttctcctctcagtgggtggtagcagagggatcaagcagttatttgatttgtgctcacttttg

SEQ ID NO: 124880 - DNA, 1092 bp, Homo sapiens
  Payload ID: 4521
  Gene Symbol: DDB2
  Gene Name: damage-specific DNA binding protein 2, 48kDa
  Uniprot ID: Q92466
  ENST ID: ENST00000378603
  CDS Start-End: 1-1092
atggctcccaagaaacgcccagaaacccagaagacctccgagattgtattacgccccaggaacaagaggagcaggagtcccctggagctggagcccgaggccaagaagctctgtgcgaagggctccggtcctagcagaagatgtgactcagactgcctctgggtggggctggctggcccacagatcctgccaccatgccgcagcatcgtcaggaccctccaccagcataagctgggcagagcttcctggccatctgtccagcagattggagctggagggagcatcactgggctgaagtttaaccctctcaataccaaccagttttacgcctcctcaatggagggaacaactaggctgcaagactttaaaggcaacattctacgagtttttgccagctcagacaccatcaacatctggttttgtagcctggatgtgtctgctagtagccgaatggtggtcacaggagacaacgtggggaacgtgatcctgctgaacatggacggcaaagagctttggaatctcagaatgcacaaaaagaaagtgacgcatgtggccctgaacccatgctgtgattggttcctggccacagcctccgtagatcaaacagtgaaaatttgggacctgcgccaggttagagggaaagccagcttcctctactcgctgccgcacaggcatcctgtcaacgcagcttgtttcagtcccgatggagcccggctcctgaccacggaccagaagagcgagatccgagtttactctgcttcccagtgggactgccccctgggcctgatcccgcaccctcaccgtcacttccagcacctcacacccatcaaggcagcctggcatcctcgctacaacctcattgttgtgggccgatacccagatcctaatttcaaaagttgtaccccttatgaattgaggacgatcgacgtgttcgatggaaactcagggaagatgatgtgtcagctctatgacccagaatcttctggcatcagttcgcttaatgaattcaatcccatgggggacacgctggcctctgcaatgggttaccacattctcatctggagccaggaggaagccaggacacggaagtga

SEQ ID NO: 124881 - DNA, 793 bp, Homo sapiens
  Payload ID: 4521
  Gene Symbol: DDB2
  Gene Name: damage-specific DNA binding protein 2, 48kDa
  ENST ID: ENST00000610805
  CDS Start-End: 50-325
ctccatgatcttcgcatagagcacagtaccccttcacacggaggacgcgatggctcccaagaaacgcccagaaacccagaagacctccgagattgtattacgccccaggaacaagaggagcaggagtcccctggagctggagcccgaggccaagaagctctgtgcgaagggctccgaccacacagacatggaaaggccgcaggaggtgatgagacagagattaaccgtgccgaatgaaacaaggcttcctttcggggaattcagcagaaaaacctttcgtgagattggagaggaaaatatgtctgttctgcttggcaggtcctagcagaagatgtgactcagactgcctctgggtggggctggctggcccacagatcctgccaccatgccgcagcatcgtcaggaccctccaccagcataagctgggcagagcttcctggccatctgtccagcaggggctccagcagtcctttttgcacactctggattcttaccggatattacaaaaggctgccccctttgacaggagggctacatccttggcgtggcacccaactcaccccagcaccgtggctgtgggttccaaagggggagatatcatgctctggaattttggcatcaaggacaaacccaccttcatcaaagggattggagctggagggagcatcactgggctgaagtttaaccctctcaataccaaccagttttacgcctcctcaatggagggaacaactaggctgcaagactttaaaggcaacattctacgagtttttgccagctcagacaccatcaa

SEQ ID NO: 124882 - DNA, 960 bp, Homo sapiens
  Payload ID: 4521
  Gene Symbol: DDB2
  Gene Name: damage-specific DNA binding protein 2, 48kDa
  Uniprot ID: Q92466
  ENST ID: ENST00000616278
  CDS Start-End: 1-471
atggctcccaagaaacgcccagaaacccagaagacctccgagattgtattacgccccaggaacaagaggagcaggagtcccctggagctggagcccgaggccaagaagctctgtgcgaagggctccggtcctagcagaagatgtgactcagactgcctctgggtggggctggctggcccacagatcctgccaccatgccgcagcatcgtcaggaccctccaccagcataagctgggcagagcttcctggccatctgtccagcaggggctccagcagtcctttttgcacactctggattcttaccggatattacaaaaggctgccccctttgacaggagggctacatccttggcgtggcacccaactcaccccagcaccgtggctgtgggttccaaagggggagatatcatgctctggaattttggcatcaaggacaaacccaccttcatcaaagggcatctggttttgtagcctggatgtgtctgctagtagccgaatggtggtcacaggagacaacgtggggaacgtgatcctgctgaacatggacggcaaagagcttgtttcagtcccgatggagcccggctcctgaccacggaccagaagagcgagatccgagtttactctgcttcccagtgggactgccccctgggcctgatcccgcaccctcaccgtcacttccagcacctcacacccatcaaggcagcctggcatcctcgctacaacctcattgttgtgggccgatacccagatcctaatttcaaaagttgtaccccttatgaattgaggacgatcgacgtgttcgatggaaactcagggaagatgatgtgtcagctctatgacccagaatcttctggcatcagttcgcttaatgaattcaatcccatgggggacacgctggcctctgcaatgggttaccacattctcatctggagccaggaggaagccaggacacggaagtga

SEQ ID NO: 124883 - DNA, 556 bp, Homo sapiens
  Payload ID: 4521
  Gene Symbol: DDB2
  Gene Name: damage-specific DNA binding protein 2, 48kDa
  ENST ID: ENST00000622878
  CDS Start-End: 277-556
acccgcagaggcctggcagcgccgcgtttgaggagggttcgtgtcaggaagtcaaggctggatgatcgcttaagcccaggagttaaagaccggcccggacaacaaagcgagaccccgtctctccagaaaaagaaaaaaagagagagagagagagaaattagccgggcgtggtggcgtacgcttgtagtcccatctacttaggaggctgagaggcctctcaatcctccctccatgatcttcgcatagagcacagtaccccttcacacggaggacgcgatggctcccaagaaacgcccagaaacccagaagacctccgagattgtattacgccccaggaacaagaggagcaggagtcccctggagctggagcccgaggccaagaagctctgtgcgaagggctccggtcctagcagaagatgtgactcagactgcctctgggtggggctggctggcccacagatcctgccaccatgccgcagcatcgtcaggaccctccaccagcataagctgggcagagcttcctggccatctgtccagcaggggctccagcagtcct

SEQ ID NO: 124884 - DNA, 580 bp, Homo sapiens
  Payload ID: 4521
  Gene Symbol: DDB2
  Gene Name: damage-specific DNA binding protein 2, 48kDa
  ENST ID: ENST00000622090
  CDS Start-End: 93-580
gtagtccccgccttgtttctccccagaggcctctcaatcctccctccatgatcttcgcatagagcacagtaccccttcacacggaggacgcgatggctcccaagaaacgcccagaaacccagaagacctccgagattgtattacgccccaggaacaagaggagcaggagtcccctggagctggagcccgaggccaagaagctctgtgcgaagggctccggtactgcctgtcctagcagaagatgtgactcagactgcctctgggtggggctggctggcccacagatcctgccaccatgccgcagcatcgtcaggaccctccaccagcataagctgggcagagcttcctggccatctgtccagcaggggctccagcagtcctttttgcacactctggattcttaccggatattacaaaaggctgccccctttgacaggagggctacatccttggcgtggcacccaactcaccccagcaccgtggctgtgggttccaaagggggagatatcatgctctggaattttggcatcaaggacaaacccaccttcatcaaagggattggagctggagggagcatcac

SEQ ID NO: 124885 - DNA, 1649 bp, Homo sapiens
  Payload ID: 4521
  Gene Symbol: DDB2
  Gene Name: damage-specific DNA binding protein 2, 48kDa
  ENST ID: ENST00000617847
  CDS Start-End: 1-287
ctgccccctttgacaggagggctacatccttggcgtggcacccaactcaccccagcaccgtggctgtgggttccaaagggggagatatcatgctctggaattttggcatcaaggacaaacccaccttcatcaaagggattggagctggagggagcatcactgggctgaagtttaaccctctcaataccaaccagttttacgcctcctcaatggagggaacaactaggctgcaagactttaaaggcaacattctacgagtttttgccagctcagacaccatcaaataagccagcatggcgtggacccagaaagccacctagagaatggagcaacagctcagaacttgagactgaatgccctgcactcactgtggtgtaatgacctgacctgttcctgggtggaagcttatatggatggaatcttttccataaagtgctctggacttcccaagagaaagtggctggagaaattacagaatgcggccgggtgcagtggctcatgcttgaaatcccagcactttgggaggccaagcatctggttttgtagcctggatgtgtctgctagtagccgaatggtggtcacaggagacaacgtggggaacgtgatcctgctgaacatggacggcaaagagctttggaatctcagaatgcacaaaaagaaagtgacgcatgtggccctgaacccatgctgtgattggttcctggccacagcctccgtagatcaaacagtgaaaatttgggacctgcgccaggttagagggaaagccagcttcctctactcgctgccgcacaggcatcctgtcaacgcagcttgtttcagtcccgatggagcccggctcctgaccacggaccagaagagcgagatccgagtttactctgcttcccagtgggactgccccctgggcctgatcccgcaccctcaccgtcacttccagcacctcacacccatcaagtagggacggggtttcaccatgttagccaggatggtctcgatctcctgacctcgtgatccgcctgcctcagcctcccaaagtgttgagattacaggcagcctggcatcctcgctacaacctcattgttgtgggccgatacccagatcctaatttcaaaagttgtaccccttatgaattgaggacgatcgacgtgttcgatggaaactcagggaagatgatgtgtcagctctatgacccagaatcttctggcatcagttcgcttaatgaattcaatcccatgggggacacgctggcctctgcaatgggttaccacattctcatctggagccaggaggaagccaggacacggaagtgagagacactaaagaaggtgtgggccagacaaggccttggagcccacacatgggatcaagtcctgcaagcagaggtggcgatttgttaaagggccaaaagtatccaaggttagggttggagcaggggtgctgggacctggggcactgtgggactgggacacttttatgttaatgctctggacttgcctccagagactgctccagagttggtgacacagctgtcccaagggcccctctgtatctagcctggaaccaaggttatcttggaactaaatgacttttctcctctcagtgggtggtagcagagggatcaagcagttatttgatttgtgctcacttttgat

SEQ ID NO: 124886 - DNA, 852 bp, Homo sapiens
  Payload ID: 4521
  Gene Symbol: DDB2
  Gene Name: damage-specific DNA binding protein 2, 48kDa
  ENST ID: ENST00000614825
  CDS Start-End: 170-852
agcgagaccccgtctctccagaaaaagaaaaaaagagagagagagagagaaattagccgggcgtggtggcgtacgcttgtagtcccatctacttaggaggctgaggcctctcaatcctccctccatgatcttcgcatagagcacagtaccccttcacacggaggacgcgatggctcccaagaaacgcccagaaacccagaagacctccgagattgtattacgccccaggaacaagaggagcaggagtcccctggagctggagcccgaggccaagaagctctgtgcgaagggctccggtcctagcagaagatgtgactcagactgcctctgggtggggctggctggcccacagatcctgccaccatgccgcagcatcgtcaggaccctccaccagcataagctgggcagagcttcctggccatctgtccagcaggggctccagcagtcctttttgcacactctggattcttaccggatattacaaaaggctgccccctttgacaggagggctacatccttggcgtggcacccaactcaccccagcaccgtggctgtgggttccaaagggggagatatcatgctctggaattttggcatcaaggacaaacccaccttcatcaaagggattggagctggagggagcatcactgggctgaagtttaaccctctcaataccaaccagttttacgcctcctcaatggagggaacaactaggctgcaagactttaaaggcaacattctacgagtttttgccagctcagacaccatcaacatctggttttgtagcctggatgtgtctgctagtagccgaatggtggtcacaggagacaacgtggggaacgtgatcctgct

SEQ ID NO: 124887 - DNA, 1433 bp, Homo sapiens
  Payload ID: 4522
  Gene Symbol: DAOA
  Gene Name: D-amino acid oxidase activator
  Uniprot ID: P59103
  ENST ID: ENST00000329625
  CDS Start-End: 279-527
ttagctgggaggacccaaaatgctggaaaagctgatgggtgctgattctctccagcttttcagggtataaaggaatctgaacacgactgatattttctttaatttttagatccagatatacattgggtaaaatctacttcataggttttcaaaggagcattcttctgagcaaatctgaaaactctctaaactctattgcaaaggagacagaagaaggaagagagacggtaacaaggaaagaaggatggaagagaaggcatgaggacggctatttggaaatggcacagaggcatttacagagatcattatgtccttgggtctcttaccttcctcagccctatgcagagcttgaagaagtaagcagccatgttggaaaagtcttcatggcaagaaactatgagttccttgcctatgaggcctctaaggaccgcaggcagcctctagaacgaatgtggacctgcaactacaaccagcaaaaagaccagtcatgcaaccacaaggaaataacttctaccaaagctgaatgagtttggaagcagattcttcccagccaatccttctgatgacaatgtagtctggccaacatcttcactggactctgacggactctgtgtctgggacccagctgataacacgtggtaatatgttttataaaattatatttttatgaatatttttatgaaatataatttttatgaattatatttttatgaagatttgttacacaatgatataaactaataccataggtaatcaaaatcctctcctcttgtttggtaatatttcatcactaaattattattgaaagttacacatactgctttgtgagctgtcataatcagtaaaacaaacaacggaaattcaaaagtcctgtgaagttttttgaatagttagtgaatttatgtgggaaaatattcaagtatattaatttatccaaatagtaatgatgtctccctttgccattgttatggatttatggatttatgtatctgatacatgtaacattacattttcaatcaatactattgatggacccttccctacttttataatttctaactatagttttagggagaatactaataatggaagcattacttttattttttctataaattcctctggaaatatgtatttcttatgtcctaaggttattaacaaaaagagaaaataatttctgatttataattcactttccttcaaaaaataataactcagtgtctagtaaggtaaagcaaaaaaagttaaaagaacccataagtttattttaaaatacctactcagaagcaaaactgactttctattaaaaattaaaaaaaaaagttttcttattattgttttgtttccttgtttttaggtgatgggattgtatttgcaactctctggtcagtaagtgataaaatgccatttctatgcacccacctggcctgtgt

SEQ ID NO: 124888 - DNA, 742 bp, Homo sapiens
  Payload ID: 4522
  Gene Symbol: DAOA
  Gene Name: D-amino acid oxidase activator
  Uniprot ID: P59103
  ENST ID: ENST00000375936
  CDS Start-End: 47-508
tcatctctgcttcacaatgccgatgatttagctgggaggacccaaaatgctggaaaagctgatgggtgctgattctctccagcttttcagatccagatatacattgggtaaaatctacttcataggttttcaaaggagcattcttctgagcaaatctgaaaactctctaaactctattgcaaaggagacagaagaaggaagagagacggtaacaaggaaagaaggatggaagagaaggcatgaggacggctatttggaaatggcacagaggcatttacagagatcattatgtccttgggtctcttaccttcctcagccctatgcagagcttgaagaagtaagcagccatgttggaaaagtcttcatggcaagaaactatgagttccttgcctatgaggcctctaaggaccgcaggcagcctctagaacgaatgtggacctgcaactacaaccagcaaaaagaccagtcatgcaaccacaaggaaataacttctaccaaagctgaatgagtttggaagcagattcttcccagccaatccttctgatgacaatgtagtctggccaacatcttcactggactctgacggactctgtgtctgggacccagctgataacacgtggtgatgggattgtatttgcaactctctggtcagtaagtgataaaatgccatttctatgcacccacctggcctgtgtgactgggagaatctctctttttattaaatgtgcttcaagttttaaca

SEQ ID NO: 124889 - DNA, 1009 bp, Homo sapiens
  Payload ID: 4522
  Gene Symbol: DAOA
  Gene Name: D-amino acid oxidase activator
  Uniprot ID: P59103
  ENST ID: ENST00000559369
  CDS Start-End: 527-775
ccaaacttctttcatttaaagaaccaaacttctttaaataaaaatgactcacaataatttaatattttaccatttacaaagagattaactacaacaatattgatcttgagttaatttcccacgaataacattttcatttcttaaaatttgctgaatggaaagccagaaagtagagtgaagcaagtaatgtgtgtgatttggaaagggcatggcaggaggtctcatctctgcttcacaatgccgatgatttagctgggaggacccaaaatgctggaaaagctgatgggtgctgattctctccagcttttcagggtataaaggaatctgaacacgactgatattttctttaatttttagatccagatatacattgggtaaaatctacttcataggttttcaaaggagcattcttctgagcaaatctgaaaactctctaaactctattgcaaaggagacagaagaaggaagagagacggtaacaaggaaagaaggatggaagagaaggcatgaggacggctatttggaaatggcacagaggcatttacagagatcattatgtccttgggtctcttaccttcctcagccctatgcagagcttgaagaagtaagcagccatgttggaaaagtcttcatggcaagaaactatgagttccttgcctatgaggcctctaaggaccgcaggcagcctctagaacgaatgtggacctgcaactacaaccagcaaaaagaccagtcatgcaaccacaaggaaataacttctaccaaagctgaatgagtttggaagcagattcttcccagccaatccttctgatgacaatgtagtctggccaacatcttcactggactctgacggactctgtgtctgggacccagctgataacacgtggtgatgggattgtatttgcaactctctggtcagtaagtgataaaatgccatttctatgcacccacctggcctgtgtgactgggagaatctctctttttattaaatgtgcttcaagttttaaca

SEQ ID NO: 124890 - DNA, 823 bp, Homo sapiens
  Payload ID: 4522
  Gene Symbol: DAOA
  Gene Name: D-amino acid oxidase activator
  ENST ID: ENST00000595812
  CDS Start-End: 259-636
ttagctgggaggacccaaaatgctggaaaagctgatgggtgctgattctctccagcttttcagggtataaaggaatctgaacacgactgatattttctttaatttttagatccagatatacattgggtaaaatctacttcataggttttcaaaggagcattcttctgagcaaatctgaaaactctctaaactctattgcaaaggagacagaagaaggaagagagacggtaacaaggaaagaaggatggaagagaaggcatgaggacggctatttggaaatggcacagaggcatttacagagatcattatgtccttgggtctcttaccttcctcagccctatgcagagagctgggacttctaaccaatggaacatgggaaaggtgatgacacttgactccggtgatgaggttacctttcacaagacctggccaactgagaccggatctccttacaggcttgaagaagtaagcagccatgttggaaaagtcttcatggcaagaaactatgagttccttgcctatgaggcctctaaggaccgcaggcagcctctagaacgaatgtggacctgcaactacaaccagcaaaaagaccagtcatgcaaccacaaggaaataacttctaccaaagctgaatgagtttggaagcagattcttcccagccaatccttctgatgacaatgtagtctggccaacatcttcactggactctgacggactctgtgtctgggacccagctgataacacgtggtgatgggattgtatttgcaactctctggtcagtaagtgataaaatgccatttctatgcacccacctggcctgtgt

SEQ ID NO: 124891 - DNA, 1027 bp, Homo sapiens
  Payload ID: 4522
  Gene Symbol: DAOA
  Gene Name: D-amino acid oxidase activator
  Uniprot ID: P59103
  ENST ID: ENST00000473269
  CDS Start-End: 272-652
tgaatggaaagccagaaagtagagtgaagcaagtaatgtgtgtgtgagtagtcattggatacatacataacagtgagcaagtttatcagctcctgcatggcagtgttctgatgatcttttgctgcaaaagagctacaccccaaattagtggcttaaagtaaaagcttactagtgtatatgatgattctgttggtccaggatttggaaagggcatggcaggaggtctcatctctgcttcacaatgccgatgatttagctgggaggacccaaaatgctggaaaagctgatgggtgctgattctctccagcttttcagatccagatatacattgggtaaaatctacttcataggttttcaaaggagcattcttctgagcaaatctgaaaactctctaaactctattgcaaaggagacagaagaaggaagagagacggtaacaaggaaagaaggatggaagagaaggcatgaggacggctatttggaaatggcacagaggcatttacagagatcattatgtccttgggtctcttaccttcctcagccctatgcagaacattccaaggtgattctaaatggcaatttgcactgtcattttaaaagaatttctcagatatttgctgggcactttatggaaggagacactgaggcttgaagaagtaagcagccatgttggaaaagtcttcatggcaagaaactatgagttccttgcctatgaggcctctaaggaccgcaggcagcctctagaacgaatgtggacctgcaactacaaccagcaaaaagaccagtcatgcaaccacaaggaaataacttctaccaaagctgaatgagtttggaagcagattcttcccagccaatccttctgatgacaatgtagtctggccaacatcttcactggactctgacggactctgtgtctgggacccagctgataacacgtggtgatgggattgtatttgcaactctctggtcagtaagtgataaaatgccatttctatgcacccacctggcctgtgtgactgggagaatc

SEQ ID NO: 124892 - DNA, 921 bp, Homo sapiens
  Payload ID: 4522
  Gene Symbol: DAOA
  Gene Name: D-amino acid oxidase activator
  ENST ID: ENST00000488534
  CDS Start-End: 349-516
agcaagtaatgtgtgtgatttggaaagggcatggcaggaggtctcatctctgcttcacaatgccgatgatttagctgggaggacccaaaatgctggaaaagctgatgggtgctgattctctccagcttttcagggtataaaggaatctgaacacgactgatattttctttaatttttagatccagatatacattgggtaaaatctacttcataggttttcaaaggagcattcttctgagcaaatctgaaaactctctaaactctattgcaaaggagacagaagaaggaagagagacggtaacaaggaaagaaggatggaagagaaggcatgaggacggctatttggaaatggcacagaggcatttacagagatcattatgtccttgggtctcttaccttcctcagccctatgcagaacattccaaggtgattctaaatggcaatttgcactgtcattttaaaagaatttctcagatatttgctgggcactttatggaaggagacactgaggcttgaagaagtaagcagccatgttggaaaagtcttcatggcaagaaactatgagttccttgcctatgaggcctctaaggaccgcaggcagcctctagaacgaatgtggacctgcaactacaaccagcaaaaagaccagtcatgcaaccacaaggaaataacttctaccaaagctgaatgagtttggaagcagattcttcccagccaatccttctgatgacaatgtagtctggccaacatcttcactggactctgacggactctgtgtctgggacccagctgataacacgtggtgatgggattgtatttgcaactctctggtcagtaagtgataaaatgccatttctatgcacccacctggcctgtgtgactgggagaatctctctttttattaaatgtgcttcaagtttt

SEQ ID NO: 124893 - DNA, 777 bp, Homo sapiens
  Payload ID: 4522
  Gene Symbol: DAOA
  Gene Name: D-amino acid oxidase activator
  ENST ID: ENST00000601240
  CDS Start-End: 20-316
ttagctgggaggacccaaaatgctggaaaagctgatgggtgctgattctctccagcttttcagatccagatatacattgggtaaaatctacttcataggttttcaaaggagcattcttctgagcaaatctgaaaactctctaaactctattgcaaaggagacagaagaaggaagagagacggtaacaaggaaagaaggatggaagagaaggcatgaggacggctatttggaaatggcacagaggcatttacagagatcattatgtccttgggtctcttaccttcctcagccctatgcagagagctgggacttctaaccaatggaacatgggaaaggtgatgacacttgactccggtgatgaggttacctttcacaagacctggccaactgagaccggatctccttacaggcttgaagaagtaagcagccatgttggaaaagtcttcatggcaagaaactatgagttccttgcctatgaggcctctaaggaccgcaggcagcctctagaacgaatgtggacctgcaactacaaccagcaaaaagaccagtcatgcaaccacaaggaaataacttctaccaaagctgaatgagtttggaagcagattcttcccagccaatccttctgatgacaatgtagtctggccaacatcttcactggactctgacggactctgtgtctgggacccagctgataacacgtggtgatgggattgtatttgcaactctctggtcagtaagtgataaaatgccatttctatgcacccacctggcctgtgt

SEQ ID NO: 124894 - DNA, 982 bp, Homo sapiens
  Payload ID: 4522
  Gene Symbol: DAOA
  Gene Name: D-amino acid oxidase activator
  Uniprot ID: P59103
  ENST ID: ENST00000600388
  CDS Start-End: 534-782
tgctgaatggaaagccagaaagtagagtgaagcaagtaatgtgtgtgtgagtagtcattggatacatacataacagtgagcaagtttatcagctcctgcatggcagtgttctgatgatcttttgctgcaaaagagctacaccccaaattagtggcttaaagtaaaagcttactagtgtatatgatgattctgttggtccaggatttggaaagggcatggcaggaggtctcatctctgcttcacaatgccgatgatttagctgggaggacccaaaatgctggaaaagctgatgggtgctgattctctccagcttttcagggtataaaggaatctgaacacgactgatattttctttaatttttagatccagatatacattgggtaaaatctacttcataggttttcaaaggagcattcttctgagcaaatctgaaaactctctaaactctattgcaaaggagacagaagaaggaagagagacggtaacaaggaaagaaggatggaagagaaggcatgaggacggctatttggaaatggcacagaggcatttacagagatcattatgtccttgggtctcttaccttcctcagccctatgcagagcttgaagaagtaagcagccatgttggaaaagtcttcatggcaagaaactatgagttccttgcctatgaggcctctaaggaccgcaggcagcctctagaacgaatgtggacctgcaactacaaccagcaaaaagaccagtcatgcaaccacaaggaaataacttctaccaaagctgaatgagtttggaagcagattcttcccagccaatccttctgatgacaatgtagtctggccaacatcttcactggactctgacggactctgtgtctgggacccagctgataacacgtggtgatgggattgtatttgcaactctctggtcagtaagtgataaaatgccatttctatgcacccacctggcctgtgtgactgggagaatc

SEQ ID NO: 124895 - DNA, 681 bp, Homo sapiens
  Payload ID: 4522
  Gene Symbol: DAOA
  Gene Name: D-amino acid oxidase activator
  ENST ID: ENST00000489237
  CDS Start-End: 42-233
tctgcttcacaatgccgatgatttagctgggaggacccaaaatgctggaaaagctgatgggtgctgattctctccagcttttcagatccagatatacattgggtaaaatctacttcataggttttcaaaggagcattcttctgagcaaatctgaaaactctctaaactctattggagacagaagaaggaagagagacggtaacaaggaaagaaggatggaagagaaggcatgaggacggctatttggaaatggcacagaggcatttacagagatcattatgtccttgggtctcttaccttcctcagccctatgcagagcttgaagaagtaagcagccatgttggaaaagtcttcatggcaagaaactatgagttccttgcctatgaggcctctaaggaccgcaggcagcctctagaacgaatgtggacctgcaactacaaccagcaaaaagaccagtcatgcaaccacaaggaaataacttctaccaaagctgaatgagtttggaagcagattcttcccagccaatccttctgatgacaatgtagtctggccaacatcttcactggactctgacggactctgtgtctgggacccagctgataacacgtggtgatgggattgtatttgcaactctctggtcagtaagtgataaaatgccatttctatgcacccacctggcct

SEQ ID NO: 124896 - DNA, 973 bp, Homo sapiens
  Payload ID: 4522
  Gene Symbol: DAOA
  Gene Name: D-amino acid oxidase activator
  ENST ID: ENST00000471432
  CDS Start-End: 1-92
tgagcaaatctgaaaactctctaaactctattgggtctcactatgttgcccaggctggagtgcagcagcgcctcggcctccccaagtgctaggattacaggtgtcagccacaacacccagcccattaatgtttaatcccctagaagcaaaggagacagaagaaggaagagagacggtaacaaggaaagaaggatggaagagaaggcatgaggacggctatttggaaatggcacagaggcatttacagagatcattatgtccttgggtctcttaccttcctcagccctatgcagaacattccaaggtgattctaaatggcaatttgcactgtcattttaaaagaatttctcagatatttgctgggcactttatggaaggagacactgagctcattttgtataaagcaggcctttatgtcagaagctgagacctccaacagatggaaatgaaaaccatcctgctaccagaccttggatctggaaggagctgggacttctaaccaatggaacatgggaaaggtgatgacacttgactccggtgatgaggttacctttcacaagacctggccaactgagaccggatctccttacaggcttgaagaagtaagcagccatgttggaaaagtcttcatggcaagaaactatgagttccttgcctatgaggcctctaaggaccgcaggcagcctctagaacgaatgtggacctgcaactacaaccagcaaaaagaccagtcatgcaaccacaaggaaataacttctaccaaagctgaatgagtttggaagcagattcttcccagccaatccttctgatgacaatgtagtctggccaacatcttcactggactctgacggactctgtgtctgggacccagctgataacacgtggtgatgggattgtatttgcaactctctggtcagtaagtgataaaatgccatttctatgcacccacctggcctgtgtgactgggagaatc

SEQ ID NO: 124897 - DNA, 1368 bp, Homo sapiens
  Payload ID: 4522
  Gene Symbol: DAOA
  Gene Name: D-amino acid oxidase activator
  Uniprot ID: P59103
  ENST ID: ENST00000618629
  CDS Start-End: 1-462
atgctggaaaagctgatgggtgctgattctctccagcttttcagatccagatatacattgggtaaaatctacttcataggttttcaaaggagcattcttctgagcaaatctgaaaactctctaaactctattgcaaaggagacagaagaaggaagagagacggtaacaaggaaagaaggatggaagagaaggcatgaggacggctatttggaaatggcacagaggcatttacagagatcattatgtccttgggtctcttaccttcctcagccctatgcagagcttgaagaagtaagcagccatgttggaaaagtcttcatggcaagaaactatgagttccttgcctatgaggcctctaaggaccgcaggcagcctctagaacgaatgtggacctgcaactacaaccagcaaaaagaccagtcatgcaaccacaaggaaataacttctaccaaagctgaatgagtttggaagcagattcttcccagccaatccttctgatgacaatgtagtctggccaacatcttcactggactctgacggactctgtgtctgggacccagctgataacacgtggtaatatgttttataaaattatatttttatgaatatttttatgaaatataatttttatgaattatatttttatgaagatttgttacacaatgatataaactaataccataggtaatcaaaatcctctcctcttgtttggtaatatttcatcactaaattattattgaaagttacacatactgctttgtgagctgtcataatcagtaaaacaaacaacggaaattcaaaagtcctgtgaagttttttgaatagttagtgaatttatgtgggaaaatattcaagtatattaatttatccaaatagtaatgatgtctccctttgccattgttatggatttatggatttatgtatctgatacatgtaacattacattttcaatcaatactattgatggacccttccctacttttataatttctaactatagttttagggagaatactaataatggaagcattacttttattttttctataaattcctctggaaatatgtatttcttatgtcctaaggttattaacaaaaagagaaaataatttctgatttataattcactttccttcaaaaaataataactcagtgtctagtaaggtaaagcaaaaaaagttaaaagaacccataagtttattttaaaatacctactcagaagcaaaactgactttctattaaaaattaaaaaaaaaagttttcttattattgttttgtttccttgtttttaggtgatgggattgtatttgcaactctctggtcagtaagtgataaaatgccatttctatgcacccacctggcctgtgt

SEQ ID NO: 124898 - DNA, 1756 bp, Homo sapiens
  Payload ID: 4523
  Gene Symbol: DAO
  Gene Name: D-amino-acid oxidase
  Uniprot ID: P14920
  ENST ID: ENST00000228476
  CDS Start-End: 205-1248
agtgcagtgccgagccccacccctcaagccgtgccctgtccatagctccagactttgaccctgcactccagtccgggctggcggacagagggctggaaacaagacgctccagaatcaggagcttcccctcaggaaatagcatcctgtgtccccgcactgcagttgtctggtctctccagcagtttggtacttccggctgctgcaatgcgtgtggtggtgattggagcaggagtcatcgggctgtccaccgccctctgcatccatgagcgctaccactcagtcctgcagccactggacataaaggtctacgcggaccgcttcaccccactcaccaccaccgacgtggctgccggcctctggcagccctacctttctgaccccaacaacccacaggaggcggactggagccaacagacctttgactatctcctgagccatgtccattctcccaacgctgaaaacctgggcctgttcctaatctcgggctacaacctcttccatgaagccattccggacccttcctggaaggacacagttctgggatttcggaagctgacccccagagagctggatatgttcccagattacggctatggctggttccacacaagcctaattctggagggaaagaactatctacagtggctgactgaaaggttaactgagaggggagtgaagttcttccagcggaaagtggagtcttttgaggaggtggcaagagaaggcgcagacgtgattgtcaactgcactggggtatgggctggggcgctacaacgagaccccctgctgcagccaggccgggggcagatcatgaaggtggacgccccttggatgaagcacttcattctcacccatgacccagagagaggcatctacaattccccgtacatcatcccagggacccagacagttactcttggaggcatcttccagttgggaaactggagtgaactaaacaatatccaggaccacaacaccatttgggaaggctgctgcagactggagcccacactgaagaatgcaagaattattggtgaacgaactggcttccggccagtacgcccccagattcggctagaaagagaacagcttcgcactggaccttcaaacacagaggtcatccacaactatggccatggaggctacgggctcaccatccactggggatgtgccctggaggcagccaagctctttgggagaatcctggaagaaaagaaattgtccagaatgccaccatcccacctctgaagactccagtgactgctgcctccccccacaagaactcccttctcccctcagccaatgaatcaatgtgctccttcataagccattgcttctccctcacttctttcctcaaagaagcatgaggtgagagaaagccacaaagtcagtgcctggagaagggttcagcccaacatggggcccctctcatcactgaaatccctctaccttctctgggtctggcattataaagaacagctgaggctgtcattccatgagtcttcagaagaaaggacagctcagaaaatcaaagaggccaactgcccagagccacagaaaatggaggataattgaggctaagtaacctgattacaagttgtactaacatattaaaggttctgaaaagtcctgcagcaaagacaactatctgatgttgtttaacccagtgcttgctaaacctatctggctatggaactcttttgcccagagcacccatgaatgccatgacacaaatctgagaaaatgctggaacaga

SEQ ID NO: 124899 - DNA, 1345 bp, Homo sapiens
  Payload ID: 4523
  Gene Symbol: DAO
  Gene Name: D-amino-acid oxidase
  ENST ID: ENST00000551281
  CDS Start-End: 114-959
gaaacccacgcagcctcctggattcttccccgtccctccctctgtcctggggctgtgacctcctccatgttattcacagggtctcagcacgattcatctcaaaggctgctgcaatgcgtgtggtggtgattggagcaggagtcatcgggctgtccaccgccctctgcatccatgagcgctaccactcagtcctgcagccactggacataaaggtctacgcggaccgcttcaccccactcaccaccaccgacgtggctgccggcctctggcagccctacctttctgaccccaacaacccacaggaggcggactggagccaacagacctttgactatctcctgagccatgtccattctcccaacgctgaaaacctgggcctgttcctaatctcgggctacaacctcttccatgaagccattccggtggcaagagaaggcgcagacgtgattgtcaactgcactggggtatgggctggggcgctacaacgagaccccctgctgcagccaggccgggggcagatcatgaaggtggacgccccttggatgaagcacttcattctcacccatgacccagagagaggcatctacaattccccgtacatcatcccagggacccagacagttactcttggaggcatcttccagttgggaaactggagtgaactaaacaatatccaggaccacaacaccatttgggaaggctgctgcagactggagcccacactgaagaatgcaagaattattggtgaacgaactggcttccggccagtacgcccccagattcggctagaaagagaacagcttcgcactggaccttcaaacacagaggtcatccacaactatggccatggaggctacgggctcaccatccactggggatgtgccctggaggcagccaagctctttgggagaatcctggaagaaaagaaattgtccagaatgccaccatcccacctctgaagactccagtgactgctgcctccccccacaagaactcccttctcccctcagccaatgaatcaatgtgctccttcataagccattgcttctccctcacttctttcctcaaagaagcatgaggtgagagaaagccacaaagtcagtgcctggagaagggttcagcccaacatggggcccctctcatcactgaaatccctctaccttctctgggtctggcattataaagaacagctgaggctgtcattccatgagtcttcagaagaaaggacagctcagaaaatcaaagaggccaactgcccagagccacagaaaatggaggataattgaggctaagtaacctgattacaagttgtactaacatattaaaggttctgaaaagtcctgca

SEQ ID NO: 124900 - DNA, 640 bp, Homo sapiens
  Payload ID: 4523
  Gene Symbol: DAO
  Gene Name: D-amino-acid oxidase
  ENST ID: ENST00000547166
  CDS Start-End: 51-640
gagagatccagcctctcaaacatccagcagagagaccataggctgctgcaatgcgtgtggtggtgattggagcaggagtcatcgggctgtccaccgccctctgcatccatgagcgctaccactcagtcctgcagccactggacataaaggtctacgcggaccgcttcaccccactcaccaccaccgacgtggctgccggcctctggcagccctacctttctgaccccaacaacccacaggaggcggactggagccaacagacctttgactatctcctgagccatgtccattctcccaacgctgaaaacctgggcctgttcctaatctcgggctacaacctcttccatgaagccattccggacccttcctggaaggacacagttctgggatttcggaagctgacccccagagagctggatatgttcccagattacggctatggctggttccacacaagcctaattctggagggaaagaactatctacagtggctgactgaaaggttaactgagaggggagtgaagttcttccagcggaaagtggagtcttttgaggaggtggcaagagaaggcgcagacgtgattgtcaactgcactggggtatgggctggggcgctacaacgagaccccctgctgcagcc

SEQ ID NO: 124901 - DNA, 1576 bp, Homo sapiens
  Payload ID: 4523
  Gene Symbol: DAO
  Gene Name: D-amino-acid oxidase
  ENST ID: ENST00000547122
  CDS Start-End: 144-380
tgcactccagtccgggctggcggacagagggctggaaacaagacgctccagaatcaggagcttcccctcaggaaatagcatcctgtgtccccgcactgcagttgtctggtctctccagcagtttggtacttccggctgctgcaatgcgtgtggtggtgattggagcaggagtcatcgggctgtccaccgccctctgcatccatgagcgctaccactcagtcctgcagccactggacataaaggtctacgcggaccgcttcaccccactcaccaccaccgacgtggctgccggcctctggcagccctacctttctgaccccaacaacccacaggaggcgacccttcctggaaggacacagttctgggatttcggaagctgacccccagagagctggatatgttcccagattacggctatggctggttccacacaagcctaattctggagggaaagaactatctacagtggctgactgaaaggttaactgagaggggagtgaagttcttccagcggaaagtggagtcttttgaggaggtggcaagagaaggcgcagacgtgattgtcaactgcactggggtatgggctggggcgctacaacgagaccccctgctgcagccaggccgggggcagatcatgaaggtggacgccccttggatgaagcacttcattctcacccatgacccagagagaggcatctacaattccccgtacatcatcccagggacccagacagttactcttggaggcatcttccagttgggaaactggagtgaactaaacaatatccaggaccacaacaccatttgggaaggctgctgcagactggagcccacactgaagaatgcaagaattattggtgaacgaactggcttccggccagtacgcccccagattcggctagaaagagaacagcttcgcactggaccttcaaacacagaggtcatccacaactatggccatggaggctacgggctcaccatccactggggatgtgccctggaggcagccaagctctttgggagaatcctggaagaaaagaaattgtccagaatgccaccatcccacctctgaagactccagtgactgctgcctccccccacaagaactcccttctcccctcagccaatgaatcaatgtgctccttcataagccattgcttctccctcacttctttcctcaaagaagcatgaggtgagagaaagccacaaagtcagtgcctggagaagggttcagcccaacatggggcccctctcatcactgaaatccctctaccttctctgggtctggcattataaagaacagctgaggctgtcattccatgagtcttcagaagaaaggacagctcagaaaatcaaagaggccaactgcccagagccacagaaaatggaggataattgaggctaagtaacctgattacaagttgtactaacatattaaaggttctgaaaagtcctgcagcaaagacaactatctgatgttgtttaacccagtgcttgctaaacctatctggctatggaactcttttgcccagagcacccatgaatgccatgacacaaatctgagaaaatgctggaa

SEQ ID NO: 124902 - DNA, 2385 bp, Homo sapiens
  Payload ID: 4523
  Gene Symbol: DAO
  Gene Name: D-amino-acid oxidase
  ENST ID: ENST00000549215
  CDS Start-End: 95-466
agaatcaggagcttcccctcaggaaatagcatcctgtgtccccgcactgcagttgtctggtctctccagcagtttggtacttccggctgctgcaatgcgtgtggtggtgattggagcaggagtcatcgggctgtccaccgccctctgcatccatgagcgctaccactcagtcctgcagccactggacataaaggtctacgcggaccgcttcaccccactcaccaccaccgacgtggctgccggcctctggcagccctacctttctgaccccaacaacccacaggaggcggactggagccaacagacctttgactatctcctgagccatgtccattctcccaacgctgaaaacctgggcctgttcctaatctcgggctacaacctcttccatgaagccattccgctatggctggttccacacaagcctaattctggagggaaagaactatctacagtggctgactgaaaggttaactgagaggggagtgaagttcttccagcggaaagtggagtcttttgaggaggtggcaagagaaggcgcagacgtgattgtcaactgcactggggtatgggctggggcgctacaacgagaccccctgctgcagccaggccgggggcagatcatgaaggtggacgccccttggatgaagcacttcattctcacccatgacccagagagaggcatctacaattccccgtacatcatcccagggacccagacagttactcttggaggcatcttccagttgggaaactggagtgaactaaacaatatccaggaccacaacaccatttgggaaggctgctgcagactggagcccacactgaagaatgcaagaattattggtgaacgaactggcttccggccagtacgcccccagattcggctagaaagagaacagcttcgcactggaccttcaaacacagaggtatgctcccatggcaaggaaagtaatgccctcttccactcctcagatggctctggcattttcagggaacagtcatgtctgatctcaagttccacacaggctccatagcaggcaggggcagtggtggctaatatcccctcctctataaatggggaaactgaggctcaatgatggttaaggacctgctcaaggttacatagaggggcagtggtgatgttaatggaggtggtgctgatgagatcaatgttgataatggtgtgactgggagtggggatggtagctggtgctgatggaaatgacactatcaagtatgttagtaccacagcagaggtgacgatctcaaaggcagtgttaacatggctgcactaactgtctcattggcaatattaatcgtgtggcagagatgacagtatcaatggcagtgttaatgatggtggtgaaatggtgaatggggttggttttctaaagtctgtggtcaaataacaggaaaatgtgtacttactggatgtgtacttcgtgtcagacacagcagcaagtccattacatgaatgaccttattaaatctcctctggagctctttgggatagggacagttctccctatgcttcggatgaggaaactggggtgaattaagaggtgaagtcacttgcccaagtcagaccactggtggaaggcagggctgggatgtgatttgaatttgactccaaggctatttccagatatccattttgtggctgccccatcatctcttgcaactgttccagggggtccccaccattccaccccggtgccaagagaagctcaggtggcatctggctttgcccaggactcttcgggaggctcctgagtcttccagggcagaagagcttcatctattctttccactgtccctctcggacctggccaccttctctcttgcctctcctaggtcatccacaactatggccatggaggctacgggctcaccatccactggggatgtgccctggaggcagccaagctctttgggagaatcctggaagaaaagaaattgtccagaatgccaccatcccacctctgaagactccagtgactgctgcctccccccacaagaactcccttctcccctcagccaatgaatcaatgtgctccttcataagccattgcttctccctcacttctttcctcaaagaagcatgaggtgagagaaagccacaaagtcagtgcctggagaagggttcagcccaacatggggcccctctcatcactgaaatccctctaccttctctgggtctggcattataaagaacagctgaggctgtcattccatgagtcttcagaagaaaggacagctcagaaaatcaaagaggccaactgcccagagccacagaaaatggaggataattgaggctaagtaacctgattacaagttgtactaacatattaaaggttctgaaaagtcctgcagcaaagacaa

SEQ ID NO: 124903 - DNA, 676 bp, Homo sapiens
  Payload ID: 4523
  Gene Symbol: DAO
  Gene Name: D-amino-acid oxidase
  ENST ID: ENST00000547768
  CDS Start-End: 177-676
ggcggacagagggctggaaacaagacgctccagaatcaggagcttcccctcaggaaatagcatcctgtgtccccgcactgcagttgtctggtctctccagcagtttggtacttccggacccttcctggaaggacacagttctgggatttcggaagctgacccccagagagctggatatgttcccagattacggctatggctggttccacacaagcctaattctggagggaaagaactatctacagtggctgactgaaaggttaactgagaggggagtgaagttcttccagcggaaagtggagtcttttgaggaggtggcaagagaaggcgcagacgtgattgtcaactgcactggggtatgggctggggcgctacaacgagaccccctgctgcagccaggccgggggcagatcatgaaggtggacgccccttggatgaagcacttcattctcacccatgacccagagagaggcatctacaattccccgtacatcatcccagggacccagacagttactcttggaggcatcttccagttgggaaactggagtgaactaaacaatatccaggaccacaacaccatttgggaaggctgctgcagactggagcccacactgaagaatgcaagaattattggtgaacgaactggcttccggccagtacgcccccagattcg

SEQ ID NO: 124904 - DNA, 1877 bp, Homo sapiens
  Payload ID: 4524
  Gene Symbol: DAND5
  Gene Name: DAN domain family member 5, BMP antagonist
  Uniprot ID: Q8N907
  ENST ID: ENST00000317060
  CDS Start-End: 180-749
actctcctcccccgctgtgggtctacagaaatgcctcccaggctatccaggaggggccaagagattaaaagcaggttcagaaggctcagatgccactcaccagacagcagggtcgactgctagtgaccttgagcccagtccggacagacagacaggcagacagacgcacggacaagcagatgctccttggccagctatccactcttctgtgcctgcttagcggggccctgcctacaggctcagggaggcctgaaccccagtctcctcgacctcagtcctgggctgcagccaatcagacctgggctctgggcccaggggccctgcccccactggtgccagcttctgcccttgggagctggaaggccttcttgggcctgcagaaagccaggcagctggggatgggcaggctgcagcgtgggcaagacgaggtggctgctgtgactctgccgctgaaccctcaggaagtgatccaggggatgtgtaaggctgtgcccttcgttcaggtgttctcccggcccggctgctcagccatacgcctccgaaatcatctgtgctttggtcattgctcctctctctacatccctggctcggaccccaccccactagtcctgtgcaacagctgtatgcctgctcgcaagcgttgggcacccgtggtcctgtggtgtctcactggcagctcagcctcccgtcgacgggtgaagatatccaccatgctgatcgaggggtgtcactgcagcccaaaagcatgaactgagcatcgtggatgggtgcacggagacacgcaccttggagaaatgaggggagatggaccaagaaagacgtggacctggatgatgtactctgggtcaagagaccagggatgcagggttaggcagacaggtccccagagtcctcaccctgctccccagacagtagacacagtgcccgtcctggagttgcaccactgatagtcacagcacacaatgattgacaactcactttttttttttttttttgagatggagtctcgctctgtcgcccaggctggagtgcagtggcgcaatctcagctcactgcaagctccacctcccgggtttatgccattctcctgtctcagcctcccgagtagctgggactacaggcacccgccaacacgcccggctaattttttgtatttttagtaaagacagggtttcaccgtgttagccaggatggtctctatctcctgacctcgtgatctgcctgccttggccttattattttttttttttaaggacagagtctctctctgtcacccaggctggagtgcaatggcgcgatcttggctcactgtaacttccacttgccaggctcaagcagttctcctgcctcagcctcctgagtagctgggactacaggcacccgccaccatgcccagctaatttttgtatttttagtagagacagagtttcaccatattagcctggctggtctcaaactcctggcctcaggtgatctgcccacctcggcctcccaaagtgctgggatcaaatccactgttaatcattaggctgaactgtctcttatagaatgaggtcaaagacactcccagttgcagggagggtagatggccccacccagaccgagagacacagtgatgacctcagcctagggacaccaaaaaagaaaaaaaaaaaaacccaaaccaaaaacgcaaaccaaagcaggcaggcagacagctgctgggggaaatcctggggtccttgagacagaggcaggaccctcgtgttcccagctgcctcttgccttgatagtggtgctgtgtccctctcagaccccccacctgagtctccacagagccccacgcctggcatggcattccacagaaaccataaaggttggctgagtccagctgtcta

SEQ ID NO: 124905 - DNA, 1731 bp, Homo sapiens
  Payload ID: 4524
  Gene Symbol: DAND5
  Gene Name: DAN domain family member 5, BMP antagonist
  ENST ID: ENST00000585548
  CDS Start-End: 97-588
gggagacctggaaggaagcgactgcactgatccagaaatgcctcccaggctatccaggaggggccaagagattaaaagcaggttcagaaggctcagatgccactcaccagacagcagggtcgactgctagtgaccttgagcccagtccggacagacagacaggcagacagacgcacggacaagcagatgctccttggccagctatccactcttctgtgcctgcttagcggggccctgcctacaggctcagggaggcctgaaccccagtctcctcgacctcagtcctgggctgcagccaatcagacctgggctctgggcccaggggccctgcccccactggtgccagcttctgcccttgggagctggaaggccttcttgggcctgcagaaagccaggcagctggggatgggcaggctgcagcgtgggcaagacgaggtggctgctgtgactctgccgctgaaccctcaggaagtgatccaggggatgtgtaaggctgtgcccttcgttcagacacgggagtctcgctatgttgcccaagctagtcttgagcttctggcctcaagcaatcctcccacctcagcctcctgagttctaggtgttctcccggcccggctgctcagccatacgcctccgaaatcatctgtgctttggtcattgctcctctctctacatccctggctcggaccccaccccactagtcctgtgcaacagctgtatgcctgctcgcaagcgttgggcacccgtggtcctgtggtgtctcactggcagctcagcctcccgtcgacgggtgaagatatccaccatgctgatcgaggggtgtcactgcagcccaaaagcatgaactgagcatcgtggatgggtgcacggagacacgcaccttggagaaatgaggggagatggaccaagaaagacgtggacctggatgatgtactctgggtcaagagaccagggatgcagggttaggcagacaggtccccagagtcctcaccctgctccccagacagtagacacagtgcccgtcctggagttgcaccactgatagtcacagcacacaatgattgacaactcactttttttttttttttttgagatggagtctcgctctgtcgcccaggctggagtgcagtggcgcaatctcagctcactgcaagctccacctcccgggtttatgccattctcctgtctcagcctcccgagtagctgggactacaggcacccgccaacacgcccggctaattttttgtatttttagtaaagacagggtttcaccgtgttagccaggatggtctctatctcctgacctcgtgatctgcctgccttggccttattattttttttttttaaggacagagtctctctctgtcacccaggctggagtgcaatggcgcgatcttggctcactgtaacttccacttgccaggctcaagcagttctcctgcctcagcctcctgagtagctgggactacaggcacccgccaccatgcccagctaatttttgtatttttagtagagacagagtttcaccatattagcctggctggtctcaaactcctggcctcaggtgatctgcccacctcggcctcccaaagtgctgggatcaaatccactgttaatcattaggctgaactgtctcttatagaatgaggtcaaagacactcccagttgcagggagggtagatggccccacccagaccgagagacacagtgatgacctcagcctagggacaccaa

SEQ ID NO: 124906 - DNA, 2878 bp, Homo sapiens
  Payload ID: 4525
  Gene Symbol:
  Gene Name: DAQB-143M3.10
  ENST ID: ENST00000464460
  CDS Start-End: 569-1474
ggaagtggggagaatcaaggcggggaaatcggacttttgggtcgctgggggcaacgaagcctggagaggccttctttccattcccagaatatgtttgctgctttttcctctccccactggcctaaatggatcgctccgcctgtttcctccccagcacctagggcgcaatggaatattccattgcccctcctgtcctgggtctgtgttgcggggaacgctcgcgcggttgccagagaaagccccggacgtgacggatttgcgcgaccccaagcagcccgcccttccccctcccatccgtcattcccctgcgctctctttcctcacccttccccccgccaccgtgggttccagacttgggataagtaaacagcgggtggagcgaggcctacggacccaggccaggtgggagtctgcactcttcaaggggcctgggctgctgctcacgggtattaaagaactccgcgttgttcatggctgaggcgatgcattaggaagatcctggacctagagaacaagtcccccgaacgctgagttggaggcgggacttcgggtgcgcgttggcgggagcatgctggggctctgggggcagcggctccccgcggcgtgggtcctgcttctgttgcctttcctgccgctgctgctgcttgcagcccccgcgccccaccgcgcgtcctacaagccggtcatcgtggtgcatgggctcttcgacagctcgtacagcttccgccacctgctggaatacatcaatgagacacaccccgggactgtggtgacagtgctcgatctcttcgatgggagagagagcttgcgacccctgtgggaacaggtgcaagggttccgagaggctgtggtccccatcatggcaaaggcccctcaaggggtgcatctcatctgctactcgcaggggggccttgtgtgccgggctctgctttctgtcatggatgatcacaacgtggattctttcatctccctctcctctccacagatgggacagtatggagacacggactacttgaagtggctgttccccacctccatgcggtctaacctctatcggatctgctatagcccctggggccaggaattctccatctgcaactactggcatgatccccaccacgatgacttgtacctcaatgccagcagcttcctggccctgatcaatggggaaagagaccatcccaatgccacagtatggcggaagaactttctgcgtgtgggccacctggtgctgattgggggccctgatgatggtgttattactccctggcagtccagcttctttggtttctatgatgcaaatgagaccgtcctggagatggaggagcaactgcctgccaggcccacccaccagtctgagctgcttctgctgaggctggtctgcttgaagcctcccaggagaaagaagccagcctgtagggtccagcgtcaaagcgaatcatggggtccagggctgagctgtgcactctcttaggcggattctccttcctcctgctactgataccaggcgagggggccaagggtggatccctcagagagaggtgacaacagagggggtagggcccggggtgagctcttctcaggagccttctgctgggggtggggcttcacaggaggcaaaacataactgtaagtttagaatgggggtgagaggctgtcatctggagggagagcggggggcctcagtagcctcttgagggaagtgggactcctggctccccagggcctggcctactcaatctctcccacctcatcctctggcatggacgcagtcagggagtctgctccaagcagacactggtggtcccgctccactacaacgagtcctacagccaaccagtgtacaagccctacctgaccttgtgcgctgggaggcgcatctgcagcacttacaggaccatgtaccgcgttatgtggcgggaggtgaggcgggaggttcagcagacccatgcagtgtgctgccagggctggaagaagcggcacccgggggcgctcacctgtgaagccatctgcgccaagccttgcctgaacggaggcgtctgcgttaggcctgaccagtgcgagtgcgcccccggctggggagggaagcactgtcatgtggacgtggatgaatgtaggaccagcatcaccctctgctcgcaccattgttttaatacggcaggcagcttcacctgcggctgcccccatgacctagtgctaggcgtggacgggcgcacctgcatggaggggtccccagagcccccaaccagtgccagcatactcagcgtggccgttcgggaggcggaaaaagatgagcgcgctctgaagcaggagattcacgagctgcgagggcgcctggagcggctggagcagtgggccggtcaggctggggcctgggtcagagcggtgctgcccgtgccgcctgaagagctgcagccagaacaggtggctgagctgtggggccggggtgaccggatcgaatctctcagcgaccaggtgctgctgctggaggagaggctaggtgcctgctcctgtgaggacaacagcctgggcctcggcgtcaatcatcgataagaagcctctacagcacccctgccccctaatttatacagaaaccggacccactaatcctctgggattggccgactgtgagctgcagataaggctatcagccaccaaagagcaatgaacaatggaaacttcagagagctgaagaaacggggaggcctgtgttcttggcctgcccctgagtcttctggctgggggcaggttgcctgggcaagaactgcttcttcaattccttaacaaatgcaaccaccaacacccagatctctctctctctttattttcagtttttttgctgttatccagataattaataaaaaccaaccacgcaaaa

SEQ ID NO: 124907 - DNA, 1010 bp, Homo sapiens
  Payload ID: 4525
  Gene Symbol:
  Gene Name: DAQB-143M3.10
  ENST ID: ENST00000486292
  CDS Start-End: 1-383
accacgatgacttgtacctcaatgccagcagcttcctggccctgatcaatggggaaagagaccatcccaatgccacagtatggcggaagaactttctgcgtgtgggccacctggtgctgattgggggccctgatgatggtgttattactccctggcagtccagcttctttggtttctatgatgcaaatgagaccgtcctggagatggaggagcaactgcctgccaggcccacccaccagtctgagctgcttctgctgaggctggtctgcttgaagcctcccaggagaaagaagccaggtgggaatggagagagagaggaagcctgtagggtccagcgtcaaagcgaatcatggggtccagggctgagctgtgcactctcttaggcggattctccttcctcctgctactgataccaggcgagggggccaagggtggatccctcagagagaggtgacaacagagggggtagggcccggggtgagctcttctcaggagccttctgctgggggtggggcttcacaggaggcaaaacataactgtaagtttagaatgggggtgagaggctgtcatctggagggagagcggggggcctcagtagcctcttgagggaagtgggactcctggctccccagggcctggcctactcaatctctcccacctcatcctctggcatggacgcagtcagggagtctgctccaagcagacactggtggtcccgctccactacaacgagtcctacagccaaccagtgtacaagccctacctgaccttgtgcgctgggaggcgcatctgcagcacttacaggaccatgtaccgcgttatgtggcgggaggtgaggcgggaggttcagcagacccatgcagtgtgctgccagggctggaagaagcggcacccgggggcgctcacctgtgaagccatctgcgccaagccttgcctgaacggaggcgtctgcgttaggcctgaccagtgcgagtgcgcccccggctggggagggaagcactgtcatgtgg

SEQ ID NO: 124908 - DNA, 4181 bp, Homo sapiens
  Payload ID: 4525
  Gene Symbol:
  Gene Name: DAQB-143M3.10
  ENST ID: ENST00000459812
  CDS Start-End: 192-1097
agcgaggcctacggacccaggccaggtgggagtctgcactcttcaaggggcctgggctgctgctcacgggtattaaagaactccgcgttgttcatggctgaggcgatgcattaggaagatcctggacctagagaacaagtcccccgaacgctgagttggaggcgggacttcgggtgcgcgttggcgggagcatgctggggctctgggggcagcggctccccgcggcgtgggtcctgcttctgttgcctttcctgccgctgctgctgcttgcagcccccgcgccccaccgcgcgtcctacaagccggtcatcgtggtgcatgggctcttcgacagctcgtacagcttccgccacctgctggaatacatcaatgagacacaccccgggactgtggtgacagtgctcgatctcttcgatgggagagagagcttgcgacccctgtgggaacaggtgcaagggttccgagaggctgtggtccccatcatggcaaaggcccctcaaggggtgcatctcatctgctactcgcaggggggccttgtgtgccgggctctgctttctgtcatggatgatcacaacgtggattctttcatctccctctcctctccacagatgggacagtatggagacacggactacttgaagtggctgttccccacctccatgcggtctaacctctatcggatctgctatagcccctggggccaggaattctccatctgcaactactggcatgatccccaccacgatgacttgtacctcaatgccagcagcttcctggccctgatcaatggggaaagagaccatcccaatgccacagtatggcggaagaactttctgcgtgtgggccacctggtgctgattgggggccctgatgatggtgttattactccctggcagtccagcttctttggtttctatgatgcaaatgagaccgtcctggagatggaggagcaactgcctgccaggcccacccaccagtctgagctgcttctgctgaggctggtctgcttgaagcctcccaggagaaagaagccagcctgtagggtccagcgtcaaagcgaatcatggggtccagggctgagctgtgcactctcttaggcggattctccttcctcctgctactgataccagtcagggagtctgctccaagcagacactggtggtcccgctccactacaacgagtcctacagccaaccagtgtacaagccctacctgaccttgtgcgctgggaggcgcatctgcagcacttacaggaccatgtaccgcgttatgtggcgggaggtgaggcgggaggttcagcagacccatgcagtgtgctgccagggctggaagaagcggcacccgggggcgctcacctgtgaagccatctgcgccaagccttgcctgaacggaggcgtctgcgttaggcctgaccagtgcgagtgcgcccccggctggggagggaagcactgtcatgtgggaccagcatcaccctctgctcgcaccattgttttaatacggcaggcagcttcacctgcggctgcccccatgacctagtgctaggcgtggacgggcgcacctgcatggaggggtccccagagcccccaaccagtgccagcatactcagcgtggccgttcgggaggcggaaaaagatgagcgcgctctgaagcaggagattcacgagctgcgagggcgcctggagcggctggagcagtgggccggtcaggctggggcctgggtcagagcggtgctgcccgtgccgcctgaagagctgcagccagaacaggtggctgagctgtggggccggggtgaccggatcgaatctctcagcgaccaggtgctgctgctggaggagaggctaggtgcctgctcctgtgaggacaacagcctgggcctcggcgtcaatcatcgataagaagcctctacagcacccctgccccctaatttatacagaaaccggacccactaatcctctgggattggccgactgtgagctgcagataaggctatcagccaccaaagagcaatgaacaatggaaacttcagagagctgaagaaacggggaggcctgtgttcttggcctgcccctgagtcttctggctgggggcaggttgcctgggcaagaactgcttcttcaattccttaacaaatgcaaccaccaacacccagatctctctctctctttattttcagtttttttgctgttatccagataattaataaaaaccaaccacgcaaaactgggtcccaccctctccttttgctcccagcctacctccccagttgtgggaacaggtctggagtgagaggcagggagtggctaatgccaccaggaagaaatgaaaactggctcagagagggggaagcctcaacagaaaaagaaataaattaaaagccctcctatcccctccagccagggttcgttcctttccccaactccccagggggcagaagtgagtgcagcacctgatgtctgcttcttccccttgtgtctggcttcttcagatagtcaccaccaccccggccatcagtggagatttcccggaaaacagtgagcatggagtgccggactctgtcagccagagctgggacgtcatctggtgtcagcccttccgtgggcactgggggcagcacccgcacctgacattgtcctggggcaaggggagcaccatcatggcctgtccacccaggtctttgcccacagggatgtcctcccagcctctccggacacaccctaccccagaactgctcaaagccctcacccgaggtgaagcgacgctccttcttgcagtagaagtcttggatgactcacgtcctgggtgagcagggtctgggcgacctcagacatgacactgatggcatcccccgtgcgcttccggtcgatgaagatgactcctgccagccagcaggccagcccggcagagccagcccacagtagctcgcgcttggcaatgggcacacagcggcctggcagtacctccatcatcccttgggcagggtgggagtgggtgaggatcggggtggaggcagagtgtcacagaaggcaacccacctcacccagctcatcaccctctggtagggactggaggtgaaggaggagactaggcagggaggggggccccaagtgaaggaaagggtgaccaaaagtatatgtaccctgcttatgagggcagttctacccagggaatgaaggcctgagtgggaggcaagggggcaatgtcccagaggaaggggaattgaggatctctaggagaagatattctagggaaggtttcaggaggggaggcatggctgggggaggtgtgccctgtggtggggtctcaccaagcagatcgagagagctctggtggttggagacaacaacatagggctgcgagggagggaagtggtgagcccctcgcacctccactcggatcccgtacaggtatttgatgtggagcagcattagacgcaagatcctgtggggtcatggcaaggggtcccagtgggatccattgatgtccatctgcatgcctcagctccccccaccttactgtctttctgaccacctttgcagtcctctccccattccctgtctctggtctctctcagtcttttctacacacaccatgcccccttcccccaatccactactcactttgtacccttaggttccctcattgcccaagaccccttgcccctcacttcatgttctcgacgttgcgtcctcgcacggcacacacagggatggcgagcacagccaggaagaggatccagccattgtagaaggccatcttgaagaagtacttggcactggggctgcagaaccacagggtgggcagcaggaagagcagcagcaggaagagcagcagcagcagcatccatgcccctggccacaaatccattctggccacctgcaggggatggggcaagggacaatcagcctggtttctggaggagagtggggctccggatatattcagacaagagacacaagacacagacatctacaattcacagatacctgataataaatgacaacaagaataatagctaacacttgtagctggtaagggtcttataatggtctatacttgtgctgtccgagaaagtagccaccacctacatgtggctacttgaaatgcagctagtctgaactgagatgtgctggaaatgtaaaatacacatcagatttcaaagactgaataaaaaacaaaatgtg

SEQ ID NO: 124909 - DNA, 1101 bp, Homo sapiens
  Payload ID: 4526
  Gene Symbol:
  Gene Name: DAQB-331I12.15
  ENST ID: ENST00000519915
  CDS Start-End: 1-211
ccccttccccggtaccataaaatcccgggatatgagctggaagaggcatcacctgatcccggagacctttggagttaagaggcggcggaagcgagggcctgtggagtcggatcctcttcggggtgagccagaaggagcttcaagagcagggggagatcagaatcgtccagctgggcttcgacttggatgcccatggaattatcttcactgaggactacaggaccagagtcctcaaggcctgtgatggccgaccgtatgctggggcagtgcagaaatttctagcttcagtacttccagcctgtggggaccttagtttccagcaggaccaaatgacacagacctttggcttcagggactcagaaatcacgcatctggtgaatgctggagtcctcaccgtccgagatgctgggagctggtggctagctgtgcctggagctgggagattcatcaagtactttgttaaagggcgccaggctgtccttggcatggtccggaaggcaaagtaccgggaactgctcctatcagagctcctgggccggcgggcgcctgtcgtggtgcggcttggcctcacctaccatgtgcacgacctcattggggcccagctagtggactgcatctctaccacttcaggaaccctcctccgcctgccagagacatgaagattctgctcatcattgctcagctcctcagagtgggccgggaggggactagaagagctgcatgatggtggctgagacagggtcaccttgggaaggcttgggagccaggatgagtgtcgggctctcgtgtgtgcaaaaggttgctcttgttctctccttctgtggttcatctgggggtccccctatcggtgggggtgcagctccaggatgtgccccgaggacaggtagtgaaaggatcagtgttcctgagaaacccatctcgtaataatgtcccctgctccccaaaggtggacttcacccttagctcagaaagagacttcgcactcctcagtctccaggtgcccttgaaagatgcgaagagctgtggcctccatcaactcctcagaggccctgaggtccagctggtggcccattcgccatggctaaaggactctctgtccag

SEQ ID NO: 124910 - DNA, 1953 bp, Homo sapiens
  Payload ID: 4527
  Gene Symbol: DDO
  Gene Name: D-aspartate oxidase
  Uniprot ID: Q99489
  ENST ID: ENST00000368923
  CDS Start-End: 17-949
ctctgtctctcagggcatgagaccagccaggcactgggaaacaaggtttggtgccagagattttggtggcttccaagactgctttttcagagacaggctcatggacacagcacggattgcagttgtcggggcaggtgtggtggggctctccacggctgtgtgcatctccaaactggtgccccgatgctccgttaccatcatttcagacaagtttactccagataccaccagtgatgtggcagccggaatgcttattcctcacacttatccagatacacccattcacacgcagaagcagtggttcagagaaacctttaatcacctctttgcaattgccaattctgcagaagctggagatgctggtgttcatttggtatcagggataaagggaagtggaggctggacactcactcggcgaatagaagacctgtgggaacttcatccgtcctttgacatcgtggtcaactgttcaggccttggaagcagacagcttgcaggagactcaaagattttccctgtaaggggccaagtcctccaagttcaggctccctgggtggagcattttatccgagatggcagtgggctgacatatatttatcctggtacatcccatgtaaccctaggtggaactaggcaaaaaggggactggaatctgtccccggatgcagaaaatagcagagagattctttcccgatgctgtgctctggagccctccctccacggagcctgcaacatcagggagaaggtgggcttgaggccctacaggccaggcgtgcgactgcagacagagctccttgcgcgagatggacagaggctgcctgtagtccaccactatggccatgggagtgggggcatctcagtgcactggggcactgctctggaggccgccaggctggtgagcgagtgtgtccatgccctcaggacccccattcccaagtcaaacctgtagatgacataaaatgacagcaaagagactgagagactgttgatcaaagcacagaacaggttcaaataacttttccactgcatgaaagtttaattagacatttctttgttttcaacattagaagtggtgtaacatgtaagctgagcacggtggcatgcctatagtcccagctacttgagaggctgaggcaggaggattgttgagcccaggagtttgagtgcaatctgggtaacattttttagaggtgccagttcccacctctaaaaaaaacaccaacaacaaaagaaatgatgcaacatgtaggcttacttaggaagtccagcattaatggcatagggcataaagctctattttttgttaaaaatacttcttatagagtaaaatttatttagaactgatgtccaaggacctatgcagatttatatgaatgttggaagctatagagattttgatatcatttggcttataaatccacaggaggagataatgtatggaaaacatttaaatcactgtcaattgcagagctgcctgtgatcttcttaggttatagccaagtcagcaacataattcctctaaataaaattacattgtgctcacacagtgctggattattacatttaattgaagacaaagcatgcttgctcctagtactagcagcaagcttttcctcccctcagctggtaatgatggtaggagacagagatgaagttgcctatgtatgtcatatcaattcaatagctgcctggggtcaaacacctaggggttgtacattccattactgtaaatgattgagagctggtttgtggtatggttggctttgcctaagcatttttgaagatgaacagcatgtgcagccaaagaactaatttgctaattaaggtggaacaatcattctgaatgaaatataatcagagtactccgcagtttgttaagaagtattggggaggaggggaatgtgtctcacaataaaatgagttggaattgttgagttaaatgaatttaacctg

SEQ ID NO: 124911 - DNA, 2130 bp, Homo sapiens
  Payload ID: 4527
  Gene Symbol: DDO
  Gene Name: D-aspartate oxidase
  Uniprot ID: Q99489
  ENST ID: ENST00000368924
  CDS Start-End: 17-1126
ctctgtctctcagggcatgagaccagccaggcactgggaaacaaggtttggtgccagagattttggtggcttccaagactgctttttcagagacaggctcatggacacagcacggattgcagttgtcggggcaggtgtggtggggctctccacggctgtgtgcatctccaaactggtgccccgatgctccgttaccatcatttcagacaagtttactccagataccaccagtgatgtggcagccggaatgcttattcctcacacttatccagatacacccattcacacgcagaagcagtggttcagagaaacctttaatcacctctttgcaattgccaattctgcagaagctggagatgctggtgttcatttggtatcaggttggcagatatttcagagcactccgactgaagaagtgccattctgggctgacgtggttctgggatttcgaaagatgactgaggctgagctgaagaaattcccccagtatgtgtttggtcaggcttttacaaccctgaaatgtgaatgccctgcctacctcccgtggttggagaaaaggataaagggaagtggaggctggacactcactcggcgaatagaagacctgtgggaacttcatccgtcctttgacatcgtggtcaactgttcaggccttggaagcagacagcttgcaggagactcaaagattttccctgtaaggggccaagtcctccaagttcaggctccctgggtggagcattttatccgagatggcagtgggctgacatatatttatcctggtacatcccatgtaaccctaggtggaactaggcaaaaaggggactggaatctgtccccggatgcagaaaatagcagagagattctttcccgatgctgtgctctggagccctccctccacggagcctgcaacatcagggagaaggtgggcttgaggccctacaggccaggcgtgcgactgcagacagagctccttgcgcgagatggacagaggctgcctgtagtccaccactatggccatgggagtgggggcatctcagtgcactggggcactgctctggaggccgccaggctggtgagcgagtgtgtccatgccctcaggacccccattcccaagtcaaacctgtagatgacataaaatgacagcaaagagactgagagactgttgatcaaagcacagaacaggttcaaataacttttccactgcatgaaagtttaattagacatttctttgttttcaacattagaagtggtgtaacatgtaagctgagcacggtggcatgcctatagtcccagctacttgagaggctgaggcaggaggattgttgagcccaggagtttgagtgcaatctgggtaacattttttagaggtgccagttcccacctctaaaaaaaacaccaacaacaaaagaaatgatgcaacatgtaggcttacttaggaagtccagcattaatggcatagggcataaagctctattttttgttaaaaatacttcttatagagtaaaatttatttagaactgatgtccaaggacctatgcagatttatatgaatgttggaagctatagagattttgatatcatttggcttataaatccacaggaggagataatgtatggaaaacatttaaatcactgtcaattgcagagctgcctgtgatcttcttaggttatagccaagtcagcaacataattcctctaaataaaattacattgtgctcacacagtgctggattattacatttaattgaagacaaagcatgcttgctcctagtactagcagcaagcttttcctcccctcagctggtaatgatggtaggagacagagatgaagttgcctatgtatgtcatatcaattcaatagctgcctggggtcaaacacctaggggttgtacattccattactgtaaatgattgagagctggtttgtggtatggttggctttgcctaagcatttttgaagatgaacagcatgtgcagccaaagaactaatttgctaattaaggtggaacaatcattctgaatgaaatataatcagagtactccgcagtttgttaagaagtattggggaggaggggaatgtgtctcacaataaaatgagttggaattgttgagttaaatgaatttaacctg

SEQ ID NO: 124912 - DNA, 2021 bp, Homo sapiens
  Payload ID: 4527
  Gene Symbol: DDO
  Gene Name: D-aspartate oxidase
  ENST ID: ENST00000479373
  CDS Start-End: 17-349
ctctgtctctcagggcatgagaccagccaggcactgggaaacaaggtttggtgccagagattttggtggcttccaagactgctttttcagagacaggctcatggacacagcacggattgcagttgtcggggcaggtgtggtggggctctccacggctgtgtgcatctccaaactggtgccccgatgctccgttaccatcatttcagacaagtttactccagataccaccagtgatgtggcagccggaatgcttattcctcacacttatccagttggcagatatttcagagcactccgactgaagaagtgccattctgggctgacgtggttctgggatttcgaaagatgactgaggctgagctgaagaaattcccccagtatgtgtttggtcaggcttttacaaccctgaaatgtgaatgccctgcctacctcccgtggttggagaaaaggataaagggaagtggaggctggacactcactcggcgaatagaagacctgtgggaacttcatccgtcctttgacatcgtggtcaactgttcaggccttggaagcagacagcttgcaggagactcaaagattttccctgtaaggggccaagtcctccaagttcaggctccctgggtggagcattttatccgagatggcagtgggctgacatatatttatcctggtacatcccatgtaaccctaggtggaactaggcaaaaaggggactggaatctgtccccggatgcagaaaatagcagagagattctttcccgatgctgtgctctggagccctccctccacggagcctgcaacatcagggagaaggtgggcttgaggccctacaggccaggcgtgcgactgcagacagagctccttgcgcgagatggacagaggctgcctgtagtccaccactatggccatgggagtgggggcatctcagtgcactggggcactgctctggaggccgccaggctggtgagcgagtgtgtccatgccctcaggacccccattcccaagtcaaacctgtagatgacataaaatgacagcaaagagactgagagactgttgatcaaagcacagaacaggttcaaataacttttccactgcatgaaagtttaattagacatttctttgttttcaacattagaagtggtgtaacatgtaagctgagcacggtggcatgcctatagtcccagctacttgagaggctgaggcaggaggattgttgagcccaggagtttgagtgcaatctgggtaacattttttagaggtgccagttcccacctctaaaaaaaacaccaacaacaaaagaaatgatgcaacatgtaggcttacttaggaagtccagcattaatggcatagggcataaagctctattttttgttaaaaatacttcttatagagtaaaatttatttagaactgatgtccaaggacctatgcagatttatatgaatgttggaagctatagagattttgatatcatttggcttataaatccacaggaggagataatgtatggaaaacatttaaatcactgtcaattgcagagctgcctgtgatcttcttaggttatagccaagtcagcaacataattcctctaaataaaattacattgtgctcacacagtgctggattattacatttaattgaagacaaagcatgcttgctcctagtactagcagcaagcttttcctcccctcagctggtaatgatggtaggagacagagatgaagttgcctatgtatgtcatatcaattcaatagctgcctggggtcaaacacctaggggttgtacattccattactgtaaatgattgagagctggtttgtggtatggttggctttgcctaagcatttttgaagatgaacagcatgtgcagccaaagaactaatttgctaattaaggtggaacaatcattctgaatgaaatataatcagagtactccgcagtttgttaagaagtattggggaggaggggaatgtgtctcacaataaaatgagttggaattgttgagttaaatgaatttaacctg

SEQ ID NO: 124913 - DNA, 2039 bp, Homo sapiens; identical to SEQ ID NO: 109601
  Payload ID: 4528
  Gene Symbol:
  Gene Name: DASS-161H22.6
  ENST ID: ENST00000453381
  CDS Start-End: 24-323

SEQ ID NO: 124914 - DNA, 1266 bp, Homo sapiens
  Payload ID: 4529
  Gene Symbol:
  Gene Name: DASS-312M4.10
  ENST ID: ENST00000414847
  CDS Start-End: 4-1152
cccatggcagtcttattcctcctcctgttcctatgtggaactccccaggctgcagacaacatgcaggccatctatgtggccttgggggaggcagtagagctgccatgtccctcaccacctactctacatggggacgaacacctgtcatggttctgcagccctgcagcaggctccttcaccaccctggtagcccaagtccaagtgggcaggccagccccagaccctggaaaaccaggaagggaatccaggctcagactgctggggaactattctttgtggttggagggatccaaagaggaagatgccgggcggtactggtgcactgtgctaggtcagcaccacaactaccagaactggagggtgtacgacgtcttggtgctcaaaggatcccagttatctgcaagggctgcagatggatccccctgcaatgtcctcctgtgctctgtggtccccagcagacgcatggactctgtgacctggcaggaagggaagggtcccgtgaggggccgtgttcagtccttctggggcagtgaggctgccctgctcttggtgtgtcctggggaggggctttctgagcccaggagccgaagaccaagaatcatccgctgcctcatgactcacaacaaaggggtcagctttagcctggcagcctccatcgatgcttctcctgccctctgtgccccttccacgggctgggacatgccttggattctgatgctgctgctcacaatgggccagggagttgtcatcctggccctcagcatcgtgctctggaggcagagggtccgtggggctccaggcagaggaaaccgaatgcggtgctacaactgtggtggaagccccagcagtacttgcaaagaggccgtgaccacctgtggcgagggcagaccccagccaggcctggaacagatcaagctacctggaaaccccccagtgaccttgattcaccaacatccagcctgcgtcgcagcccatcattgcaatcaagtggagacagagtcggtgggagacgtgacttatccagcccacagggactgctacctgggagacctgtgcaacagcgccgtggcaagccatgtggcccctgcaggcattttggctgcagcagctaccgccctgacctgtctcttgccaggactgtggagcggatagggggagtaggagtagagaagggaacaagggagcaagggaacaagggacatctgaacatctaatgtgagaagacaaacatccttctgtgagtcattaaaatctatgaaccactct

SEQ ID NO: 124915 - DNA, 2160 bp, Homo sapiens
  Payload ID: 4530
  Gene Symbol: DAZAP1
  Gene Name: DAZ associated protein 1
  Uniprot ID: Q96EP5
  ENST ID: ENST00000233078
  CDS Start-End: 162-1385
ggaggcagccgccgccgccgccgccgccgccgccgccgccgccgccgccgttgcgcagatccgggccgcggctgtggggagggcgacggagcgggtgaccttccggaggcgggagcgagcgaggaggcccgggagcgccgagcgtcgccgccgccgccgccatgaacaactcgggcgccgacgagatcgggaagctcttcgtgggcggtcttgactggagcacgacccaagagactctgcgcagctacttttcccaatatggagaagtcgtagattgtgttatcatgaaagataaaaccaccaaccagtctcgaggctttgggtttgtcaaatttaaagacccaaactgtgtggggacggtgctggccagcagaccgcacacgctagatggccgaaacatcgaccccaagccatgcacaccccgggggatgcagccggagagaacacggccgaaggaaggatggcagaaaggacccaggagcgataacagtaaatcaaataagatatttgtcggtggaattcctcacaattgtggtgagacagagctcagggaatacttcaagaagttcggagtggtcacggaggtagtcatgatctatgacgccgagaagcagaggccccgaggttttggatttattactttcgaggacgaacaatcagtggaccaggctgtcaacatgcattttcacgacatcatgggcaaaaaagtggaagttaaacgagctgagcctcgggacagcaagagccaagcgccgggacagccaggtgccagccagtgggggagccgggttgtgcccaacgctgccaatggctgggcaggccagcccccgcccacgtggcagcaaggatatggcccgcaaggaatgtgggtgccggcaggacaggcgattggtggctatggaccgccccctgcaggaagaggagcccccccgccacccccaccgttcacctcctacatcgtgtccacccctcctggaggctttccccctccccagggcttccctcagggctacggtgccccgccacagttcagttttggctacgggcctccacctccaccgccagatcagtttgcccctccgggggttcctcctccaccagccactcccggggcagcacctctggctttcccaccgcctccgtctcaggctgccccggacatgagcaagcccccgacagctcagccagacttcccctatggtcagtatgcaggttacgggcaggacttgagtggcttcggacagggcttctcagaccccagccagcagcctccttcctacgggggtccctccgtgccagggtcggggggcccccccgccggcggcagcggctttggacgagggcagaaccacaacgtgcaagggttccacccctaccgacgctagcccgcggcgccgcgacgtctgcacggcccagacccaggattccaaacttgtgaactcgtgacaatcacaaacttggcggcaaagtggcgactcaaccttgggggggggggcggggggagggcgcgaggcttttggagcggctgtgggtgtcgtctggactgaggtttttaaatatttctttctctaacccatcagcacaataaaaaaaagtcactggttcaacaacagggtttaaaaaaaatgtcttcagctttaattcaaaacttcaggtttctttttcttccttttttttggaaattattttcctgagccttttgttttacggtatattgtaaacttttatgttaaagaaaaaatatacatttacaaattgtgagatttttaagagaaattttctacgatgtatactggcttattttttaatttaaaacggggtttccgtcggcactggtggagggggtgcgctgttagtcccctcgctcctggctttgggggttgggacttggtggtccagaaactctgggagcttctagaagaaatctactgagtgtatttctgttttttgtttaattccttgcttttgtcgactgacctgcttggtagtgtctgaggtgaactgtgggggttgcgcacagccagccgcgtggatcccacgcagcgctgaaccgaaccgagtaggaagcctttctccccaggcacgtggcttcagggcgtttcccattgaccagtttgaccctggtttgaataaagagaagtgcgtttggattagaaacca

SEQ ID NO: 124916 - DNA, 2290 bp, Homo sapiens
  Payload ID: 4530
  Gene Symbol: DAZAP1
  Gene Name: DAZ associated protein 1
  Uniprot ID: Q96EP5
  ENST ID: ENST00000336761
  CDS Start-End: 206-1342
cgcggcggcgcggggacgcgcggtgaccgttggcgccgaggggaggaggcagccgccgccgccgccgccgccgccgccgccgccgccgccgccgttgcgcagatccgggccgcggctgtggggagggcgacggagcgggtgaccttccggaggcgggagcgagcgaggaggcccgggagcgccgagcgtcgccgccgccgccgccatgaacaactcgggcgccgacgagatcgggaagctcttcgtgggcggtcttgactggagcacgacccaagagactctgcgcagctacttttcccaatatggagaagtcgtagattgtgttatcatgaaagataaaaccaccaaccagtctcgaggctttgggtttgtcaaatttaaagacccaaactgtgtggggacggtgctggccagcagaccgcacacgctagatggccgaaacatcgaccccaagccatgcacaccccgggggatgcagccggagagaacacggccgaaggaaggatggcagaaaggacccaggagcgataacagtaaatcaaataagatatttgtcggtggaattcctcacaattgtggtgagacagagctcagggaatacttcaagaagttcggagtggtcacggaggtagtcatgatctatgacgccgagaagcagaggccccgaggttttggatttattactttcgaggacgaacaatcagtggaccaggctgtcaacatgcattttcacgacatcatgggcaaaaaagtggaagttaaacgagctgagcctcgggacagcaagagccaagcgccgggacagccaggtgccagccagtgggggagccgggttgtgcccaacgctgccaatggctgggcaggccagcccccgcccacgtggcagcaaggatatggcccgcaaggaatgtgggtgccggcaggacaggcgattggtggctatggaccgccccctgcaggaagaggagcccccccgccacccccaccgttcacctcctacatcgtgtccacccctcctggaggctttccccctccccagggcttccctcagggctacggtgccccgccacagttcagttttggctacgggcctccacctccaccgccagatcagtttgcccctccgggggttcctcctccaccagccactcccggggcagcacctctggctttcccaccgcctccgtctcaggctgccccggacatgagcaagcccccgacagctcagccagacttcccctatggtcagtatggcctgggttcctattctccagccccgccgggctgcggcccacactttgtttacagtcttatggtcaggctgagcagtgatgtggcctagcaggttacgggcaggacttgagtggcttcggacagggcttctcagaccccagccagcagcctccttcctacgggggtccctccgtgccagggtcggggggcccccccgccggcggcagcggctttggacgagggcagaaccacaacgtgcaagggttccacccctaccgacgctagcccgcggcgccgcgacgtctgcacggcccagacccaggattccaaacttgtgaactcgtgacaatcacaaacttggcggcaaagtggcgactcaaccttgggggggggggcggggggagggcgcgaggcttttggagcggctgtgggtgtcgtctggactgaggtttttaaatatttctttctctaacccatcagcacaataaaaaaaagtcactggttcaacaacagggtttaaaaaaaatgtcttcagctttaattcaaaacttcaggtttctttttcttccttttttttggaaattattttcctgagccttttgttttacggtatattgtaaacttttatgttaaagaaaaaatatacatttacaaattgtgagatttttaagagaaattttctacgatgtatactggcttattttttaatttaaaacggggtttccgtcggcactggtggagggggtgcgctgttagtcccctcgctcctggctttgggggttgggacttggtggtccagaaactctgggagcttctagaagaaatctactgagtgtatttctgttttttgtttaattccttgcttttgtcgactgacctgcttggtagtgtctgaggtgaactgtgggggttgcgcacagccagccgcgtggatcccacgcagcgctgaaccgaaccgagtaggaagcctttctccccaggcacgtggcttcagggcgtttcccattgaccagtttgaccctggtttgaataaagagaagtgcgtttggattagaaa

SEQ ID NO: 124917 - DNA, 2086 bp, Homo sapiens
  Payload ID: 4530
  Gene Symbol: DAZAP1
  Gene Name: DAZ associated protein 1
  ENST ID: ENST00000587079
  CDS Start-End: 95-1315
gcggctgtggggagggcgacggagcgggtgaccttccggaggcgggagcgagcgaggaggcccgggagcgccgagcgtcgccgccgccgccgccatgaacaactcgggcgccgacgagatcgggaagctcttcgtgggcggtcttgactggagcacgacccaagagactctgcgcagctacttttcccaatatggagaagtcgtagattgtgttatcatgaaagataaaaccaccaaccagtctcgaggctttgggtttgtcaaatttaaagacccaaactgtgtggggacggtgctggccagcagaccgcacacgctagatggccgaaacatcgaccccaagccatgcacaccccgggggatgcagccggagagaacacggccgaaggaaggatggaaaggacccaggagcgataacagtaaatcaaataagatatttgtcggtggaattcctcacaattgtggtgagacagagctcagggaatacttcaagaagttcggagtggtcacggaggtagtcatgatctatgacgccgagaagcagaggccccgaggttttggatttattactttcgaggacgaacaatcagtggaccaggctgtcaacatgcattttcacgacatcatgggcaaaaaagtggaagttaaacgagctgagcctcgggacagcaagagccaagcgccgggacagccaggtgccagccagtgggggagccgggttgtgcccaacgctgccaatggctgggcaggccagcccccgcccacgtggcagcaaggatatggcccgcaaggaatgtgggtgccggcaggacaggcgattggtggctatggaccgccccctgcaggaagaggagcccccccgccacccccaccgttcacctcctacatcgtgtccacccctcctggaggctttccccctccccagggcttccctcagggctacggtgccccgccacagttcagttttggctacgggcctccacctccaccgccagatcagtttgcccctccgggggttcctcctccaccagccactcccggggcagcacctctggctttcccaccgcctccgtctcaggctgccccggacatgagcaagcccccgacagctcagccagacttcccctatggtcagtatgcaggttacgggcaggacttgagtggcttcggacagggcttctcagaccccagccagcagcctccttcctacgggggtccctccgtgccagggtcggggggcccccccgccggcggcagcggctttggacgagggcagaaccacaacgtgcaagggttccacccctaccgacgctagcccgcggcgccgcgacgtctgcacggcccagacccaggattccaaacttgtgaactcgtgacaatcacaaacttggcggcaaagtggcgactcaaccttgggggggggggcggggggagggcgcgaggcttttggagcggctgtgggtgtcgtctggactgaggtttttaaatatttctttctctaacccatcagcacaataaaaaaaagtcactggttcaacaacagggtttaaaaaaaatgtcttcagctttaattcaaaacttcaggtttctttttcttccttttttttggaaattattttcctgagccttttgttttacggtatattgtaaacttttatgttaaagaaaaaatatacatttacaaattgtgagatttttaagagaaattttctacgatgtatactggcttattttttaatttaaaacggggtttccgtcggcactggtggagggggtgcgctgttagtcccctcgctcctggctttgggggttgggacttggtggtccagaaactctgggagcttctagaagaaatctactgagtgtatttctgttttttgtttaattccttgcttttgtcgactgacctgcttggtagtgtctgaggtgaactgtgggggttgcgcacagccagccgcgtggatcccacgcagcgctgaaccgaaccgagtaggaagcctttctccccaggcacgtggcttcagggcgtttcccattgaccagtttgaccctggtttgaataaagagaagtgcgtttggattagaa

SEQ ID NO: 124918 - DNA, 1021 bp, Homo sapiens
  Payload ID: 4530
  Gene Symbol: DAZAP1
  Gene Name: DAZ associated protein 1
  ENST ID: ENST00000592453
  CDS Start-End: 40-1021
ggaggcccgggagcgccgagcgtcgccgccgccgccgccatgaacaactcgggcgccgacgagatcgggaagctcttcgtgggcggtcttgactggagcacgacccaagagactctgcgcagctacttttcccaatatggagaagtcgtagattgtgttatcatgaaagataaaaccaccaaccagtctcgaggctttgggtttgtcaaatttaaagacccaaactgtgtggggacggtgctggccagcagaccgcacacgctagatggccgaaaccagaaaggacccaggagcgataacagtaaatcaaataagatatttgtcggtggaattcctcacaattgtggtgagacagagctcagggaatacttcaagaagttcggagtggtcacggaggtagtcatgatctatgacgccgagaagcagaggccccgaggttttggatttattactttcgaggacgaacaatcagtggaccaggctgtcaacatgcattttcacgacatcatgggcaaaaaagtggaagttaaacgagctgagcctcgggacagcaagagccaagcgccgggacagccaggtgccagccagtgggggagccgggttgtgcccaacgctgccaatggctgggcaggccagcccccgcccacgtggcagcaaggatatggcccgcaaggaatgtgggtgccggcaggacaggcgattggtggctatggaccgccccctgcaggaagaggagcccccccgccacccccaccgttcacctcctacatcgtgtccacccctcctggaggctttccccctccccagggcttccctcagggctacggtgccccgccacagttcagttttggctacgggcctccacctccaccgccagatcagtttgcccctccgggggttcctcctccaccagccactcccggggcagcacctctggctttcccaccgcctccgtctcaggctgccccggacatgagcaagcccccgacagctcagccagacttcccctatggtcagtatg

SEQ ID NO: 124919 - DNA, 2157 bp, Homo sapiens
  Payload ID: 4530
  Gene Symbol: DAZAP1
  Gene Name: DAZ associated protein 1
  ENST ID: ENST00000592522
  CDS Start-End: 162-1382
ggaggcagccgccgccgccgccgccgccgccgccgccgccgccgccgccgttgcgcagatccgggccgcggctgtggggagggcgacggagcgggtgaccttccggaggcgggagcgagcgaggaggcccgggagcgccgagcgtcgccgccgccgccgccatgaacaactcgggcgccgacgagatcgggaagctcttcgtgggcggtcttgactggagcacgacccaagagactctgcgcagctacttttcccaatatggagaagtcgtagattgtgttatcatgaaagataaaaccaccaaccagtctcgaggctttgggtttgtcaaatttaaagacccaaactgtgtggggacggtgctggccagcagaccgcacacgctagatggccgaaacatcgaccccaagccatgcacaccccgggggatgcagccggagagaacacggccgaaggaaggatggcagaaaggacccaggagcgataacagtaaatcaaataagatatttgtcggtggaattcctcacaattgtggtgagacagagctcagggaatacttcaagaagttcggagtggtcacggaggtagtcatgatctatgacgccgagaagcagaggccccgaggttttggatttattactttcgaggacgaacaatcagtggaccaggctgtcaacatgcattttcacgacatcatgggcaaaaaagtggaagttaaacgagctgagcctcgggacagcaagagccaagcgccgggacagccaggtgccagccagtgggggagccgggttgtgcccaacgctgccaatggctgggcaggccagcccccgcccacgtggcagcaaggatatggcccgcaaggaatgtgggtgccggcaggacaggcgattggtggctatggaccgccccctgcaggaagaggagcccccccgccacccccaccgttcacctcctacatcgtgtccacccctcctggaggctttccccctccccagggcttccctcagggctacggtgccccgccacagttcagttttggctacgggcctccacctccaccgccagatcagtttgcccctccgggggttcctcctccaccagccactcccggggcagcacctctggctttcccaccgcctccgtctcaggctgccccggacatgagcaagcccccgacagctcagccagacttcccctatggtcagtatggttacgggcaggacttgagtggcttcggacagggcttctcagaccccagccagcagcctccttcctacgggggtccctccgtgccagggtcggggggcccccccgccggcggcagcggctttggacgagggcagaaccacaacgtgcaagggttccacccctaccgacgctagcccgcggcgccgcgacgtctgcacggcccagacccaggattccaaacttgtgaactcgtgacaatcacaaacttggcggcaaagtggcgactcaaccttgggggggggggcggggggagggcgcgaggcttttggagcggctgtgggtgtcgtctggactgaggtttttaaatatttctttctctaacccatcagcacaataaaaaaaagtcactggttcaacaacagggtttaaaaaaaatgtcttcagctttaattcaaaacttcaggtttctttttcttccttttttttggaaattattttcctgagccttttgttttacggtatattgtaaacttttatgttaaagaaaaaatatacatttacaaattgtgagatttttaagagaaattttctacgatgtatactggcttattttttaatttaaaacggggtttccgtcggcactggtggagggggtgcgctgttagtcccctcgctcctggctttgggggttgggacttggtggtccagaaactctgggagcttctagaagaaatctactgagtgtatttctgttttttgtttaattccttgcttttgtcgactgacctgcttggtagtgtctgaggtgaactgtgggggttgcgcacagccagccgcgtggatcccacgcagcgctgaaccgaaccgagtaggaagcctttctccccaggcacgtggcttcagggcgtttcccattgaccagtttgaccctggtttgaataaagagaagtgcgtttggattagaaacca

SEQ ID NO: 124920 - DNA, 2598 bp, Homo sapiens
  Payload ID: 4531
  Gene Symbol: DAZAP2
  Gene Name: DAZ associated protein 2
  Uniprot ID: Q15038
  ENST ID: ENST00000412716
  CDS Start-End: 617-1123
aggcaacgactgtcctggggaagacagggcagcgaagattccagtgcaggtctcattcaggaaaggatacatgtgagctggagtggcaaaataaattttaacagagctgaagcttaagttgggcttggtggggagggacgcatgataaactaaggtgtggggagccgatttcaggcagtgcgacaaatttgcagaaatctaagcccctcgtggaaggttgccaaggtgaggtgaccttgagtgaatgcgtgtaggtggaaaaaggttccggggaatgcttgcatcgttctgcatccgagcgtccaacagagaaaagatcctgtttccagacaatacctgcatttggtttttctccagctgagggacaccggtagggggggggaggacagaaacgagcagggggtggggccaaggcgagtgggcgggaccgcgcggaccctcccgcggccgactggaggcccggagcaggggcggagtttccggcggcagcgccactcgggcgtcgggtgacgctaggcggacggaccatcatgtgacacggaagtagctccgaacaggaagaggacgaaaaaaataaccgtccgcgacgccgagacaaaccggacccgcaaccaccatgaacagcaaaggtcaatatccaacacagccaacctaccctgtgcagcctcctgggaatccagtataccctcagaccttgcatcttcctcaggctccaccctataccgatgctccacctgcctactcagagctctatcgtccgagctttgtgcacccaggggctgccacagtccccaccatgtcagccgcatttcctggagcctctctgtatcttcccatggcccagtctgtggctgttgggcctttaggttccacaatccccatggcttattatccagtcggtcccatctatccacctggctccacagtgctggtggaaggagggtatgatgcaggtgccagatttggagctggggctactgctggcaacattcctcctccacctcctggatgccctcccaatgctgctcagcttgcagtcatgcagggagccaacgtcctcgtaactcagcggaaggggaacttcttcatgggtggttcagatggtggctacaccatctggtgaggaaccaaggccacctctgtgccgggaaagacatcacataccttcagcacttctcacaatgtaactgctttagtcatattaacctgaagttgcagtttagacacatgttgttggggtgtctttctggtgcccaaactttcaggcacttttcaaatttaataaggaaccatgtaatggtagcagtacctccctaaagcattttgaggtaggggaggtatccattcataaaatgaatgtgggtgaagccgccctaaggattttcctttaatttctctggagtaatactgtaccatactggtctttgcttttagtaataaaacatcaaattaggtttggagggaactttgatcttcctaagaattaaagttgccaaattattctgattggtctttaatctcctttaagtctttgatatatattacttgttataaatggaacgcattagttgtctgccttttcctttccatcccttgccccacccatcccatctccaaccctagtcttccatttcctcccgccagtctccattgaatcaatggtgcaggacagaaagccagtcagactaatttccttctttcctcgcacttctccccactcgtcatcttttaactagtgtttcacaaggatcctctgaaaccctctctgtgccccaagtacagatgccattacttctgctttcgtatctcctcaggcaaaagtggagggtgccttatgggccctcctcataggttgtctctgcatacacgaacctaacccaaatttgctttggtgccagaaaaactgagctatgtttgaacaaagatgtcgtgcaaactgtactgtgaacaacagttggtttaaaatatgaggggcaaggaggaggatgcatttcaaaagcttgattgatgtgttcagagctaaattaagaggagttttcagatcaaaaactggttaccattttttgtcagagtgtctgatgcggccactcattcggctccccagaattcctagactgggttaatagggtcatattgtgaatgtctcactacaaaatgacttgagtccagtgaaatctcattagggtttaagaatatttcagggatccttaatgttttgatttttgttttctgaaattggattttattttattttatcttataatttcagttcatctaaattgtgtgttctgtacatgtgatgtttgactgtaccattgactgttatggaagttcagcgttgtatgtctctctctacactgtggtgcacttaacttgtggaatttttatactaaaaatgtagaataaagactattttgaagatttgaataaagtgatgaagttgcattacacctcactgcaaggattctttacttagcttgtttttagatttcttctatatatattttatttatatcccatctagaattcagctaggtgctgctgctgctctgtttcctttgatgacgctttgaaataaaggcaggagtacaagcctaa

SEQ ID NO: 124921 - DNA, 701 bp, Homo sapiens
  Payload ID: 4531
  Gene Symbol: DAZAP2
  Gene Name: DAZ associated protein 2
  Uniprot ID: Q15038
  ENST ID: ENST00000439799
  CDS Start-End: 83-343
gacacggaagtagctccgaacaggaagaggacgaaaaaaataaccgtccgcgacgccgagacaaaccggacccgcaaccaccatgaacagcaaaggtcaatatccaacacagccaacctaccctgtgcagcctcctgggaatccagtataccctcagaccttgcatcttcctcaggctccaccctataccgatgctccacctgcctactcagagcctccacctcctggatgccctcccaatgctgctcagcttgcagtcatgcagggagccaacgtcctcgtaactcagcggaaggggaacttcttcatgggtggttcagatggtggctacaccatctggtgaggaaccaaggccacctctgtgccgggaaagacatcacataccttcagcacttctcacaatgtaactgctttagtcatattaacctgaagttgcagtttagacacatgttgttggggtgtctttctggtgcccaaactttcaggcacttttcaaatttaataaggaaccatgtaatggtagcagtacctccctaaagcattttgaggtaggggaggtatccattcataaaatgaatgtgggtgaagccgccctaaggattttcctttaatttctctggagtaatactgtaccatactggtctttgcttttagtaataaaacatcaaattaggtttggagggaactttgatcttcctaag

SEQ ID NO: 124922 - DNA, 1811 bp, Homo sapiens
  Payload ID: 4531
  Gene Symbol: DAZAP2
  Gene Name: DAZ associated protein 2
  ENST ID: ENST00000436900
  CDS Start-End: 6-227
ccaccatgaacagcaaaggtcaatatccaacacagccaacctaccctgtgcagcctcctgggaatccagtataccctcagaccttgcatcttcctcaggctccaccctataccgatgctccacctgcctactcagaggggctgccacagtccccaccatgtcagccgcatttcctggagcctctctgtatcttcccatggcccagtctgtggctgttgggcctttaggttccacaatccccatggcttattatccagtcggtcccatctatccacctggctccacagtgctggtggaaggagggtatgatgcaggtgccagatttggagctggggctactgctggcaacattcctcctccacctcctggatgccctcccaatgctgctcagcttgcagtcatgcagggagccaacgtcctcgtaactcagcggaaggggaacttcttcatgggtggttcagatggtggctacaccatctggtgaggaaccaaggccacctctgtgccgggaaagacatcacataccttcagcacttctcacaatgtaactgctttagtcatattaacctgaagttgcagtttagacacatgttgttggggtgtctttctggtgcccaaactttcaggcacttttcaaatttaataaggaaccatgtaatggtagcagtacctccctaaagcattttgaggtaggggaggtatccattcataaaatgaatgtgggtgaagccgccctaaggattttcctttaatttctctggagtaatactgtaccatactggtctttgcttttagtaataaaacatcaaattaggtttggagggaactttgatcttcctaagaattaaagttgccaaattattctgattggtctttaatctcctttaagtctttgatatatattacttgttataaatggaacgcattagttgtctgccttttcctttccatcccttgccccacccatcccatctccaaccctagtcttccatttcctcccgccagtctccattgaatcaatggtgcaggacagaaagccagtcagactaatttccttctttcctcgcacttctccccactcgtcatcttttaactagtgtttcacaaggatcctctgaaaccctctctgtgccccaagtacagatgccattacttctgctttcgtatctcctcaggcaaaagtggagggtgccttatgggccctcctcataggttgtctctgcatacacgaacctaacccaaatttgctttggtgccagaaaaactgagctatgtttgaacaaagatgtcgtgcaaactgtactgtgaacaacagttggtttaaaatatgaggggcaaggaggaggatgcatttcaaaagcttgattgatgtgttcagagctaaattaagaggagttttcagatcaaaaactggttaccattttttgtcagagtgtctgatgcggccactcattcggctccccagaattcctagactgggttaatagggtcatattgtgaatgtctcactacaaaatgacttgagtccagtgaaatctcattagggtttaagaatatttcagggatccttaatgttttgatttttgttttctgaaattggattttattttattttatcttataatttcagttcatctaaattgtgtgttctgtacatgtgatgtttgactgtaccattgactgttatggaagttcagcgttgtatgtctctctctacactgtggtgcacttaacttgtggaatttttatactaaaaatgtagaataaagactattttgaagatttgaataaagtgatgaagttgcattaca

SEQ ID NO: 124923 - DNA, 1117 bp, Homo sapiens
  Payload ID: 4531
  Gene Symbol: DAZAP2
  Gene Name: DAZ associated protein 2
  Uniprot ID: Q15038
  ENST ID: ENST00000425012
  CDS Start-End: 83-544
gacacggaagtagctccgaacaggaagaggacgaaaaaaataaccgtccgcgacgccgagacaaaccggacccgcaaccaccatgaacagcaaaggtcaatatccaacacagccaacctaccctgtgcagcctcctgggaatccagtataccctcagaccttgcatcttcctcaggctccaccctataccgatgctccacctgcctactcagagctctatcgtccgagctttgtgcacccaggggctgccacagtccccaccatgtcagccgcatttcctggagcctctctgtatcttcccatggcccagtctgtggctgttgggcctttaggttccacaatccccatggcttattatccagtcggtcccatctatccacctggctccacagtgctggtggaaggagggtatgatgcaggtgccagatttggagctggggctactgctggcaacattcctgtaaaagaagatcaagatcacgaccgagagcagggtgaggaagacaacggtgataacaacttggaaaggagagggaaaatgtagagatgtttcaggattgaggatgtctcagtagttcctggagtcatctgatttagtcactgttttcgtaaagatcctcttgttttcattaactagtgtccacttccatccaaacccatgttcccccaccaaccccaatttccatggcacataatagctggagtctcctggtgcttaagctaaggacacatgcttttgatttctgacaaaactgaactgcctcccaaaccagttcctgattcttaaagaaacgggaaggagggaacaggaaatggcttatcctaacaggaagtggtttatctgatcctccccctcttcctcacccactcaaccaaccacatatatcctcgtccctacccacgtactcaagtgtaacgtccgtatgcatatctatttgcggccacctcccaacctgtcatttactggtagtgcctctgacagaagcctccgagtcttttatggctgtgtgtgtgtgtgtgtgtgtgtgtgtgtgtgtgtaatataacttacaagccagagtgagcccattaatggatttggtcaggctccctctggagagagatgcccttgatccag

SEQ ID NO: 124924 - DNA, 2098 bp, Homo sapiens
  Payload ID: 4531
  Gene Symbol: DAZAP2
  Gene Name: DAZ associated protein 2
  Uniprot ID: Q15038
  ENST ID: ENST00000449723
  CDS Start-End: 185-625
cggaccctcccgcggccgactggaggcccggagcaggggcggagtttccggcggcagcgccactcgggcgtcgggtgacgctaggcggacggaccatcatgtgacacggaagtagctccgaacaggaagaggacgaaaaaaataaccgtccgcgacgccgagacaaaccggacccgcaaccaccatgaacagcaaaggtcaatatccaacacagccaacctaccctgtgcagcctcctgggaatccagtataccctcagaccttgcatcttcctcaggctccaccctataccgatgctccacctgcctactcagagctctatcgtccgagctttgtgcacccaggggctgccacagtccccaccatgtcagccgcaatccccatggcttattatccagtcggtcccatctatccacctggctccacagtgctggtggaaggagggtatgatgcaggtgccagatttggagctggggctactgctggcaacattcctcctccacctcctggatgccctcccaatgctgctcagcttgcagtcatgcagggagccaacgtcctcgtaactcagcggaaggggaacttcttcatgggtggttcagatggtggctacaccatctggtgaggaaccaaggccacctctgtgccgggaaagacatcacataccttcagcacttctcacaatgtaactgctttagtcatattaacctgaagttgcagtttagacacatgttgttggggtgtctttctggtgcccaaactttcaggcacttttcaaatttaataaggaaccatgtaatggtagcagtacctccctaaagcattttgaggtaggggaggtatccattcataaaatgaatgtgggtgaagccgccctaaggattttcctttaatttctctggagtaatactgtaccatactggtctttgcttttagtaataaaacatcaaattaggtttggagggaactttgatcttcctaagaattaaagttgccaaattattctgattggtctttaatctcctttaagtctttgatatatattacttgttataaatggaacgcattagttgtctgccttttcctttccatcccttgccccacccatcccatctccaaccctagtcttccatttcctcccgccagtctccattgaatcaatggtgcaggacagaaagccagtcagactaatttccttctttcctcgcacttctccccactcgtcatcttttaactagtgtttcacaaggatcctctgaaaccctctctgtgccccaagtacagatgccattacttctgctttcgtatctcctcaggcaaaagtggagggtgccttatgggccctcctcataggttgtctctgcatacacgaacctaacccaaatttgctttggtgccagaaaaactgagctatgtttgaacaaagatgtcgtgcaaactgtactgtgaacaacagttggtttaaaatatgaggggcaaggaggaggatgcatttcaaaagcttgattgatgtgttcagagctaaattaagaggagttttcagatcaaaaactggttaccattttttgtcagagtgtctgatgcggccactcattcggctccccagaattcctagactgggttaatagggtcatattgtgaatgtctcactacaaaatgacttgagtccagtgaaatctcattagggtttaagaatatttcagggatccttaatgttttgatttttgttttctgaaattggattttattttattttatcttataatttcagttcatctaaattgtgtgttctgtacatgtgatgtttgactgtaccattgactgttatggaagttcagcgttgtatgtctctctctacactgtggtgcacttaacttgtggaatttttatactaaaaatgtagaataaagactattttgaagatttgaataaagtgatgaagttgcattacacctcactgcaaggattctttacttagcttgtttttagatttcttctatatatattttatttatatcccatctagaattcagctaggtgctgctgctgctctgtttcctttgatgacgctttgaaataaaggcaggagtacaagcct

SEQ ID NO: 124925 - DNA, 601 bp, Homo sapiens
  Payload ID: 4531
  Gene Symbol: DAZAP2
  Gene Name: DAZ associated protein 2
  Uniprot ID: Q15038
  ENST ID: ENST00000549732
  CDS Start-End: 55-465
ggacgaaaaaaataaccgtccgcgacgccgagacaaaccggacccgcaaccaccatgaacagcaaaggtcaatatccaacacagccaacctaccctgtgcagcctcctgggaatccagtataccctcagaccttgcatcttcctcaggctccaccctataccgatgctccacctgcctactcagagtctgtggctgttgggcctttaggttccacaatccccatggcttattatccagtcggtcccatctatccacctggctccacagtgctggtggaaggagggtatgatgcaggtgccagatttggagctggggctactgctggcaacattcctcctccacctcctggatgccctcccaatgctgctcagcttgcagtcatgcagggagccaacgtcctcgtaactcagcggaaggggaacttcttcatgggtggttcagatggtggctacaccatctggtgaggaaccaaggccacctctgtgccgggaaagacatcacataccttcagcacttctcacaatgtaactgctttagtcatattaacctgaagttgcagtttagacacatgttgttggggtgtctttctggtgcccaaac

SEQ ID NO: 124926 - DNA, 587 bp, Homo sapiens
  Payload ID: 4531
  Gene Symbol: DAZAP2
  Gene Name: DAZ associated protein 2
  ENST ID: ENST00000551313
  CDS Start-End: 209-535
actgaattgctggagttggttcgtgggccggggcctgtgaggtcaatatccaacacagccaacctaccctgtgcagcctcctgggaatccagtataccctcagaccttgcatcttcctcaggctccaccctataccgatgctccacctgcctactcagagctctatcgtccgagctttgtgcacccaggggctgccacagtccccaccatgtcagccgcatttcctggagcctctctgtatcttcccatggcccagtctgtggctgttgggcctttaggttccacaatccccatggcttattatccagtcggtcccatctatccacctggctccacagtgctggtggaaggagggtatgatgcaggtgccagatttggagctggggctactgctggcaacattcctcctccacctcctggatgccctcccaatgctgctcagcttgcagtcatgcagggagccaacgtcctcgtaactcagcggaaggggaacttcttcatgggtggttcagatggtggctacaccatctggtgaggaaccaaggccacctctgtgccgggaaagacatcacataccttcagcactt

SEQ ID NO: 124927 - DNA, 872 bp, Homo sapiens
  Payload ID: 4531
  Gene Symbol: DAZAP2
  Gene Name: DAZ associated protein 2
  Uniprot ID: Q15038
  ENST ID: ENST00000549555
  CDS Start-End: 85-708
gtgacacggaagtagctccgaacaggaagaggacgaaaaaaataaccgtccgcgacgccgagacaaaccggacccgcaaccaccatgaacagcaaaggtcaatatccaacacagccaacctaccctgtgcagcctcctgggaatccagtataccctcagaccttgcatcttcctcaggctccaccctataccgatgctccacctgcctactcagagctctatcgtccgagctttgtgcacccaggggctgccacagtccccaccatgtcagccgcatttcctggagcctctctgtatcttcccatggcccagtctgtggctgttgggcctttaggttccacaatccccatggcttattatccagtcggtcccatctatccacctgcctccacctcctggatgccctcccaatgctgctcagcttgcagtcatgcagggagccaacgtcctcgtaactcagcggaaggggaacttcttcatgggtggttcagatggtggctacaccatctggtgaggaaccaaggccacctctgtgccgggaaagacatcacataccttcagcacttctcacaatgtaactgctttagtcatattaacctgaagttgcagtttagacacatgttgttggggtgtctttctggtgcccaaactttcaggcacttttcaaatttaataaggaaccatgtaatggtagcagtacctccctaaagcattttgaggtaggggaggtatccattcataaaatgaatgtgggtgaagccgccctaaggattttcctttaatttctctggagtaatactgtaccatactggtctttgcttttagtaataaaacatcaaattaggtttggagggaactttgatcttcctaag

SEQ ID NO: 124928 - DNA, 1045 bp, Homo sapiens
  Payload ID: 4531
  Gene Symbol: DAZAP2
  Gene Name: DAZ associated protein 2
  ENST ID: ENST00000604900
  CDS Start-End: 23-427
acaaaccggacccgcaaccaccatgaacagcaaaggtcaatatccaacacagccaacctaccctgtgcagcctcctgggaatccagtataccctcagaccttgcatcttcctcaggctccaccctataccgatgctccacctgcctactcagagctctatcgtccgagctttgtgcacccaggggctgccacagtccccaccatgtcagccgcatttcctggagcctctctgtatcttcccatggcccagtctgtggctgttgggcctttaggttccacaatccccatggcttattatccagtcggtcccatctatccacctggctccacagtgctggtggaaggagggtatgatgcaggtgccagatttggagctggggctactgctggcaacattcctgtctgtgtcctgaagcttggcagatgagcgaacttagccagcacacccccggccgtgaagcagggaggtgaagcggggagagcaacgagccccacccgggtcttgccagctggacgttcttgtggggcagcgttgagcagcggttaggagtgccgtggactttggattcaaacagccccagctcttctgcttgctagctgggtgactttgggcaaattaacatctcgaaaatctgtttcctcattcctaaaatgcgggtctgaaagtgatcatgcctgtaaagccatctcatatccatggttctagaagcatggtgagcacctcaatttgaataatcagtgccatgctttagctacctcttgactcactcgtttgtggcaggaaatgttcccaaattaatcagaagaattcagtgactaagaggatgtaatagtatatagcgcaggcactggaatcagctctgctgtgtgatcttggacaagctgcttctgttccgtttctcttatctggggcaatacctgtctgaatagagtgactgttgggacgaaataggttagtaaatatgtactgtaaggcattagaaccttgcctggcacatagtaagtgctcaataaacgctaggtcttgttaccttggcttcccgtt

SEQ ID NO: 124929 - DNA, 7068 bp, Homo sapiens
  Payload ID: 4532
  Gene Symbol: DZIP1
  Gene Name: DAZ interacting zinc finger protein 1
  Uniprot ID: Q86YF9
  ENST ID: ENST00000347108
  CDS Start-End: 434-3037
tgttaggaaagaaaaaaaaattcctgatgtctggtccaagcaggaattccccggtggattggggaatgtctggcttttcctcagcttattgatctctgtggtaaccactggaggcccccagaagacccatagaaatgagaggcctgaggtctacaagtcgctgctagaaatattttagcctctccaaagcccagaatgcagccccgacccaagtttgtaagggttctgggtgcacgctgaccctgcgcgggcagacgcgccctttgctccaggtccggacctgggcgctgctatagcaacgtcctggacgcccagaccttaggccgccgccgccgcggaagcgaggaacccggccttctcccgctcctgagggctgtggcggcggcggcccgggaggcggcccaggctgggtaaagaccgcccggctcctcctatgcaagctgaggcagcggattggttttcaagcatgcccttccagaagcatgtctactacccgctcgccagcggcccagaggggcccgacgtcgctgtggccgccgccgccgcgggtgcggcctccatggcctgtgcgccccccagcgcggcttcggggcccctgcccttcttccagttcaggccgcggctggagagtgtggactggcggcggctgagcgccatcgacgtggacaaggtggcgggggctgtggacgtgctgacgctgcaggagaacatcatgaacatcaccttctgcaagctggaagacgagaagtgcccacactgccagtcgggggtggacccggtgctgctgaagctcatccgtctggcgcagttcaccatcgagtacttgctgcactcacaagagttcctcacctcgcagctgcacaccctggaggagcggctgcgcctgagccactgcgacggcgagcagagcaagaagctgctcaccaagcaggcgggggagatcaagacgctcaaggaagagtgcaaacgccggaagaagatgatctccacccagcagctgatgatcgaggccaaagccaactattaccagtgccatttttgtgacaaggcctttatgaaccaagcttttctacaaagtcacattcaacgccgccacactgaagaaaattctcattttgagtatcagaaaaatgcacagattgagaagctccggagtgagatcgtcgtattgaaggaagagctgcagctcaccaggtctgagctagaggctgcacaccatgccagtgcagtcagattctccaaggaatatgaaatgcagaaaacaaaagaggaagactttttgaagttatttgacaggtggaaagaagaagaaaaggagaaactagttgatgaaatggaaaaagtcaaggagatgtttatgaaggaatttaaagaattaacttcgaagaattcagcattagaatatcaactgtcagaaatccagaagtccaatatgcagatcaagtccaacataggcacattaaaagatgcacacgagtttaaagaagaccgttctccatatccccaggatttccataatgtcatgcagcttcttgatagtcaggaaagcaaatggacagctcgagttcaagctattcatcaagaacacaagaaagagaagggtcggctcctgtcacatatagagaaacttcgaacctcaatgatagatgatctaaatgcaagcaatgttttctataagaaaaggatagaagagctagggcagagactccaggagcagaatgagctgattataactcagagacagcagattaaagactttacctgtaatccattaaacagtatcagtgaacccaaaggaaatcctttagcctggcaggcttttgaatctcagccagctgctccagctgtgcctatgaatgccccagccctgcacactttggaaactaaatcaagtctgccaatggtgcatgaacaggcattctcgtcgcacatactggaaccaatagaagaactttcagaggaagaaaaaggaagggaaaatgaacagaaattaaataacaacaaaatgcatttaaggaaagctttgaagagtaactcctccctcactaagggactaagaacaatggtggagcagaacttgatggagaaactggaaaccttggggattaatgcagatatacgtggcatttcaagtgatcagttgcatagagtactaaaaagtgtggaatcagaaagacataagcaagaaagagaaatacctaactttcatcaaattcgagaattccttgaacatcaagtcagctgtaaaattgaggagaaagcactactctcttcagatcagtgcagtgtttctcaaatggataccctttcaactggagaagtacccaaaatgatacaacttccttccaaaaacagacaactgattagacaaaaagctgtttctactgataggacatctgttccaaaaattaagaaaaatgtcatggaagatccttttcccagaaagtcttcaactattacgacccctccttttagttcagaggaggagcaggaggacgacgacctcatccgggcatacgcatccccaggcccacttcctgtgccgccaccacaaaacaagggcagcttcgggaagaacacagtgaaaagtgacgcggacgggaccgagggaagcgaaatcgaggacactgatgattctcccaagcccgcaggagtcgccgttaaaacacctactgaaaaagttgaaaagatgtttccacatcgcaaaaatgtgaacaaaccagtcggtggaactaatgtccctgagatgtttatcaaaaaagaagaattacaagaactaaagtgtgcggatgtggaggatgaagactgggacatatcatccctagaggaagagatatctttgggaaaaaaatctgggaaagaacagaaggaacctccacctgcgaaaaatgaaccacattttgctcatgtgctaaatgcctggggcgcatttaatcctaaggggccaaagggagaaggacttcaagaaaatgaatcaagcacattaaaaagcagcttagtaactgtgactgattggagcgacacttcagatgtctaattccacatgtcagaagattattccagaagccagcagtatttcagtatcacagtgtttcagtaatttgcctccatgattctagtgcttctgccttaccgtgtttcccacagcaacacagagactgattcaaagaacaatggtctctttaatggcacccaatacagtattgaaaatcagatcatcaacagtatttcgaagcatgtaaaggtgtttaagacttccgctgctgcttaaaaataacatgtcattgaagtcataaaaagttttttcttcagaaaggtactctagtgttaagtgtatttttttcaactaattttttagtgaattttttttaaacttacagcatgttttggtttgaattactaaaactttaaaaaatatttttcttatgtatgctgtcgtatcgtaggcgtttatattataaaattctgttagtagtcttaaaattgaattggtggaaccactaatccttaaaagttagtctggttatttttcatatagaagtaagtttaatccgagtgtggtggtgttcacctttaatcccagctacttgggaggctgaggtgggaggataacttgagcacaggagttcaagaccagcgtgggcaatatagcaagactccacccctccacaccccaaaaaagtaagtttaggattagaatatagctaggtccaatgttaaatacattttcctggagtacatttgtcacattcagctttgagccactgtaagcatgttactattaaatggttggttattttatatagcatattctttatcttggatattttatgaataaagtatagttattttaagtgccaattaatttatcagactaaatagaaaatatttgagccattactgaattcacatatgtatgtttttttttactatttaaaatacccaacatgtattatgaaatacctcaaaagtaatttagttacattcttaaacaatgacattgtcgaaagaaagttcttataagctgttttttgcatttttataacttggttatactatattctgtttccaagtaaccttttaactaaaagatttgttgggttttagatctcttttcatttgtcaaccttttcagtaaagccctctgttacatcactgtgactgtggctgtgttattagagatgaattctgagttaaatttgtacttattaggggtcttacagagggagaatctggccttgattgctatgccatatgacattctgtcctaatggttagaacaaatctttatctgtttccacccaccctgggatcctttttacttgtagcccattcctgccctctaaaagaatccttccaacttcctataggggccatttcatgcagatatactcactttatatgtatgtttctaaaagctttagtgaaggctgaatccaagtttcatgtagtaggacagagaacagaaggccgaatccaagtttcatgtggtaggacagagaacggcaatctacaaaactacaccaagcctaagatggcccatgtgccactttgttcattcatttatttattcagcagatatttattgaaccacttggtctggtttggttttgaacacgcactaattcatttaattacaacaactttgcgatgtagttattgttataatcctcatcctaaaggtgtgagaaacagagttattaagtaagttgccagaagccatacaagtacaaagtgtcaaggggagactttaagccaggtctctattccatgttttgtgtctgccatgttttcattcctgagcagaagagcttggggaaatgaacttttgctaagtaaacccagtatttaaattaagtcactatatctgtgtcttttaagagcccctcctttagcttacatggttagttgtatctttttttttttttttttttgagacagagtctcactatgttgcccaggcttgagcgcagtggcaccatctcggctcactacaacctccgcctcccagattcaagcgattttcctgcctcagcctcccaagtagctgggattacaggtgcccaccaccatgcctggcttaattttttgtatttttagtagagatgaggtttcaccatgttggccagactggtctcgaactcctgacctcaaatgatccgctgtcttgtcctcccaaagtgctgggattataggcgtgagccatcgcgccctgctgcatttcatttttttgtataaaatttggtttgttcgtttttgaggggaaccattcctttatgttgccccttactgatgcccaactaatgtgtttctggttactaacagaccttcatcccccaccctccctaaattcttcggtgtaatctaagcgttatctgcaccacttctgaataataaatgtgtttgaaatgcacacctacacaaccctgtcccacactggcctgtaggacctaatctaccttcatgtctttcagttgatttgtatttctgcaaaagatatttcaaggattatcaaggtatggaattttttttattttttatcttttaacaaacttgttcatttccttttctttccattgagcacctctgaacaatgtgattcttttttttaagtctttcacacttcaggaaaatactacattcacccacgttgtgattcatatcggacagtttcttactcaaagataacacaaataccaattcttattcatactttgaaactatattttaccctagactgccttggttcaaaggcctagtttcgacattactgtggcaaattatttaagctctctgttttcatttctttttctgtaaatgcaggatgaaaacaatatgtatctcctaggatggctgtgaggagtgagtgagacaggacatgaaaggtgtgtatgaactgtgataactgttgcccttgtgggcatgttatatagggctggctctaggaagaagcctgtgtcttttttcagaaatccctggagcaacttaaatgtctttagaaatgacaagtctctcagttatccagttagccgtaaacaggttctggaagacacacctagatagaactcggcccgtcagttctgagtgaggcacgtaccacttgggcttgggatgtccttaacccatttatgcctgaggttgcaattttttgaatttttccaatcacaccttggcgatgaccttgagcagtaggatataaataactcccacatgcttagtgttccaataatggaacactaggcataaacaggttttaattggctcctcagtcaaccatgaccaatatctctatctcagcttctgctgatgccctagctcagggctctgcattccgtgccagggacgcctcagccccttaacatggatgtgccacatgacaggcaataatatattggccccattagcccttcctggagcagtcataatgaattacagtcatgacaggcacatgtaagaaaccaaaatttgctaaatatgtacatgagtcttcatcacagcatcgtttatgaaaacaactaaatattcactaatggtgccagtggaataaatcagagaacatcccctgctacgtaactctctgcatacatcaaagagaatggtgtggctttgctttttcaacaatctactgagtggccatgggcatgtggatatggccatgaatgagcaagatcctctctgatcctgtagaagttaagttctaccagataacttgctgcttcaacaaaaagatttacctttttaaataaatgttgtagaatacttaaaaaaaacaaactagaatttgcctgtgtgcagccagtaacatgtctatttaacctggacaccttttgaggaatattctcagattgcccccatgctgtttataagacattgttccttatacacctgtttatgaatgaaaagaaacataaggagtgggtacaaagacttctatctatgaatgattaaaaaggctagagtacgaatacttcttgaacctttggtactaaatgcttttcatgttctatataaatgtagaaaacattttacaaatcctgtaaataaactgtttattttttatagaaagcc

SEQ ID NO: 124930 - DNA, 7011 bp, Homo sapiens
  Payload ID: 4532
  Gene Symbol: DZIP1
  Gene Name: DAZ interacting zinc finger protein 1
  Uniprot ID: Q86YF9
  ENST ID: ENST00000361156
  CDS Start-End: 434-2980
tgttaggaaagaaaaaaaaattcctgatgtctggtccaagcaggaattccccggtggattggggaatgtctggcttttcctcagcttattgatctctgtggtaaccactggaggcccccagaagacccatagaaatgagaggcctgaggtctacaagtcgctgctagaaatattttagcctctccaaagcccagaatgcagccccgacccaagtttgtaagggttctgggtgcacgctgaccctgcgcgggcagacgcgccctttgctccaggtccggacctgggcgctgctatagcaacgtcctggacgcccagaccttaggccgccgccgccgcggaagcgaggaacccggccttctcccgctcctgagggctgtggcggcggcggcccgggaggcggcccaggctgggtaaagaccgcccggctcctcctatgcaagctgaggcagcggattggttttcaagcatgcccttccagaagcatgtctactacccgctcgccagcggcccagaggggcccgacgtcgctgtggccgccgccgccgcgggtgcggcctccatggcctgtgcgccccccagcgcggcttcggggcccctgcccttcttccagttcaggccgcggctggagagtgtggactggcggcggctgagcgccatcgacgtggacaaggtggcgggggctgtggacgtgctgacgctgcaggagaacatcatgaacatcaccttctgcaagctggaagacgagaagtgcccacactgccagtcgggggtggacccggtgctgctgaagctcatccgtctggcgcagttcaccatcgagtacttgctgcactcacaagagttcctcacctcgcagctgcacaccctggaggagcggctgcgcctgagccactgcgacggcgagcagagcaagaagctgctcaccaagcaggcgggggagatcaagacgctcaaggaagagtgcaaacgccggaagaagatgatctccacccagcagctgatgatcgaggccaaagccaactattaccagtgccatttttgtgacaaggcctttatgaaccaagcttttctacaaagtcacattcaacgccgccacactgaagaaaattctcattttgagtatcagaaaaatgcacagattgagaagctccggagtgagatcgtcgtattgaaggaagagctgcagctcaccaggtctgagctagaggctgcacaccatgccagtgcagtcagattctccaaggaatatgaaatgcagaaaacaaaagaggaagactttttgaagttatttgacaggtggaaagaagaagaaaaggagaaactagttgatgaaatggaaaaagtcaaggagatgtttatgaaggaatttaaagaattaacttcgaagaattcagcattagaatatcaactgtcagaaatccagaagtccaatatgcagatcaagtccaacataggcacattaaaagatgcacacgagtttaaagaagaccgttctccatatccccaggatttccataatgtcatgcagcttcttgatagtcaggaaagcaaatggacagctcgagttcaagctattcatcaagaacacaagaaagagaagggtcggctcctgtcacatatagagaaacttcgaacctcaatgatagatgatctaaatgcaagcaatgttttctataagaaaaggatagaagagctagggcagagactccaggagcagaatgagctgattataactcagagacagcagattaaagactttacctgtaatccattaaacagtatcagtgaacccaaagtgaatgccccagccctgcacactttggaaactaaatcaagtctgccaatggtgcatgaacaggcattctcgtcgcacatactggaaccaatagaagaactttcagaggaagaaaaaggaagggaaaatgaacagaaattaaataacaacaaaatgcatttaaggaaagctttgaagagtaactcctccctcactaagggactaagaacaatggtggagcagaacttgatggagaaactggaaaccttggggattaatgcagatatacgtggcatttcaagtgatcagttgcatagagtactaaaaagtgtggaatcagaaagacataagcaagaaagagaaatacctaactttcatcaaattcgagaattccttgaacatcaagtcagctgtaaaattgaggagaaagcactactctcttcagatcagtgcagtgtttctcaaatggataccctttcaactggagaagtacccaaaatgatacaacttccttccaaaaacagacaactgattagacaaaaagctgtttctactgataggacatctgttccaaaaattaagaaaaatgtcatggaagatccttttcccagaaagtcttcaactattacgacccctccttttagttcagaggaggagcaggaggacgacgacctcatccgggcatacgcatccccaggcccacttcctgtgccgccaccacaaaacaagggcagcttcgggaagaacacagtgaaaagtgacgcggacgggaccgagggaagcgaaatcgaggacactgatgattctcccaagcccgcaggagtcgccgttaaaacacctactgaaaaagttgaaaagatgtttccacatcgcaaaaatgtgaacaaaccagtcggtggaactaatgtccctgagatgtttatcaaaaaagaagaattacaagaactaaagtgtgcggatgtggaggatgaagactgggacatatcatccctagaggaagagatatctttgggaaaaaaatctgggaaagaacagaaggaacctccacctgcgaaaaatgaaccacattttgctcatgtgctaaatgcctggggcgcatttaatcctaaggggccaaagggagaaggacttcaagaaaatgaatcaagcacattaaaaagcagcttagtaactgtgactgattggagcgacacttcagatgtctaattccacatgtcagaagattattccagaagccagcagtatttcagtatcacagtgtttcagtaatttgcctccatgattctagtgcttctgccttaccgtgtttcccacagcaacacagagactgattcaaagaacaatggtctctttaatggcacccaatacagtattgaaaatcagatcatcaacagtatttcgaagcatgtaaaggtgtttaagacttccgctgctgcttaaaaataacatgtcattgaagtcataaaaagttttttcttcagaaaggtactctagtgttaagtgtatttttttcaactaattttttagtgaattttttttaaacttacagcatgttttggtttgaattactaaaactttaaaaaatatttttcttatgtatgctgtcgtatcgtaggcgtttatattataaaattctgttagtagtcttaaaattgaattggtggaaccactaatccttaaaagttagtctggttatttttcatatagaagtaagtttaatccgagtgtggtggtgttcacctttaatcccagctacttgggaggctgaggtgggaggataacttgagcacaggagttcaagaccagcgtgggcaatatagcaagactccacccctccacaccccaaaaaagtaagtttaggattagaatatagctaggtccaatgttaaatacattttcctggagtacatttgtcacattcagctttgagccactgtaagcatgttactattaaatggttggttattttatatagcatattctttatcttggatattttatgaataaagtatagttattttaagtgccaattaatttatcagactaaatagaaaatatttgagccattactgaattcacatatgtatgtttttttttactatttaaaatacccaacatgtattatgaaatacctcaaaagtaatttagttacattcttaaacaatgacattgtcgaaagaaagttcttataagctgttttttgcatttttataacttggttatactatattctgtttccaagtaaccttttaactaaaagatttgttgggttttagatctcttttcatttgtcaaccttttcagtaaagccctctgttacatcactgtgactgtggctgtgttattagagatgaattctgagttaaatttgtacttattaggggtcttacagagggagaatctggccttgattgctatgccatatgacattctgtcctaatggttagaacaaatctttatctgtttccacccaccctgggatcctttttacttgtagcccattcctgccctctaaaagaatccttccaacttcctataggggccatttcatgcagatatactcactttatatgtatgtttctaaaagctttagtgaaggctgaatccaagtttcatgtagtaggacagagaacagaaggccgaatccaagtttcatgtggtaggacagagaacggcaatctacaaaactacaccaagcctaagatggcccatgtgccactttgttcattcatttatttattcagcagatatttattgaaccacttggtctggtttggttttgaacacgcactaattcatttaattacaacaactttgcgatgtagttattgttataatcctcatcctaaaggtgtgagaaacagagttattaagtaagttgccagaagccatacaagtacaaagtgtcaaggggagactttaagccaggtctctattccatgttttgtgtctgccatgttttcattcctgagcagaagagcttggggaaatgaacttttgctaagtaaacccagtatttaaattaagtcactatatctgtgtcttttaagagcccctcctttagcttacatggttagttgtatctttttttttttttttttttgagacagagtctcactatgttgcccaggcttgagcgcagtggcaccatctcggctcactacaacctccgcctcccagattcaagcgattttcctgcctcagcctcccaagtagctgggattacaggtgcccaccaccatgcctggcttaattttttgtatttttagtagagatgaggtttcaccatgttggccagactggtctcgaactcctgacctcaaatgatccgctgtcttgtcctcccaaagtgctgggattataggcgtgagccatcgcgccctgctgcatttcatttttttgtataaaatttggtttgttcgtttttgaggggaaccattcctttatgttgccccttactgatgcccaactaatgtgtttctggttactaacagaccttcatcccccaccctccctaaattcttcggtgtaatctaagcgttatctgcaccacttctgaataataaatgtgtttgaaatgcacacctacacaaccctgtcccacactggcctgtaggacctaatctaccttcatgtctttcagttgatttgtatttctgcaaaagatatttcaaggattatcaaggtatggaattttttttattttttatcttttaacaaacttgttcatttccttttctttccattgagcacctctgaacaatgtgattcttttttttaagtctttcacacttcaggaaaatactacattcacccacgttgtgattcatatcggacagtttcttactcaaagataacacaaataccaattcttattcatactttgaaactatattttaccctagactgccttggttcaaaggcctagtttcgacattactgtggcaaattatttaagctctctgttttcatttctttttctgtaaatgcaggatgaaaacaatatgtatctcctaggatggctgtgaggagtgagtgagacaggacatgaaaggtgtgtatgaactgtgataactgttgcccttgtgggcatgttatatagggctggctctaggaagaagcctgtgtcttttttcagaaatccctggagcaacttaaatgtctttagaaatgacaagtctctcagttatccagttagccgtaaacaggttctggaagacacacctagatagaactcggcccgtcagttctgagtgaggcacgtaccacttgggcttgggatgtccttaacccatttatgcctgaggttgcaattttttgaatttttccaatcacaccttggcgatgaccttgagcagtaggatataaataactcccacatgcttagtgttccaataatggaacactaggcataaacaggttttaattggctcctcagtcaaccatgaccaatatctctatctcagcttctgctgatgccctagctcagggctctgcattccgtgccagggacgcctcagccccttaacatggatgtgccacatgacaggcaataatatattggccccattagcccttcctggagcagtcataatgaattacagtcatgacaggcacatgtaagaaaccaaaatttgctaaatatgtacatgagtcttcatcacagcatcgtttatgaaaacaactaaatattcactaatggtgccagtggaataaatcagagaacatcccctgctacgtaactctctgcatacatcaaagagaatggtgtggctttgctttttcaacaatctactgagtggccatgggcatgtggatatggccatgaatgagcaagatcctctctgatcctgtagaagttaagttctaccagataacttgctgcttcaacaaaaagatttacctttttaaataaatgttgtagaatacttaaaaaaaacaaactagaatttgcctgtgtgcagccagtaacatgtctatttaacctggacaccttttgaggaatattctcagattgcccccatgctgtttataagacattgttccttatacacctgtttatgaatgaaaagaaacataaggagtgggtacaaagacttctatctatgaatgattaaaaaggctagagtacgaatacttcttgaacctttggtactaaatgcttttcatgttctatataaatgtagaaaacattttacaaatcctgtaaataaactgtttattttttatagaaagcc

SEQ ID NO: 124931 - DNA, 7418 bp, Homo sapiens
  Payload ID: 4532
  Gene Symbol: DZIP1
  Gene Name: DAZ interacting zinc finger protein 1
  Uniprot ID: Q86YF9
  ENST ID: ENST00000361396
  CDS Start-End: 840-3386
cgagggaagaggccggagggagatcgcggaggggagggggcgggaggggggtggggtatcctgagtcgtccgtggtccggagtctggaaggccctagagcggcgccagtcgacccgcctcgccacaacttgcccagaccagacacgtttcatcctgcgccctgcaagaaggagccggcctgcctctctccgctttgctgctcctcggcctccgcgggcccggcccgcgtcagcagcgaccctggggtctgggtcccctgtgtcgcccccgcccgcctgcagcgcccggcacccgcccaggagcgcgcagctggggttctagggacgtatacttgagcaagagagaccacagctcttgttcccgctgatcctgcagcccagtggatggagtccagaatctacagacctgccaggaaagaaaaaaaaattcctgatgtctggtccaagcaggaattccccggtggattggggaatgtctggcttttcctcagcttattgatctctgtggtaaccactggaggcccccagaagacccatagaaatgagaggcctgaggtctacaagtcgctgctagaaatattttagcctctccaaagcccagaatgcagccccgacccaagtttgtaagggttctgggtgcacgctgaccctgcgcgggcagacgcgccctttgctccaggtccggacctgggcgctgctatagcaacgtcctggacgcccagaccttaggccgccgccgccgcggaagcgaggaacccggccttctcccgctcctgagggctgtggcggcggcggcccgggaggcggcccaggctgggtaaagaccgcccggctcctcctatgcaagctgaggcagcggattggttttcaagcatgcccttccagaagcatgtctactacccgctcgccagcggcccagaggggcccgacgtcgctgtggccgccgccgccgcgggtgcggcctccatggcctgtgcgccccccagcgcggcttcggggcccctgcccttcttccagttcaggccgcggctggagagtgtggactggcggcggctgagcgccatcgacgtggacaaggtggcgggggctgtggacgtgctgacgctgcaggagaacatcatgaacatcaccttctgcaagctggaagacgagaagtgcccacactgccagtcgggggtggacccggtgctgctgaagctcatccgtctggcgcagttcaccatcgagtacttgctgcactcacaagagttcctcacctcgcagctgcacaccctggaggagcggctgcgcctgagccactgcgacggcgagcagagcaagaagctgctcaccaagcaggcgggggagatcaagacgctcaaggaagagtgcaaacgccggaagaagatgatctccacccagcagctgatgatcgaggccaaagccaactattaccagtgccatttttgtgacaaggcctttatgaaccaagcttttctacaaagtcacattcaacgccgccacactgaagaaaattctcattttgagtatcagaaaaatgcacagattgagaagctccggagtgagatcgtcgtattgaaggaagagctgcagctcaccaggtctgagctagaggctgcacaccatgccagtgcagtcagattctccaaggaatatgaaatgcagaaaacaaaagaggaagactttttgaagttatttgacaggtggaaagaagaagaaaaggagaaactagttgatgaaatggaaaaagtcaaggagatgtttatgaaggaatttaaagaattaacttcgaagaattcagcattagaatatcaactgtcagaaatccagaagtccaatatgcagatcaagtccaacataggcacattaaaagatgcacacgagtttaaagaagaccgttctccatatccccaggatttccataatgtcatgcagcttcttgatagtcaggaaagcaaatggacagctcgagttcaagctattcatcaagaacacaagaaagagaagggtcggctcctgtcacatatagagaaacttcgaacctcaatgatagatgatctaaatgcaagcaatgttttctataagaaaaggatagaagagctagggcagagactccaggagcagaatgagctgattataactcagagacagcagattaaagactttacctgtaatccattaaacagtatcagtgaacccaaagtgaatgccccagccctgcacactttggaaactaaatcaagtctgccaatggtgcatgaacaggcattctcgtcgcacatactggaaccaatagaagaactttcagaggaagaaaaaggaagggaaaatgaacagaaattaaataacaacaaaatgcatttaaggaaagctttgaagagtaactcctccctcactaagggactaagaacaatggtggagcagaacttgatggagaaactggaaaccttggggattaatgcagatatacgtggcatttcaagtgatcagttgcatagagtactaaaaagtgtggaatcagaaagacataagcaagaaagagaaatacctaactttcatcaaattcgagaattccttgaacatcaagtcagctgtaaaattgaggagaaagcactactctcttcagatcagtgcagtgtttctcaaatggataccctttcaactggagaagtacccaaaatgatacaacttccttccaaaaacagacaactgattagacaaaaagctgtttctactgataggacatctgttccaaaaattaagaaaaatgtcatggaagatccttttcccagaaagtcttcaactattacgacccctccttttagttcagaggaggagcaggaggacgacgacctcatccgggcatacgcatccccaggcccacttcctgtgccgccaccacaaaacaagggcagcttcgggaagaacacagtgaaaagtgacgcggacgggaccgagggaagcgaaatcgaggacactgatgattctcccaagcccgcaggagtcgccgttaaaacacctactgaaaaagttgaaaagatgtttccacatcgcaaaaatgtgaacaaaccagtcggtggaactaatgtccctgagatgtttatcaaaaaagaagaattacaagaactaaagtgtgcggatgtggaggatgaagactgggacatatcatccctagaggaagagatatctttgggaaaaaaatctgggaaagaacagaaggaacctccacctgcgaaaaatgaaccacattttgctcatgtgctaaatgcctggggcgcatttaatcctaaggggccaaagggagaaggacttcaagaaaatgaatcaagcacattaaaaagcagcttagtaactgtgactgattggagcgacacttcagatgtctaattccacatgtcagaagattattccagaagccagcagtatttcagtatcacagtgtttcagtaatttgcctccatgattctagtgcttctgccttaccgtgtttcccacagcaacacagagactgattcaaagaacaatggtctctttaatggcacccaatacagtattgaaaatcagatcatcaacagtatttcgaagcatgtaaaggtgtttaagacttccgctgctgcttaaaaataacatgtcattgaagtcataaaaagttttttcttcagaaaggtactctagtgttaagtgtatttttttcaactaattttttagtgaattttttttaaacttacagcatgttttggtttgaattactaaaactttaaaaaatatttttcttatgtatgctgtcgtatcgtaggcgtttatattataaaattctgttagtagtcttaaaattgaattggtggaaccactaatccttaaaagttagtctggttatttttcatatagaagtaagtttaatccgagtgtggtggtgttcacctttaatcccagctacttgggaggctgaggtgggaggataacttgagcacaggagttcaagaccagcgtgggcaatatagcaagactccacccctccacaccccaaaaaagtaagtttaggattagaatatagctaggtccaatgttaaatacattttcctggagtacatttgtcacattcagctttgagccactgtaagcatgttactattaaatggttggttattttatatagcatattctttatcttggatattttatgaataaagtatagttattttaagtgccaattaatttatcagactaaatagaaaatatttgagccattactgaattcacatatgtatgtttttttttactatttaaaatacccaacatgtattatgaaatacctcaaaagtaatttagttacattcttaaacaatgacattgtcgaaagaaagttcttataagctgttttttgcatttttataacttggttatactatattctgtttccaagtaaccttttaactaaaagatttgttgggttttagatctcttttcatttgtcaaccttttcagtaaagccctctgttacatcactgtgactgtggctgtgttattagagatgaattctgagttaaatttgtacttattaggggtcttacagagggagaatctggccttgattgctatgccatatgacattctgtcctaatggttagaacaaatctttatctgtttccacccaccctgggatcctttttacttgtagcccattcctgccctctaaaagaatccttccaacttcctataggggccatttcatgcagatatactcactttatatgtatgtttctaaaagctttagtgaaggctgaatccaagtttcatgtagtaggacagagaacagaaggccgaatccaagtttcatgtggtaggacagagaacggcaatctacaaaactacaccaagcctaagatggcccatgtgccactttgttcattcatttatttattcagcagatatttattgaaccacttggtctggtttggttttgaacacgcactaattcatttaattacaacaactttgcgatgtagttattgttataatcctcatcctaaaggtgtgagaaacagagttattaagtaagttgccagaagccatacaagtacaaagtgtcaaggggagactttaagccaggtctctattccatgttttgtgtctgccatgttttcattcctgagcagaagagcttggggaaatgaacttttgctaagtaaacccagtatttaaattaagtcactatatctgtgtcttttaagagcccctcctttagcttacatggttagttgtatctttttttttttttttttttgagacagagtctcactatgttgcccaggcttgagcgcagtggcaccatctcggctcactacaacctccgcctcccagattcaagcgattttcctgcctcagcctcccaagtagctgggattacaggtgcccaccaccatgcctggcttaattttttgtatttttagtagagatgaggtttcaccatgttggccagactggtctcgaactcctgacctcaaatgatccgctgtcttgtcctcccaaagtgctgggattataggcgtgagccatcgcgccctgctgcatttcatttttttgtataaaatttggtttgttcgtttttgaggggaaccattcctttatgttgccccttactgatgcccaactaatgtgtttctggttactaacagaccttcatcccccaccctccctaaattcttcggtgtaatctaagcgttatctgcaccacttctgaataataaatgtgtttgaaatgcacacctacacaaccctgtcccacactggcctgtaggacctaatctaccttcatgtctttcagttgatttgtatttctgcaaaagatatttcaaggattatcaaggtatggaattttttttattttttatcttttaacaaacttgttcatttccttttctttccattgagcacctctgaacaatgtgattcttttttttaagtctttcacacttcaggaaaatactacattcacccacgttgtgattcatatcggacagtttcttactcaaagataacacaaataccaattcttattcatactttgaaactatattttaccctagactgccttggttcaaaggcctagtttcgacattactgtggcaaattatttaagctctctgttttcatttctttttctgtaaatgcaggatgaaaacaatatgtatctcctaggatggctgtgaggagtgagtgagacaggacatgaaaggtgtgtatgaactgtgataactgttgcccttgtgggcatgttatatagggctggctctaggaagaagcctgtgtcttttttcagaaatccctggagcaacttaaatgtctttagaaatgacaagtctctcagttatccagttagccgtaaacaggttctggaagacacacctagatagaactcggcccgtcagttctgagtgaggcacgtaccacttgggcttgggatgtccttaacccatttatgcctgaggttgcaattttttgaatttttccaatcacaccttggcgatgaccttgagcagtaggatataaataactcccacatgcttagtgttccaataatggaacactaggcataaacaggttttaattggctcctcagtcaaccatgaccaatatctctatctcagcttctgctgatgccctagctcagggctctgcattccgtgccagggacgcctcagccccttaacatggatgtgccacatgacaggcaataatatattggccccattagcccttcctggagcagtcataatgaattacagtcatgacaggcacatgtaagaaaccaaaatttgctaaatatgtacatgagtcttcatcacagcatcgtttatgaaaacaactaaatattcactaatggtgccagtggaataaatcagagaacatcccctgctacgtaactctctgcatacatcaaagagaatggtgtggctttgctttttcaacaatctactgagtggccatgggcatgtggatatggccatgaatgagcaagatcctctctgatcctgtagaagttaagttctaccagataacttgctgcttcaacaaaaagatttacctttttaaataaatgttgtagaatacttaaaaaaaacaaactagaatttgcctgtgtgcagccagtaacatgtctatttaacctggacaccttttgaggaatattctcagattgcccccatgctgtttataagacattgttccttatacacctgtttatgaatgaaaagaaacataaggagtgggtacaaagacttctatctatgaatgattaaaaaggctagagtacgaatacttcttgaacctttggtactaaatgcttttcatgttctatataaatgtagaaaacattttacaaatcctgtaaataaactgtttattttttatagaaagcca

SEQ ID NO: 124932 - DNA, 3738 bp, Homo sapiens
  Payload ID: 4532
  Gene Symbol: DZIP1
  Gene Name: DAZ interacting zinc finger protein 1
  Uniprot ID: Q86YF9
  ENST ID: ENST00000376829
  CDS Start-End: 853-3456
ggagccgggacaccgagggaagaggccggagggagatcgcggaggggagggggcgggaggggggtggggtatcctgagtcgtccgtggtccggagtctggaaggccctagagcggcgccagtcgacccgcctcgccacaacttgcccagaccagacacgtttcatcctgcgccctgcaagaaggagccggcctgcctctctccgctttgctgctcctcggcctccgcgggcccggcccgcgtcagcagcgaccctggggtctgggtcccctgtgtcgcccccgcccgcctgcagcgcccggcacccgcccaggagcgcgcagctggggttctagggacgtatacttgagcaagagagaccacagctcttgttcccgctgatcctgcagcccagtggatggagtccagaatctacagacctgccaggaaagaaaaaaaaattcctgatgtctggtccaagcaggaattccccggtggattggggaatgtctggcttttcctcagcttattgatctctgtggtaaccactggaggcccccagaagacccatagaaatgagaggcctgaggtctacaagtcgctgctagaaatattttagcctctccaaagcccagaatgcagccccgacccaagtttgtaagggttctgggtgcacgctgaccctgcgcgggcagacgcgccctttgctccaggtccggacctgggcgctgctatagcaacgtcctggacgcccagaccttaggccgccgccgccgcggaagcgaggaacccggccttctcccgctcctgagggctgtggcggcggcggcccgggaggcggcccaggctgggtaaagaccgcccggctcctcctatgcaagctgaggcagcggattggttttcaagcatgcccttccagaagcatgtctactacccgctcgccagcggcccagaggggcccgacgtcgctgtggccgccgccgccgcgggtgcggcctccatggcctgtgcgccccccagcgcggcttcggggcccctgcccttcttccagttcaggccgcggctggagagtgtggactggcggcggctgagcgccatcgacgtggacaaggtggcgggggctgtggacgtgctgacgctgcaggagaacatcatgaacatcaccttctgcaagctggaagacgagaagtgcccacactgccagtcgggggtggacccggtgctgctgaagctcatccgtctggcgcagttcaccatcgagtacttgctgcactcacaagagttcctcacctcgcagctgcacaccctggaggagcggctgcgcctgagccactgcgacggcgagcagagcaagaagctgctcaccaagcaggcgggggagatcaagacgctcaaggaagagtgcaaacgccggaagaagatgatctccacccagcagctgatgatcgaggccaaagccaactattaccagtgccatttttgtgacaaggcctttatgaaccaagcttttctacaaagtcacattcaacgccgccacactgaagaaaattctcattttgagtatcagaaaaatgcacagattgagaagctccggagtgagatcgtcgtattgaaggaagagctgcagctcaccaggtctgagctagaggctgcacaccatgccagtgcagtcagattctccaaggaatatgaaatgcagaaaacaaaagaggaagactttttgaagttatttgacaggtggaaagaagaagaaaaggagaaactagttgatgaaatggaaaaagtcaaggagatgtttatgaaggaatttaaagaattaacttcgaagaattcagcattagaatatcaactgtcagaaatccagaagtccaatatgcagatcaagtccaacataggcacattaaaagatgcacacgagtttaaagaagaccgttctccatatccccaggatttccataatgtcatgcagcttcttgatagtcaggaaagcaaatggacagctcgagttcaagctattcatcaagaacacaagaaagagaagggtcggctcctgtcacatatagagaaacttcgaacctcaatgatagatgatctaaatgcaagcaatgttttctataagaaaaggatagaagagctagggcagagactccaggagcagaatgagctgattataactcagagacagcagattaaagactttacctgtaatccattaaacagtatcagtgaacccaaaggaaatcctttagcctggcaggcttttgaatctcagccagctgctccagctgtgcctatgaatgccccagccctgcacactttggaaactaaatcaagtctgccaatggtgcatgaacaggcattctcgtcgcacatactggaaccaatagaagaactttcagaggaagaaaaaggaagggaaaatgaacagaaattaaataacaacaaaatgcatttaaggaaagctttgaagagtaactcctccctcactaagggactaagaacaatggtggagcagaacttgatggagaaactggaaaccttggggattaatgcagatatacgtggcatttcaagtgatcagttgcatagagtactaaaaagtgtggaatcagaaagacataagcaagaaagagaaatacctaactttcatcaaattcgagaattccttgaacatcaagtcagctgtaaaattgaggagaaagcactactctcttcagatcagtgcagtgtttctcaaatggataccctttcaactggagaagtacccaaaatgatacaacttccttccaaaaacagacaactgattagacaaaaagctgtttctactgataggacatctgttccaaaaattaagaaaaatgtcatggaagatccttttcccagaaagtcttcaactattacgacccctccttttagttcagaggaggagcaggaggacgacgacctcatccgggcatacgcatccccaggcccacttcctgtgccgccaccacaaaacaagggcagcttcgggaagaacacagtgaaaagtgacgcggacgggaccgagggaagcgaaatcgaggacactgatgattctcccaagcccgcaggagtcgccgttaaaacacctactgaaaaagttgaaaagatgtttccacatcgcaaaaatgtgaacaaaccagtcggtggaactaatgtccctgagatgtttatcaaaaaagaagaattacaagaactaaagtgtgcggatgtggaggatgaagactgggacatatcatccctagaggaagagatatctttgggaaaaaaatctgggaaagaacagaaggaacctccacctgcgaaaaatgaaccacattttgctcatgtgctaaatgcctggggcgcatttaatcctaaggggccaaagggagaaggacttcaagaaaatgaatcaagcacattaaaaagcagcttagtaactgtgactgattggagcgacacttcagatgtctaattccacatgtcagaagattattccagaagccagcagtatttcagtatcacagtgtttcagtaatttgcctccatgattctagtgcttctgccttaccgtgtttcccacagcaacacagagactgattcaaagaacaatggtctctttaatggcacccaatacagtattgaaaatcagatcatcaacagtatttcgaagcatgtaaaggtgtttaagacttccgctgctgcttaaaaataacatgtcattgaagtcataaaaagttttttcttcagaaaggta

SEQ ID NO: 124933 - DNA, 1783 bp, Homo sapiens
  Payload ID: 4532
  Gene Symbol: DZIP1
  Gene Name: DAZ interacting zinc finger protein 1
  Uniprot ID: Q86YF9
  ENST ID: ENST00000466569
  CDS Start-End: 1-834
atgcaagctgaggcagcggattggttttcaagcatggtaagaggcgggaggccggggcgcccccgacggggatgccgggctggggagaaccggggcttccccggacccccagctccccagcctgcccgccccccatccccgcctcccgccgcgctctctttgtgccccccgcagcccttccagaagcatgtctactacccgctcgccagcggcccagaggggcccgacgtcgctgtggccgccgccgccgcgggtgcggcctccatggcctgtgcgccccccagcgcggcttcggggcccctgcccttcttccagttcaggccgcggctggagagtgtggactggcggcggctgagcgccatcgacgtggacaaggtggcgggggctgtggacgtgctgacgctgcaggagaacatcatgaacatcaccttctgcaagctggaagacgagaagtgcccacactgccagtcgggggtggacccggtgctgctgaagctcatccgtctggcgcagttcaccatcgagtacttgctgcactcacaagagttcctcacctcgcagctgcacaccctggaggagcggctgcgcctgagccactgcgacggcgagcagagcaagaagctgctcaccaagcaggcgggggagatcaagacgctcaaggaagagtgcaaacgccggaagaagatgatctccacccagcagctgatgatcgaggccaaagccaactattaccagtgccatttttgtgacaaggcctttatgaaccaagcttttctacaaagtcacattcaacgccgccacactgaagaaaattctcattttggtcatctttgagattctgactttctactttggtttccatacctttcatgtctacactcacagacacatgtacatccattcagtcatgtgtacatctgcatagtatcagaaaaatgcacagattgagaagctccggagtgagatcgtcgtattgaaggaagagctgcagctcaccaggtctgagctagaggctgcacaccatgccagtgcagtcagattctccaaggaatatgaaatgcagaaaacaaaagaggaagactttttgaagttatttgacaggtggaaagaagaagaaaaggagaaactagttgatgaaatggaaaaagtcaaggagatgtttatgaaggaatttaaagaattaacttcgaagaattcagcattagaatatcaactgtcagaaatccagaagtccaatatgcagatcaagtccaacataggcacattaaaagatgcacacgagtttaaagaagaccgttctccatatccccaggatttccataatgtcatgcagcttcttgatagtcaggaaagcaaatggacagctcgagttcaagctattcatcaagaacacaagaaagagaagggtcggctcctgtcacatatagagaaacttcgaacctcaatgatagatgatctaaatgcaagcaatgttttctataagaaaaggatagaagagctagggcagagactccaggagcagaatgagctgattataactcagagacagcagattaaagactttacctgtaatccattaaacagtatcagtgaacccaaaggaaatcctttagcctggcaggcttttgaatctcagccagctgctccagctgtgcctatgaatgccccagccctgcacactttggaaactaaatcaagtctgccaatggtgcatgaacaggcattctcgtcgcacatactggaaccaatagaagaactttcagaggaagaaaaaggtaacaaa

SEQ ID NO: 124934 - DNA, 3493 bp, Homo sapiens
  Payload ID: 4533
  Gene Symbol: DZIP1L
  Gene Name: DAZ interacting zinc finger protein 1-like
  Uniprot ID: Q8IYY4
  ENST ID: ENST00000327532
  CDS Start-End: 364-2667
caagccacgagctgaccgacgcaccgaggagctctctgtccgcggtcccgcaggttggcggcactggagtgggccgggcaggctctgcctccgccgcagagagcgcccggactgcgtggggctggggaagcatcccgggaacggcgggcggtgagcattccgggaaccatctctgggctgtctggggcggtggagcaagtctggaggcgggacgtggggcgagtatgggagccgccacctcgagacgtcttcccgccgtccccggctccaggagaccccacggccttctctcagctccttggcctactgccgtggccttggtgcccccctcctctggtggtcagctcagggcttcctctgcccatgcagtccccagctgccactgctgagggcctcagtggccccctctttggggcctacacgttccccaccttcaagtttcagcctcgccatgatagcatggactggagacgcattagcaccctggatgtagaccgcgtggcccgggaactggatgtggccactctgcaggagaatattgctggcatcaccttctgcaacttggaccgggaggtgtgcagccgctgtgggcagcctgtggacccggcactgctcaaggtgctgcgcctggcgcagctcatcattgagtacctgctgcactgccaggattgcctgagtgccagtgttgcccagctggaggcacggctgcagaccagcctgggccagcagcagcgtggtcagcaggagctgggacgccaggctgacgagctcaagggtgtgcgggaggagagccgccggcgtcgcaagatgatcagcaccctgcagcagctgctaatgcagacaggcacccacagctaccacacgtgccacctgtgtgacaagacattcatgaatgccacctttctccggggccacatccagcgcaggcatgcaggcgtggcagaaggtggaaaacagaagaaacaggaacagccagtggaagaggtgttagaagagctacgggccaagctaaagtggacccaaggggagctggaagcccagagggaggcggagaggcagcggcagctccaggaagcagagctcattcatcagagggaaatagaagctaagaaagaatttgataaatggaaagagcaagagtggaccaaactttatggggaaatagataaactaaaaaaattattttgggatgaatttaaaaatgtcgccaagcagaactctacactagaagagaaactgcgggcactgcagtcccacagtgtgatggagtccaagctgggatcactgcgagatgaggagtcagaggagtggcttcggcaggcacgggagcttcaggccctgagagagaagacagaaattcagaaaacggagtggaaaagaaaagtgaaggaactgcatgaagagcacatggctgagaagaaagagctacaggaggagaaccagaggctccaggcctccctgtctcaggatcagaagaaggcagctgcccagtcccagtgccagatcagcaccctccgtgcccagctgcaggaacaagctaggatcattgcctcccaggaggagatgatccagtccttgtctctcaggaaggtggaagggatccacaaggtgccaaaggctgtggacacagaggaggactctccagaggaagagatggaggactcccaggatgaacagcacaaggtgctggcagctctgaggcgtaaccccactttgctgaagcacttcagaccaatcctggaggacaccctggaagagaagctcgaaagcatggggataaggaaggatgcaaagggaatctcgattcagactctcagacacctggaatccctgctgagagtccagcgggagcagaaggcccggaagttttctgaatttctgagtctgaggggaaagcttgtcaaggaagtcaccagcagagcgaaggagagacaggagaatggcgctgtggtgtcccagccagacgggcagccttcagtcaaaagccagcagagcacactggtcaccagagaggcccagccaaagaccaggaccctgcaggtggccttgccatccacaccggcagagccacccccaccaactcgtcagagccatggcagccatggctccagcctgacccaggtgtccgcccccgctccacgccccggactgcatggaccctccagcacccctccttcctcggggcccgggatgagcacgcccccgttcagttctgaagaggactcagagggagaccgtgtgcagcgtgtgtctctacagcccccaaaagttccttccaggatggtgccccggcccaaggatgactgggactggtctgacacagagacctcggaggagaatgcccagccccctggccagggctcaggaacactggtgcagtcgatggtcaaaaacctggagaagcagctagaagctccagcaaagaagcctgctggaggggtcagtctgttttttatgcccaatgctgggccacagagggctgccacaccaggaaggaagcctcagctttctgaagatgagagtgacttggagatctcctccttggaagatcttcctctggacctggaccagagagagaaacccaagcccttgtctcgctcaaagctcccagagaagtttggcactggtccacagagctctggccaacccagggtccctgcctggtgattcaccccagaagctagctggctagagggttagcctggctggggccagctcaggtccacttcaacagaagaggctgctgggcctcttgtcttcacaaacaaccaagagatcatcctcttggagagaagcagtgcagggaatggatatgatctcatccctcctgacctgtgaggggccctgctgtagatggccacaggtgcctgactaggagcccctaggtccccaggcttgagaaagggttaaaatagaacctccaggtagttttcttcctctacctccacatccccccaagactgaaaagagtcactaactctcttttcccaagccttttataaaactgcaggaacactgtggagatggttcctatctggggtccttttggggacatatgcctcagtcagtcattcagtgattgatccaaaattatttactgagtgcctacctactctgcgccaggctctctagcctctcactactgagttagggtgcaggcagaggctggggcagaatgtttacagccagtgccagcacaaggtagtaatctagtgacagagaacagggtgttatggggagcatatgagaggccatctatcccagcctgggtgatcctggagagtttcccagggttgtgatatgtggcaggcctactcatgggtgggaagggaggatggccacttggctggaccttgtatccccaaaggaccacacgtgtaatttttgatattatttccaaaatcaggttttatacatagccattgtatatttttagtgtgaaaaacattaatatattatatgcaaacatttaaatatagtacaatgtttttaa

SEQ ID NO: 124935 - DNA, 475 bp, Homo sapiens
  Payload ID: 4533
  Gene Symbol: DZIP1L
  Gene Name: DAZ interacting zinc finger protein 1-like
  ENST ID: ENST00000486487
  CDS Start-End: 1-445
acagcccccaaaagttccttccaggatggtgccccggcccaaggatgactgggactggtctgacacagagacctcggaggagaatgcccagccccctggccagggctcaggaacactggtgcagtcgatggtcaaaaacctggagaagcagctagaagctccagcaaagaagcctgctggaggggtcagtctgttttttatgcccaatgctgggccacagagggctgccacaccaggaaggaagcctcaggtaggatgtaggatgcttagagtttactctggaattctctacagaaccagctctgagtttggggggcctggggtgaaggttggggagggcccagcaagtgtcatcctttgccctagtgggacattgtgggtgacctccctctgcccctgtgcacatggagagatggccagtttggaatacttgtatccaagttaacattaaaaagccttttggttcattatataa

SEQ ID NO: 124936 - DNA, 2107 bp, Homo sapiens
  Payload ID: 4533
  Gene Symbol: DZIP1L
  Gene Name: DAZ interacting zinc finger protein 1-like
  Uniprot ID: Q8IYY4
  ENST ID: ENST00000469243
  CDS Start-End: 311-1930
aggtttgtaaatgattgcctggcagccaccttggaaacttggctccctcaagttctcctcttgactgcattcttgaggaagcagaagagacagacgcaagctgtggagctgagtcgggttcagacaagccctgctgaaatacagggagaatttagaatccccaacactaaccctgtggtgatttgctgtaaactctgtcagcgcttgcactttggtcaagaaaactcaggccttctctcagctccttggcctactgccgtggccttggtgcccccctcctctggtggtcagctcagggcttcctctgcccatgcagtccccagctgccactgctgagggcctcagtggccccctctttggggcctacacgttccccaccttcaagtttcagcctcgccatgatagcatggactggagacgcattagcaccctggatgtagaccgcgtggcccgggaactggatgtggccactctgcaggagaatattgctggcatcaccttctgcaacttggaccgggaggtgtgcagccgctgtgggcagcctgtggacccggcactgctcaaggtgctgcgcctggcgcagctcatcattgagtacctgctgcactgccaggattgcctgagtgccagtgttgcccagctggaggcacggctgcagaccagcctgggccagcagcagcgtggtcagcaggagctgggacgccaggctgacgagctcaagggtgtgcgggaggagagccgccggcgtcgcaagatgatcagcaccctgcagcagctgctaatgcagacaggcacccacagctaccacacgtgccacctgtgtgacaagacattcatgaatgccacctttctccggggccacatccagcgcaggcatgcaggcgtggcagaaggtggaaaacagaagaaacaggaacagccagtggaagaggtgttagaagagctacgggccaagctaaagtggacccaaggggagctggaagcccagagggaggcggagaggcagcggcagctccaggaagcagagctcattcatcagagggaaatagaagctaagaaagaatttgataaatggaaagagcaagagtggaccaaactttatggggaaatagataaactaaaaaaattattttgggatgaatttaaaaatgtcgccaagcagaactctacactagaagagaaactgcgggcactgcagtcccacagtgtgatggagtccaagctgggatcactgcgagatgaggagtcagaggagtggcttcggcaggcacgggagcttcaggccctgagagagaagacagaaattcagaaaacggagtggaaaagaaaagtgaaggaactgcatgaagagcacatggctgagaagaaagagctacaggaggagaaccagaggctccaggcctccctgtctcaggatcagaagaaggcagctgcccagtcccagtgccagatcagcaccctccgtgcccagctgcaggaacaagctaggatcattgcctcccaggaggagatgatccagtccttgtctctcaggaaggtggaagggatccacaaggtgccaaaggctgtggacacagaggaggactctccagaggaagagatggaggactcccaggatgaacagcacaaggtgctggcagctctgaggcgtaaccccactttgctgaagcacttcagaccaatcctggaggacaccctggaagagaagctcgaaagcatggggataaggaaggatgcaaagggaatctcgattcagactctcagacacctggaatccctgctgagagtccagcgggagcagaaggcccggaagttttctgaatttctgagtctgaggggaaagcttgtcaaggaagtcaccagcagagcgaaggagagacaggagaatggcgctgtggtgtcccagccagacgggcagccttcaggctgaagaggaggaggaagaggaggggttgctcttgctgtctcacgggtggcagagtcggaagaaaatccacgtataagtggacccatggctgttcaaccccacgttgtttcggggtcaactgtatttcaaacattttctgatcttgaattactgtaagaaactcattttacattgtgaccc

SEQ ID NO: 124937 - DNA, 827 bp, Homo sapiens
  Payload ID: 4533
  Gene Symbol: DZIP1L
  Gene Name: DAZ interacting zinc finger protein 1-like
  ENST ID: ENST00000492010
  CDS Start-End: 710-827
aaaccggggcaagtccagcctctcagcaaggccaggaagccattcacttggatcctggattttactaacggattaaacgtggcattcccgccttcccccatccgttacagacctaaaaatagctcgtccgagaggggccgggagaggctccacctcttcttgaggtggggcggggcggctgtagtaggagctggaggcaccagagaccccaagccacgagctgaccgacgcaccgaggagctctctgtccgcggtcccgcaggttggcggcactggagtgggccgggcaggctctgcctccgccgcagagagcgcccggactgcgtggggctggggaagcatcccgggaacggcgggcggtgagcattccgggaaccatctctgggctgtctggggcggtggagcaagtctggaggcgggacgtggggcgagtatgggagccgccacctcgagacgtcttcccgccgtccccggctccaggagaccccacggacgcaagctgtggagctgagtcgggttcagacaagccctgctgaaatacagggagaatttagaatccccaacactaaccctgtggtgatttgctgtaaactctgtcagcgcttgcactttggtcaagaaaactcaggccttctctcagctccttggcctactgccgtggccttggtgcccccctcctctggtggtcagctcagggcttcctctgcccatgcagtccccagctgccactgctgagggcctcagtggccccctctttggggcctacacgttccccaccttcaagtttcagcctcgccatgatagcatggactggagacgcattagca

SEQ ID NO: 124938 - DNA, 571 bp, Homo sapiens
  Payload ID: 4533
  Gene Symbol: DZIP1L
  Gene Name: DAZ interacting zinc finger protein 1-like
  ENST ID: ENST00000467030
  CDS Start-End: 371-571
cccaagccacgagctgaccgacgcaccgaggagctctctgtccgcggtcccgcaggttggcggcactggagtgggccgggcaggctctgcctccgccgcagagagcgcccggactgcgtggggctggggaagcatcccgggaacggcgggcggacgcaagctgtggagctgagtcgggttcagacaagccctgctgaaatacagggagaatttagaatccccaacactaaccctgtggtgatttgctgtaaactctgtcagcgcttgcactttggtcaagaaaactcaggccttctctcagctccttggcctactgccgtggccttggtgcccccctcctctggtggtcagctcagggcttcctctgcccatgcagtccccagctgccactgctgagggcctcagtggccccctctttggggcctacacgttccccaccttcaagtttcagcctcgccatgatagcatggactggagacgcattagcaccctggatgtagaccgcgtggcccgggaactggatgtggccactctgcaggagaatattgctggcatcaccttctgcaacttg

SEQ ID NO: 124939 - DNA, 5350 bp, Homo sapiens
  Payload ID: 4534
  Gene Symbol: DZIP3
  Gene Name: DAZ interacting zinc finger protein 3
  Uniprot ID: Q86Y13
  ENST ID: ENST00000361582
  CDS Start-End: 231-3857
ttctcgggagaggaatcggttaggagaagggggattcctcactcagctgtgcgctctgatttcgtgcgcttcctcgtccttcatgttggatggccagtttttcgtttgtgcgtcatcctctacctgagaaatggtcgcttgcccctagtctagacacgcattaaagggcagtatttaaagtcagttggcaagcagtggaataagatttttgtaaagaaaccttgtgcagcatggattctctaccagatgaattttttgtgaggcatcctgctgtggaggatcagaggaaggaagaaactgagaataagctagaaaaatcatctggtcaactgaacaaacaggaaaatgacatacctactgatcttgtccctgttaacctactattagaagtgaagaagttattaaatgcaattaatactctaccaaaaggtgtggttcctcacattaagaagttcttacaagaagatttttccttccaaactatgcagagagaagttgcagctaacagccagaatggtgaggaaattgttcctgctttgactttacgtttcttgattacacagctagaagcagcacttaggaacattcaagctggcaattataccgcacaccagattaatattggttattatttgacattactgtttttatatggagtagcactcactgaaagaggaaagaaagaggattatacagaagctgagaataaatttctggtgatgaagatgatgatccaagaaaatgaaatttgtgaaaactttatgtctttagtttattttggacgtggtttactgcgatgtgctcaaaagagatataatggaggactgctagaatttcataaaagcttacaagaaattggagacaaaaatgaccattggtttgacatagatcctacagaagatgaagatttacctacaacttttaaagatcttcttaataattttatcaagacaactgaaagcaatataatgaagcagacgatttgtagttacctagattgtgaacgatcttgtgaagctgacattttgaagaacaccagttataagggattttttcagttaatgtgcagtaaaagttgctgtgtttatttccataaaatttgctggaaaaagttcaagaatttaaagtatccaggtgaaaatgatcagagttttagtgggaaaaaatgtttgaaggaaggatgtacaggtgacatggtaaggatgctgcaatgtgatgtacctggaattgttaaaattttgtttgaagttgtgagaaaggatgaatatatcaccattgaaaatttaggagcaagttatagaaagttgatatctctgaaaataactgatactgatataagaccgaagatcagtttaaaatttaatacaaaagatgaaatgcctatcttcaagcttgattataattatttctatcatctgcttcatataattattatttctggtactgacattgttcgacaaatatttgatgaggctatgccacctcctcttttgaaaaaagagcttcttatacacaagaatgtgctggaatcctactacaaccatctttggaccaatcatcctttgggtggatcatggcatctgctttatcctcctaacaaggagttaccgcaatccaaacagtttgacttatgcctcctgttagctcttataaaacatttaaatgtgttccctgcacccaaaaaaggatggaatatggaaccgccatcttctgacatctctaaatctgcagacatcctgagactgtgcaaatacagggatatcctccttagtgagattttgatgaatggtctcactgagtcacagttcaattcaatttggaaaaaagtttcagatattcttctgcgccttgggatgatgcaagaggatattgacaaagtgaaggagaatcccattgagaatatctcccttgattaccatcagctatctgtctacctaggcataccagtaccagaaatcatacagaggatgttatcctgctatcaacaaggaattgctctacagtcaataacaggcagtcagcgtattgaaatagaagagttacagaatgaggaagaagaactaagtccacctctcatggagtacaatataaatgtgaaatcacaccctgagatacagtttgcagaaattaataaagatgggacctcaatacccagtgaatcttcaacagaatctcttaaagatctccaggaagttaagagtaaacaaaggaaaaagaagaagactaagaataaaaagaataaagactcaaaagaagaccaagtcccatatgtggtagaaaaggaagagcagttgaggaaagaacaagcaaatccacactcagtcagtagacttataaaagatgatgcaagtgatgttcaagaggattctgcaatggaagacaagttctatagcctggatgaattgcatattctggacatgatagagcagggctcagctggcaaagtaactacagactatggagaaactgaaaaggaaaggcttgctcgtcaaaggcagctttataaattgcactatcagtgtgaagatttcaaaagacagttgagaacagtgacttttcggtggcaagaaaaccaaatgcagattaaaaagaaagacaaaattatcgcatctcttaatcaacaagttgcttttggaatcaataaggtttccaaattacagcgtcaaatccatgctaaagataatgaaatcaagaaccttaaagagcaactttctatgaaaagatctcagtgggaaatggaaaaacataatctggaaagcacaatgaaaacatacgtaagcaaactgaacgcagaaactagcagagctttaacagccgaggtgtatttcttacagtgtcgtagggattttggtttgcttcatctagagcagactgaaaaggaatgtctcaatcagcttgccagggtgactcacatggcagcaagcaacctagaatcacttcaattaaaggctgcggtagacagttggaatgccattgtggcagatgttagaaacaagattgcattcctcaggacacagtacaatgaacaaataaacaaagtcaagcaaggatttgccttgagtaccttgcctccagtccagcttcctcctccaccacccagtcctgagatactgatgcagcagttcttaggaagacctcttgtgaaagaatctttctttagacccatacttactgttcctcaaatgcctgcagtttgcccgggagtcgtctctgcaactggccaacctagagcccccctgatgactggcatagcctgggctctgccagcgcctgtgggagacgctgtgcctcccagtgcaggtctgcggagtgatccctccatcatgaattgggagagaattacagacaggctgaaaactgcctttccacagcaaaccagaaaggaacttacagatttcttacggaaattgaaggatgcttatggaaaatccttgtctgaactgacatttgatgaaattgtttgcaagatttcccagtttattgaccccaaaaagtctcagagtcaaggaaaatcagtgtcaaatgttaattgtgtttcacctagtcattctccatcacagcctgatgctgcccagcccccaaaaccagcctggaggccactcacttcacagggtcctgccacatgggaaggagccagtaatccagatgaggaagaggaagaagaagagccttgtgtgatctgtcatgagaatctgtctccagaaaatctttcagttttgccttgcgctcacaaattccatgctcagtgcattagaccatggttgatgcaacaggggacatgtccaacgtgcagactccacgttttgctaccagaagaattccctggtcaccccagccggcagttgcccaagatctgatacaaggtacccatgaagagattatgaactacttgaaggtggagactgtacggtggtgtgttggagctggcttgtaatgtcttatgagtgacaatcgttagtttgaggaattttgtgagacagttgtcaaattgttgctagcttgaaatctgcggcaattggagtatttacaccatagaaatgctataagtgaagacctacctttcccttaagagctagttgttaaacctttaccagcataccactggaccttgtctaaaatttctttgtgttcccagtgtcttgcccagtagatacaagataaatattgccagaatcagatatcaggaagtagtaagaaaaggagttaatatgcaaactaaatcactcgctcaattgaataattgagatcttctgttcatttgttccttggaccttaatcatttgcattttggagaaaattttttctgctttaaaagtctgtaatttcagtttttgtgtcggggagagggaaaaactatttgtctgtagttgctttttgtgacaaagtgaatacccactgggctaagtttcatatctaaagcttgtcactaagaattttcatttttaggggtcaaaaacctattttgaaaatagtgttgtgtgaatgctgtaagtgttgtacatgtctctggtttcagaattaaaagaattcagagttaccttgtgagataaatgttctttgcttcatattcacagtttcacctccatttaaatttatggggaagaataaatgtttcctgactcagaaacaattttgcctccatatttcagtgcaaatatattttgaagttacttttaaatatttatttaaaacctctgtttctgtaactgtatgttaaacgtattcttctgtaatgagaatagactggaacatgtgagggaaaaatatttaaaaaaagatggcagtcatctagacatgtaaaatgccaagaatgtcttagaattgcacaatttagaatttatagagcctttaatcaccttgtctagcaccttgtattagtccattttcatgctgctgataaagacatacctgagattgggcaatttacaaaagaaagaggtttaacggacttacagttccacatgactaaggaggcctcacaatcatggtggaaggcaaagaggagcaagtcacatcttacatggatggcagcagacaaggagagagagcttgtgcagggaaactcccatttttaaaaccatcagatctcatgaggcttactatcacgagaacagcatgggaaagacctgcccccgtgattaaattatttcccaccaggcccctcccacaacatggaataatgggagatacaagatatttgggtggagacacagagccaaaccatatcacaccttaaggtcatggtcatatagctagttatcttgtaaaaccaatgtttcttagttcatacttacaactgcaatttcactttcatttagaaaagaataaatgtttcttaattgaacaacta

SEQ ID NO: 124940 - DNA, 576 bp, Homo sapiens
  Payload ID: 4534
  Gene Symbol: DZIP3
  Gene Name: DAZ interacting zinc finger protein 3
  ENST ID: ENST00000497905
  CDS Start-End: 364-576
gtttagctcctgggaaatgatgagattgatgattctttctcctggaaaacctttcatcacagagattcatctcagctgaacactgaacagcttagcagaggccttctgtcctctcttatctcatcaccagaggattttcctcccttcttttcatccttgctgtgatctatgcaaacagctactggccaaagaagagcttagcagagggggaggactccaagtctgagctttgataaattctggaaatgaggggattgttatctggaaaaggcgtacatttgtattctctagcattaaagggcagtatttaaagtcagttggcaagcagtggaataagatttttgtaaagaaaccttgtgcagcatggattctctaccagatgaattttttgtgaggcatcctgctgtggaggatcagaggaaggaagaaactgagaataagctagaaaaatcatctggtcaactgaacaaacaggaaaatgacatacctactgatcttgtccctgttaacctactattagaagtgaagaagttattaaatgcaattaatactctaccaaaaggtgtggttcctcac

SEQ ID NO: 124941 - DNA, 2076 bp, Homo sapiens
  Payload ID: 4534
  Gene Symbol: DZIP3
  Gene Name: DAZ interacting zinc finger protein 3
  ENST ID: ENST00000479138
  CDS Start-End: 115-2076
aggtattgctccggagggtgttactcgttagcgtcagtttttcattaaagggcagtatttaaagtcagttggcaagcagtggaataagatttttgtaaagaaaccttgtgcagcatggattctctaccagatgaattttttgtgaggcatcctgctgtggaggatcagaggaaggaagaaactgagaataagctagaaaaatcatctggtcaactgaacaaacaggaaaatgacatacctactgatcttgtccctgttaacctactattagaagtgaagaagttattaaatgcaattaatactctaccaaaaggtgtggttcctcacattaagaagttcttacaagaagatttttccttccaaactatgcagagagaagttgcagctaacagccagaatggtgaggaaattgttcctgctttgactttacgtttcttgattacacagctagaagcagcacttaggaacattcaagctggcaattataccgcacaccagattaatattggttattatttgacattactgtttttatatggagtagcactcactgaaagaggaaagaaagaggattatacagaagctgagaataaatttctggtgatgaagatgatgatccaagaaaatgaaatttgtgaaaactttatgtctttagtttattttggacgtggtttactgcgatgtgctcaaaagagatataatggaggactgctagaatttcataaaagcttacaagaaattggagacaaaaatgaccattggtttgacatagatcctacagaagatgaagatttacctacaacttttaaagatcttcttaataattttatcaagacaactgaaagcaatataatgaagcagacgatttgtagttacctagattgtgaacgatcttgtgaagctgacattttgaagaacaccagttataagggattttttcagttaatgtgcagtaaaagttgctgtgtttatttccataaaatttgctggaaaaagttcaagaatttaaagtatccaggtgaaaatgatcagagttttagtgggaaaaaatgtttgaaggaaggatgtacaggtgacatggtaaggatgctgcaatgtgatgtacctggaattgttaaaattttgtttgaagttgtgagaaaggatgaatatatcaccattgaaaatttaggagcaagttatagaaagttgatatctctgaaaataactgatactgatataagaccgaagatcagtttaaaatttaatacaaaagatgaaatgcctatcttcaagcttgattataattatttctatcatctgcttcatataattattatttctggtactgacattgttcgacaaatatttgatgaggctatgccacctcctcttttgaaaaaagagcttcttatacacaagaatgtgctggaatcctactacaaccatctttggaccaatcatcctttgggtggatcatggcatctgctttatcctcctaacaaggagttaccgcaatccaaacagtttgacttatgcctcctgttagctcttataaaacatttaaatgtgttccctgcacccaaaaaaggatggaatatggaaccgccatcttctgacatctctaaatctgcagacatcctgagactgtgcaaatacagggatatcctccttagtgagattttgatgaatggtctcactgagtcacagttcaattcaatttggaaaaaagtttcagatattcttctgcgccttgggatgatgcaagaggatattgacaaagtgaaggagaatcccattgagaatatctcccttgattaccatcagctatctgtctacctaggcataccagtaccagaaatcatacagaggatgttatcctgctatcaacaaggaattgctctacagtcaataacaggcagtcagcgtattgaaatagaagagttacagaatgaggaagaagaactaagtccacctctcatggagtacaatataaatgtgaaatcacaccctgagatacagtttgcagaaattaataaagatgggacctcaatacccagtgaatcttcaacagaatctcttaaagatctccaggaa

SEQ ID NO: 124942 - DNA, 5164 bp, Homo sapiens
  Payload ID: 4534
  Gene Symbol: DZIP3
  Gene Name: DAZ interacting zinc finger protein 3
  Uniprot ID: Q86Y13
  ENST ID: ENST00000495008
  CDS Start-End: 208-1119
gagaagggggattcctcactcagctgtgcgctctgatttcgtgcgcttcctcgtccttcatgttggatggccagtttttcgtttgtgcgtcatcctctacctgagaaatggtcgcttgcccctagtctagacacgcattaaagggcagtatttaaagtcagttggcaagcagtggaataagatttttgtaaagaaaccttgtgcagcatggattctctaccagatgaattttttgtgaggcatcctgctgtggaggatcagaggaaggaagaaactgagaataagctagaaaaatcatctggtcaactgaacaaacaggaaaatgacatacctactgatcttgtccctgttaacctactattagaagtgaagaagttattaaatgcaattaatactctaccaaaaggtgtggttcctcacattaagaagttcttacaagaagatttttccttccaaactatgcagagagaagttgcagctaacagccagaatggtgaggaaattgttcctgctttgactttacgtttcttgattacacagctagaagcagcacttaggaacattcaagctggcaattataccgcacaccagattaatattggttattatttgacattactgtttttatatggagtagcactcactgaaagaggaaagaaagaggattatacagaagctgagaataaatttctggtgatgaagatgatgatccaagaaaatgaaatttgtgaaaactttatgtctttagtttattttggacgtggtttactgcgatgtgctcaaaagagatataatggaggactgctagaatttcataaaagcttacaagaaattggagacaaaaatgaccattggtttgacatagatcctacagaagatgaagatttacctacaacttttaaagatcttcttaataattttatcaagacaactgaaagcaatataatgaagcagacgatttgtagttacctagattgtgaacgatcttgtgaagctgacattttgaagaacaccagttataagggattttttcagttaatgtgcagtaaaagttgctgtgtttatttccataaaatttgctggaaaaagttcaagaatttaaagtatccagagttttagtgggaaaaaatgtttgaaggaaggatgtacaggtgacatggtaaggatgctgcaatgtgatgtacctggaattgttaaaattttgtttgaagttgtgagaaaggatgaatatatcaccattgaaaatttaggagcaagttatagaaagttgatatctctgaaaataactgatactgatataagaccgaagatcagtttaaaatttaatacaaaagatgaaatgcctatcttcaagcttgattataattatttctatcatctgcttcatataattattatttctggtactgacattgttcgacaaatatttgatgaggctatgccacctcctcttttgaaaaaagagcttcttatacacaagaatgtgctggaatcctactacaaccatctttggaccaatcatcctttgggtggatcatggcatctgctttatcctcctaacaaggagttaccgcaatccaaacagtttgacttatgcctcctgttagctcttataaaacatttaaatgtgttccctgcacccaaaaaaggatggaatatggaaccgccatcttctgacatctctaaatctgcagacatcctgagactgtgcaaatacagggatatcctccttagtgagattttgatgaatggtctcactgagtcacagttcaattcaatttggaaaaaagtttcagatattcttctgcgccttgggatgatgcaagaggatattgacaaagtgaaggagaatcccattgagaatatctcccttgattaccatcagctatctgtctacctaggcataccagtaccagaaatcatacagaggatgttatcctgctatcaacaaggaattgctctacagtcaataacaggcagtcagcgtattgaaatagaagagttacagaatgaggaagaagaactaagtccacctctcatggagtacaatataaatgtgaaatcacaccctgagatacagtttgcagaaattaataaagatgggacctcaatacccagtgaatcttcaacagaatctcttaaagatctccaggaagtataagctctcattaatatttgagttagaagaacttattctgggcctttaatttgttgcatgtgctgtacttaaagcatcccagataattttagcttatattttcatagtgtttatacagagcttgaattggaatggtcctttccttccttgcctcagtacttccttccataatctttcctgccataaccatttattttgccaccatttcttaaacacttatgtggcaggcattatgctagactgtaatatgtttttttaatcccagttgaagtggatgtgggaaggtattagaaagtagaagaaagtatagtctaaaatagagaggaaagaaaggaagagaaaagtgggatatttcaaaaccatttgcgcagaggtagaatgaaattcgtccagaatggaatctccgtatttctttacaaataagtggtaacagttattatatagtcactaaattatccttagatctttcatcttataggcatgaatatgttgctttttaaaaagtgtcttcctcctttgttacatccatgtgtgtaagtgagcatctgtgaacttttatcagtaacctacttattgacattatgtgttgttcctttattcatcagtgattatttaaggacagaagactaggattaaaataaaaatgataaaaacaaaaataattgtttccatagaatctagaaagaaatacctataatattagaaaacaaaagatctcagtggtgagaggaaatatattttgcaaaataacccattgggcaatttgaattacatatttaataaataattttttacctactaggttaagagtaaacaaaggaaaaagaagaagactaagaataaaaagaataaagactcaaaagaagaccaagtcccatatgtggtagaaaaggaagagcagttgaggaaagaacaagcaaatccacactcagtcagtagacttataaaagatgatgcaagtgatgttcaagaggattctgcaatggaagacaagttctatagcctggatgaattgcatattctggacatgatagagcagggctcagctggcaaagtaactacagactatggagaaactgaaaaggaaaggcttgctcgtcaaaggcagctttataaattgcactatcagtgtgaagatttcaaaagacagttgagaacagtgacttttcggtggcaagaaaaccaaatgcagattaaaaagaaagacaaaattatcgcatctcttaatcaacaagttgcttttggaatcaataaggtttccaaattacagcgtcaaatccatgctaaagataatgaaatcaagaaccttaaagagcaactttctatgaaaagatctcagtgggaaatggaaaaacataatctggaaagcacaatgaaaacatacgtaagcaaactgaacgcagaaactagcagagctttaacagccgaggtgtatttcttacagtgtcgtagggattttggtttgcttcatctagagcagactgaaaaggaatgtctcaatcagcttgccagggtgactcacatggcagcaagcaacctagaatcacttcaattaaaggctgcggtagacagttggaatgccattgtggcagatgttagaaacaagattgcattcctcaggacacagtacaatgaacaaataaacaaagtcaagcaaggatttgccttgagtaccttgcctccagtccagcttcctcctccaccacccagtcctgagatactgatgcagcagttcttaggaagacctcttgtgaaagaatctttctttagacccatacttactgttcctcaaatgcctgcagtttgcccgggagtcgtctctgcaactggccaacctagagcccccctgaaaggaacttacagatttcttacggaaattgaaggatgcttatggaaaatccttgtctgaactgacatttgatgaaattgtttgcaagatttcccagtttattgaccccaaaaagtctcagagtcaaggaaaatcagtgtcaaatgttaattgtgtttcacctagtcattctccatcacagcctgatgctgcccagcccccaaaaccagcctggaggccactcacttcacagggtcctgccacatgggaaggagccagtaatccagatgaggaagaggaagaagaagagccttgtgtgatctgtcatgagaatctgtctccagaaaatctttcagttttgccttgcgctcacaaattccatgctcagtgcattagaccatggttgatgcaacaggggacatgtccaacgtgcagactccacgttttgctaccagaagaattccctggtcaccccagccggcagttgcccaagatctgatacaaggtacccatgaagagattatgaactacttgaaggtggagactgtacggtggtgtgttggagctggcttgtaatgtcttatgagtgacaatcgttagtttgaggaattttgtgagacagttgtcaaattgttgctagcttgaaatctgcggcaattggagtatttacaccatagaaatgctataagtgaagacctacctttcccttaagagctagttgttaaacctttaccagcataccactggaccttgtctaaaatttctttgtgttcccagtgtcttgcccagtagatacaagataaatattgccagaatcagatatcaggaagtagtaagaaaaggagttaatatgcaaactaaatcactcgctcaattgaataattgagatcttctgttcatttgttccttggaccttaatcatttgcattttggagaaaattttttctgctttaaaagtctgtaatttcagtttttgtgtcggggagagggaaaaactatttgtctgtagttgctttttgtgacaaagtgaatacccactgggctaagtttcatatctaaagcttgtcactaagaattttcatttttaggggtcaaaaacctattttgaaaatagtgttgtgtgaatgctgtaagtgttgtacatgtctctggtttcagaattaaaagaattcagagtt

SEQ ID NO: 124943 - DNA, 4246 bp, Homo sapiens
  Payload ID: 4534
  Gene Symbol: DZIP3
  Gene Name: DAZ interacting zinc finger protein 3
  Uniprot ID: Q86Y13
  ENST ID: ENST00000463306
  CDS Start-End: 130-3756
gatgagattgatgattctttctcctggaaaacctttcatcacagagattcatctcagcattaaagggcagtatttaaagtcagttggcaagcagtggaataagatttttgtaaagaaaccttgtgcagcatggattctctaccagatgaattttttgtgaggcatcctgctgtggaggatcagaggaaggaagaaactgagaataagctagaaaaatcatctggtcaactgaacaaacaggaaaatgacatacctactgatcttgtccctgttaacctactattagaagtgaagaagttattaaatgcaattaatactctaccaaaaggtgtggttcctcacattaagaagttcttacaagaagatttttccttccaaactatgcagagagaagttgcagctaacagccagaatggtgaggaaattgttcctgctttgactttacgtttcttgattacacagctagaagcagcacttaggaacattcaagctggcaattataccgcacaccagattaatattggttattatttgacattactgtttttatatggagtagcactcactgaaagaggaaagaaagaggattatacagaagctgagaataaatttctggtgatgaagatgatgatccaagaaaatgaaatttgtgaaaactttatgtctttagtttattttggacgtggtttactgcgatgtgctcaaaagagatataatggaggactgctagaatttcataaaagcttacaagaaattggagacaaaaatgaccattggtttgacatagatcctacagaagatgaagatttacctacaacttttaaagatcttcttaataattttatcaagacaactgaaagcaatataatgaagcagacgatttgtagttacctagattgtgaacgatcttgtgaagctgacattttgaagaacaccagttataagggattttttcagttaatgtgcagtaaaagttgctgtgtttatttccataaaatttgctggaaaaagttcaagaatttaaagtatccaggtgaaaatgatcagagttttagtgggaaaaaatgtttgaaggaaggatgtacaggtgacatggtaaggatgctgcaatgtgatgtacctggaattgttaaaattttgtttgaagttgtgagaaaggatgaatatatcaccattgaaaatttaggagcaagttatagaaagttgatatctctgaaaataactgatactgatataagaccgaagatcagtttaaaatttaatacaaaagatgaaatgcctatcttcaagcttgattataattatttctatcatctgcttcatataattattatttctggtactgacattgttcgacaaatatttgatgaggctatgccacctcctcttttgaaaaaagagcttcttatacacaagaatgtgctggaatcctactacaaccatctttggaccaatcatcctttgggtggatcatggcatctgctttatcctcctaacaaggagttaccgcaatccaaacagtttgacttatgcctcctgttagctcttataaaacatttaaatgtgttccctgcacccaaaaaaggatggaatatggaaccgccatcttctgacatctctaaatctgcagacatcctgagactgtgcaaatacagggatatcctccttagtgagattttgatgaatggtctcactgagtcacagttcaattcaatttggaaaaaagtttcagatattcttctgcgccttgggatgatgcaagaggatattgacaaagtgaaggagaatcccattgagaatatctcccttgattaccatcagctatctgtctacctaggcataccagtaccagaaatcatacagaggatgttatcctgctatcaacaaggaattgctctacagtcaataacaggcagtcagcgtattgaaatagaagagttacagaatgaggaagaagaactaagtccacctctcatggagtacaatataaatgtgaaatcacaccctgagatacagtttgcagaaattaataaagatgggacctcaatacccagtgaatcttcaacagaatctcttaaagatctccaggaagttaagagtaaacaaaggaaaaagaagaagactaagaataaaaagaataaagactcaaaagaagaccaagtcccatatgtggtagaaaaggaagagcagttgaggaaagaacaagcaaatccacactcagtcagtagacttataaaagatgatgcaagtgatgttcaagaggattctgcaatggaagacaagttctatagcctggatgaattgcatattctggacatgatagagcagggctcagctggcaaagtaactacagactatggagaaactgaaaaggaaaggcttgctcgtcaaaggcagctttataaattgcactatcagtgtgaagatttcaaaagacagttgagaacagtgacttttcggtggcaagaaaaccaaatgcagattaaaaagaaagacaaaattatcgcatctcttaatcaacaagttgcttttggaatcaataaggtttccaaattacagcgtcaaatccatgctaaagataatgaaatcaagaaccttaaagagcaactttctatgaaaagatctcagtgggaaatggaaaaacataatctggaaagcacaatgaaaacatacgtaagcaaactgaacgcagaaactagcagagctttaacagccgaggtgtatttcttacagtgtcgtagggattttggtttgcttcatctagagcagactgaaaaggaatgtctcaatcagcttgccagggtgactcacatggcagcaagcaacctagaatcacttcaattaaaggctgcggtagacagttggaatgccattgtggcagatgttagaaacaagattgcattcctcaggacacagtacaatgaacaaataaacaaagtcaagcaaggatttgccttgagtaccttgcctccagtccagcttcctcctccaccacccagtcctgagatactgatgcagcagttcttaggaagacctcttgtgaaagaatctttctttagacccatacttactgttcctcaaatgcctgcagtttgcccgggagtcgtctctgcaactggccaacctagagcccccctgatgactggcatagcctgggctctgccagcgcctgtgggagacgctgtgcctcccagtgcaggtctgcggagtgatccctccatcatgaattgggagagaattacagacaggctgaaaactgcctttccacagcaaaccagaaaggaacttacagatttcttacggaaattgaaggatgcttatggaaaatccttgtctgaactgacatttgatgaaattgtttgcaagatttcccagtttattgaccccaaaaagtctcagagtcaaggaaaatcagtgtcaaatgttaattgtgtttcacctagtcattctccatcacagcctgatgctgcccagcccccaaaaccagcctggaggccactcacttcacagggtcctgccacatgggaaggagccagtaatccagatgaggaagaggaagaagaagagccttgtgtgatctgtcatgagaatctgtctccagaaaatctttcagttttgccttgcgctcacaaattccatgctcagtgcattagaccatggttgatgcaacaggggacatgtccaacgtgcagactccacgttttgctaccagaagaattccctggtcaccccagccggcagttgcccaagatctgatacaaggtcggggtgtctatgcaaaggaagctcagttttcttttattatgagctgcttgtttgagtggtgtaaaactatgtgctcttcaatatagtgctaaagaagccagctaattttatcaaagcagcagccaaagaagtcaggacaaatcttcaggacttgtgaaatgaactgaaagagcttgaagcagatggaattttaatagttacactatatatgctcttagtaggtttttttcttgtagtggaaacataactgttagcatatttcttaggatgttttttcttgtctttttaaattcttatttcactcatcctttactctcccctcaagtattctacactttaatttcctgaaataaatttaaggaaaagggaaatagtaaagaagtaggaatgggtgcagcacaccagcatggcacatgaatacacatgtaactaacctgcacattgtgcacatgtaccctaaaacttaaagtataataataat

SEQ ID NO: 124944 - DNA, 705 bp, Homo sapiens
  Payload ID: 4534
  Gene Symbol: DZIP3
  Gene Name: DAZ interacting zinc finger protein 3
  ENST ID: ENST00000486815
  CDS Start-End: 327-705
gctctgatttcgtgcgcttcctcgtccttcatgttggatggccagtttttcgtttgtgcgtcatcctctacctgagaaatggtcgcttgcccctagtctagacacggcatcctgctgtggaggatcagaggaaggaagaaactgagaataagctagaaaaatcatctggtcaactgaacaaacaggaaaatgacatacctactgatcttgtccctgttaacctactattagaagtgaagaagttattaaatgcaattaatactctaccaaaaggtgtggttcctcacattaagaagttcttacaagaagatttttccttccaaactatgcagagagaagttgcagctaacagccagaatggtgaggaaattgttcctgctttgactttacgtttcttgattacacagctagaagcagcacttaggaacattcaagctggcaattataccgcacaccagattaatattggttattatttgacattactgtttttatatggagtagcactcactgaaagaggaaagaaagaggattatacagaagctgagaataaatttctggtgatgaagatgatgatccaagaaaatgaaatttgtgaaaactttatgtctttagtttattttggacgtggtttactgcgatgtgctcaaaagagatataatggaggactgctagaatttcataaaagcttacaagaaattggag

SEQ ID NO: 124945 - DNA, 3907 bp, Homo sapiens
  Payload ID: 4535
  Gene Symbol: DBF4
  Gene Name: DBF4 zinc finger
  Uniprot ID: Q9UBU7
  ENST ID: ENST00000265728
  CDS Start-End: 505-2529
ctctctgaggctgcgccaagacctgaagcggcggaccgagagcccgggtctgagactgagagagcaacggaatggaggcggggtagaggcggaaacacaacctgcagggccagagcgaggcgcgagaaggacggcggcgtgagggggcggggcgcgcagcgcgagaaggcaggcacgaggggcgagcgcgaggcggggcacggcgcgtggcgtgagacggggcggggcgcgcgtatcggcgccgcggccgcgtgacgcgttttcaaatcttcaaccgccgcagcccactcgtttgtgctttgcgccttcctcctccgcgccttggagccggatccggccccggaaacccgacctgcagacgcggtacctctactgcgtagaggccgtagctggcggaaggagagaggcggccgtcctgtcaacaggccgggggaagccgtgctttcgcggctgcccggtgcgacactttctccggacccagcatgtaggtgccgggcgactgccatgaactccggagccatgaggatccacagtaaaggacatttccagggtggaatccaagtcaaaaatgaaaaaaacagaccatctctgaaatctctgaaaactgataacaggccagaaaaatccaaatgtaagccactttggggaaaagtattttaccttgacttaccttctgtcaccatatctgaaaaacttcaaaaggacattaaggatctgggagggcgagttgaagaatttctcagcaaagatatcagttatcttatttcaaataagaaggaagctaaatttgcacaaaccttgggtcgaatttctcctgtaccaagtccagaatctgcatatactgcagaaaccacttcacctcatcccagccatgatggaagttcatttaagtcaccagacacagtgtgtttaagcagaggaaaattattagttgaaaaagctatcaaggaccatgattttattccttcaaatagtatattatcaaatgccttgtcatggggagtaaaaattcttcatattgatgacattagatactacattgaacaaaagaaaaaagagttgtatttactcaagaaatcaagtacttcagtaagagatgggggcaaaagagttggtagtggtgcacaaaaaacaagaacaggaagactcaaaaagccttttgtaaaggtggaagatatgagccaactttataggccattttatcttcagctgaccaatatgccttttataaattattctattcagaagccctgcagtccatttgatgtagacaagccatctagtatgcaaaagcaaactcaggttaaactaagaatccaaacagatggcgataagtatggtggaacctcaattcaactccagttgaaagagaagaagaaaaaaggatattgtgaatgttgcttgcagaaatatgaagatctagaaactcaccttctaagtgagcaacacagaaactttgcacagagtaaccagtatcaagttgttgatgatattgtatctaagttagtttttgactttgtggaatatgaaaaggacacacctaaaaagaaaagaataaaatacagtgttggatccctttctcctgtttctgcaagtgtcctgaaaaagactgaacaaaaggaaaaagtggaattgcaacatatttctcagaaagattgccaggaagatgatacaacagtgaaggagcagaatttcctgtataaagagacccaggaaactgaaaaaaagctcctgtttatttcagagcccatcccccacccttcaaatgaattgagagggcttaatgagaaaatgagtaataaatgttccatgttaagtacagctgaagatgacataagacagaattttacacagctacctctacataaaaacaaacaggaatgcattcttgacatttccgaacacacattaagtgaaaatgacttagaagaactaagggtagatcactataaatgtaacatacaggcatctgtacatgtttctgatttcagtacagataatagtggatctcaaccaaaacagaagtcagatactgtgctttttccagcaaaggatctcaaggaaaaggaccttcattcaatatttactcatgattctggtctgataacaataaacagttcacaagagcacctaactgttcaggcaaaggctccattccatactcctcctgaggaacccaatgaatgtgacttcaagaatatggatagtttaccttctggtaaaatacatcgaaaagtgaaaataatattaggacgaaatagaaaagaaaatctggaaccaaatgctgaatttgataaaagaactgaatttattacacaagaagaaaacagaatttgtagttcaccggtacagtctttactagacttgtttcagactagtgaagagaaatcagaatttttgggtttcacaagctacacagaaaagagtggtatatgcaatgttttagatatttgggaagaggaaaattcagataatctgttaacagcgtttttctcgtccccttcaacttctacatttactggcttttagaatttaaaaaatgcatacttttcagaagtgataaggatcatattcttgaaatttttataaatatgtatggaaattcttaggatttttttaccagctttgtttacagacccaaatgtaaatattaaaaataaatatttgcaattttctacagaattgaatacctgttaaagaaaaattacagaataaacttgtgactggtcttgttttacattatatatatgttcgtaattgtttcctgagaattacaatgaataataatttgctttgtcactgaaaaccaccagtgaagtgcaatttggggaatatcaaacttagcattatacatttggatattctagttgtattgtaaattttaaaagattatcaggataacatgaccttgccttgaaaaacctaaatttcatacagaaaggaaaaatacatttctatgcttgaattctggaaatcatcagaaatattgacacttgagggtcactggtggaccatgctagtattttggtgctgagtaattagattatgtataggggtaactggaagccatgaaggaaggacttaaccaggctaccaagtggaatataatttatctgctatttttaattacttaccttgtaaataactttaataatattcaaaagttgactctcctgtggctcatgccacaggatcccagcactttgggaggccgaggcaggctgatcacgaggtcagaagatcaagaccatcctggccaacatggtgaaaccttgtctactaaaaatacaaaaaattagctgggcatggcggcatgcgcctgtagtcccagctactccctccagaggctgagaattgcttgaacctgggaagtgcaggttgcagtgagccaagattgtgccactgtattccagactgggtgacagagtgagactccatctcaaaaaaaaaaaagttgactctaccccctaatttggtaggagatgaaggagaaaaggatggcattgaattatagatacagttttgggatatatacaaggattgccttgatctggcacttactgatacaagcatttggagaagagaaaattcaaatataagaaatttcaatttgaatctgtggatataaggcatttgcctttgagtatgttcttgtaggagtaagactaccaccagtgacattcaattggttctattgcatagtacatgaatctattgtcactaaaaattaggttactaatcttaatttttttgaaatatatgattctcagtacaggactaattcatatgcttttcctgcatacattattttgatcatttggataacatcaatgaacactggctttttaacacctttgtttttcataccagtacctgaagtaggctcaataaaagagtctttacagtg

SEQ ID NO: 124946 - DNA, 1274 bp, Homo sapiens
  Payload ID: 4535
  Gene Symbol: DBF4
  Gene Name: DBF4 zinc finger
  ENST ID: ENST00000430279
  CDS Start-End: 134-787
actgcgtagaggccgtagctggcggaaggagagaggcggccgtcctgtcaacaggccgggggaagccgtgctttcgcggctgcccggtgcgacactttctccggacccagcatgtaggtgccgggcgactgccatgaactccggagccatgaggatccacagtaaaggacatttccagggtggaatccaagtcaaaaatgaaaaaaacagaccatctctgaaatctctgaaaactgataacaggccagaaaaatccaaatgtaagccactttggggaaaagtattttaccttgacttaccttctgtcaccatatctgaaaaacttcaaaaggacattaaggatctgggagggcgagttgaagaatttctcagcaaagatatcagttatcttatttcaaataagaaggaagctaaatttgcacaaaccttgggtcgaatttctcctgtaccaagtccagaatctgcatatactgcagaaaccacttcacctcatcccagccatgatggaagttcatttaagtcaccagacacagtgtgtttaagcagaggaaaattattagttgaaaaagctatcaaggaccatgattttattccttcaaatagtatattatcaaatgccttgtcatggggagtaaaaattcttcatattgatgacattagatactacattgaacaaaagaaaaaagagttgtatttactcaagaaatcaagtacttcagtaagagatgggggcaaaagagttggtagtggtgcacaaaaaacaagaaaagccctgcagtccatttgatgtagacaagccatctagtatgcaaaagcaaactcaggttaaactaagaatccaaacagatggcgataagtatggtggaacctcaattcaactccagttgaaagagaagaagaaaaaaggatattgtgaatgttgcttgcagaaatatgaagatctagaaactcaccttctaagtgagcaacacagaaactttgcacagagtaaccagtatcaagttgttgatgatattgtatctaagttagtttttgactttgtggaatatgaaaaggacacacctaaaaagaaaagaataaaatacagtgttggatccctttctcctgtttctgcaagtgtcctgaaaaagactgaacaaaaggaaaaagtggaattgcaacatatttctcagaaagattgccaggaagatgatacaacagtgaaggagcagaatttcctgtataaagagacccaggaaactgaaaaaaagctcctgtttatttcagagcccatc

SEQ ID NO: 124947 - DNA, 2342 bp, Homo sapiens
  Payload ID: 4535
  Gene Symbol: DBF4
  Gene Name: DBF4 zinc finger
  ENST ID: ENST00000431138
  CDS Start-End: 200-334
cttcctcctccgcgccttggagccggatccggccccggaaacccgacctgcagacgcggtacctctactgcgtagaggccgtagctggcggaaggagagaggcggccgtcctgtcaacaggccgggggaagccgtgctttcgcggctgcccggtgcgacactttctccggacccagcatgtaggtgccgggcgactgccatgaactccggagccatgaggatccacagtaaaggacatttccagggtggaatccaagtcaaaaatgaaaaaaacagaccatctctgaaatctctgaaaactgataacaggccagaaaaatccaaatcgagttgaagaatttctcagcaaagatatcagttatcttatttcaaataagaaggaagctaaatttgcacaaaccttgggtcgaatttctcctgtaccaagtccagaatctgcatatactgcagaaaccacttcacctcatcccagccatgatggaagttcatttaagtcaccagacacagtgtgtttaagcagaggaaaattattagttgaaaaagctatcaaggaccatgattttattccttcaaatagtatattatcaaatgccttgtcatggggagtaaaaattcttcatattgatgacattagatactacattgaacaaaagaaaaaagagttgtatttactcaagaaatcaagtacttcagtaagagatgggggcaaaagagttggtagtggtgcacaaaaaacaagaacaggaagactcaaaaagccttttgtaaaggtggaagatatgagccaactttataggccattttatcttcagctgaccaatatgccttttataaattattctattcagaagccctgcagtccatttgatgtagacaagccatctagtatgcaaaagcaaactcaggttaaactaagaatccaaacagatggcgataagtatggtggaacctcaattcaactccagttgaaagagaagaagaaaaaaggatattgtgaatgttgcttgcagaaatatgaagatctagaaactcaccttctaagtgagcaacacagaaactttgcacagagtaaccagtatcaagttgttgatgatattgtatctaagttagtttttgactttgtggaatatgaaaaggacacacctaaaaagaaaagaataaaatacagtgttggatccctttctcctgtttctgcaagtgtcctgaaaaagactgaacaaaaggaaaaagtggaattgcaacatatttctcagaaagattgccaggaagatgatacaacagtgaaggagcagaatttcctgtataaagagacccaggaaactgaaaaaaagctcctgtttatttcagagcccatcccccacccttcaaatgaattgagagggcttaatgagaaaatgagtaataaatgttccatgttaagtacagctgaagatgacataagacagaattttacacagctacctctacataaaaacaaacaggaatgcattcttgacatttccgaacacacattaagtgaaaatgacttagaagaactaagggtagatcactataaatgtaacatacaggcatctgtacatgtttctgatttcagtacagataatagtggatctcaaccaaaacagaagtcagatactgtgctttttccagcaaaggatctcaaggaaaaggaccttcattcaatatttactcatgattctggtctgataacaataaacagttcacaagagcacctaactgttcaggcaaaggctccattccatactcctcctgaggaacccaatgaatgtgacttcaagaatatggatagtttaccttctggtaaaatacatcgaaaagtgaaaataatattaggacgaaatagaaaagaaaatctggaaccaaatgctgaatttgataaaagaactgaatttattacacaagaagaaaacagaatttgtagttcaccggtacagtctttactagacttgtttcagactagtgaagagaaatcagaatttttgggtttcacaagctacacagaaaagagtggtatatgcaatgttttagatatttgggaagaggaaaattcagataatctgttaacagcgtttttctcgtccccttcaacttctacatttactggcttttagaatttaaaaaatgcatacttttcagaagtgataaggatcatattcttgaaatttttataaatatgtatggaaattcttaggatttttttaccagctttgtttacagacccaaatgtaaatattaaaaataaatatttgcaattttctacagaattgaatacctgttaaagaaaaattacagaataaacttgtgactggtcttgttttaca

SEQ ID NO: 124948 - DNA, 2694 bp, Homo sapiens
  Payload ID: 4535
  Gene Symbol: DBF4
  Gene Name: DBF4 zinc finger
  Uniprot ID: Q9UBU7
  ENST ID: ENST00000413643
  CDS Start-End: 518-1222
agagccgcgccaactctctgaggctgcgccaagacctgaagcggcggaccgagagcccgggtctgagactgagagagcaacggaatggaggcggggtagaggcggaaacacaacctgcagggccagagcgaggcgcgagaaggacggcggcgtgagggggcggggcgcgcagcgcgagaaggcaggcacgaggggcgagcgcgaggcggggcacggcgcgtggcgtgagacggggcggggcgcgcgtatcggcgccgcggccgcgtgacgcgttttcaaatcttcaaccgccgcagcccactcgtttgtgctttgcgccttcctcctccgcgccttggagccggatccggccccggaaacccgacctgcagacgcggtacctctactgcgtagaggccgtagctggcggaaggagagaggcggccgtcctgtcaacaggccgggggaagccgtgctttcgcggctgcccggtgcgacactttctccggacccagcatgtaggtgccgggcgactgccatgaactccggagccatgaggatccacagtaaaggacatttccagggtggaatccaagtcaaaaatgaaaaaaacagaccatctctgaaatctctgaaaactgataacaggccagaaaaatccaaatgtaagccactttggggaaaagtattttaccttgacttaccttctgtcaccatatctgaaaaacttcaaaaggacattaaggatctgggagggcgagttgaagaatttctcagcaaagatatcagttatcttatttcaaataagaaggaagctaaatttgcacaaaccttgggtcgaatttctcctgtaccaagtccagaatctgcatatactgcagaaaccacttcacctcatcccagccatgatggaagttcatttaagtcaccagacacagtgtgtttaagcagaggaaaattattagttgaaaaagctatcaaggaccatgattttattccttcaaatagtatattatcaaatgccttgtcatggggagtaaaaattcttcatattgatgacattagatactacattgaacaaaagaaaaaagagttgtatttactcaagaaatcaagtacttcagtaagagatgggggcaaaagagttggtagtggtgcacaaaaaacaagaacaggaagactcaaaaagccttttgtaaaggtggaagatatgagccaaagccctgcagtccatttgatgtagacaagccatctagtatgcaaaagcaaactcaggttaaactaagaatccaaacagatggcgataagtatggtggaacctcaattcaactccagttgaaagagaagaagaaaaaaggatattgtgaatgttgcttgcagaaatatgaagatctagaaactcaccttctaagtgagcaacacagaaactttgcacagagtaaccagtatcaagttgttgatgatattgtatctaagttagtttttgactttgtggaatatgaaaaggacacacctaaaaagaaaagaataaaatacagtgttggatccctttctcctgtttctgcaagtgtcctgaaaaagactgaacaaaaggaaaaagtggaattgcaacatatttctcagaaagattgccaggaagatgatacaacagtgaaggagcagaatttcctgtataaagagacccaggaaactgaaaaaaagctcctgtttatttcagagcccatcccccacccttcaaatgaattgagagggcttaatgagaaaatgagtaataaatgttccatgttaagtacagctgaagatgacataagacagaattttacacagctacctctacataaaaacaaacaggaatgcattcttgacatttccgaacacacattaagtgaaaatgacttagaagaactaagggtagatcactataaatgtaacatacaggcatctgtacatgtttctgatttcagtacagataatagtggatctcaaccaaaacagaagtcagatactgtgctttttccagcaaaggatctcaaggaaaaggaccttcattcaatatttactcatgattctggtctgataacaataaacagttcacaagagcacctaactgttcaggcaaaggctccattccatactcctcctgaggaacccaatgaatgtgacttcaagaatatggatagtttaccttctggtaaaatacatcgaaaagtgaaaataatattaggacgaaatagaaaagaaaatctggaaccaaatgctgaatttgataaaagaactgaatttattacacaagaagaaaacagaatttgtagttcaccggtacagtctttactagacttgtttcagactagtgaagagaaatcagaatttttgggtttcacaagctacacagaaaagagtggtatatgcaatgttttagatatttgggaagaggaaaattcagataatctgttaacagcgtttttctcgtccccttcaacttctacatttactggcttttagaatttaaaaaatgcatacttttcagaagtgataaggatcatattcttgaaatttttataaatatgtatggaaattcttaggatttttttaccagctttgtttacagacccaaatgtaaatattaaaaataaatatttgcaattttctacagaattgaatacctgttaaagaaaaattacagaataaacttgtgactggtcttgttttacatta

SEQ ID NO: 124949 - DNA, 2997 bp, Homo sapiens
  Payload ID: 4536
  Gene Symbol: DBF4B
  Gene Name: DBF4 zinc finger B
  Uniprot ID: Q8NFT6
  ENST ID: ENST00000315005
  CDS Start-End: 139-1986
aaaacgccaagagattgatgctgtagctgccctgagataaccaggactgtggaatcgggaagagctcatggagctcgcgaatgtaatacggaggcctctgaggaaggagtacggaggccgagaaggagccggcatttgatgagcgaaccgggaaagggagacgattgcctcgagctggagagttccatggctgagagtaggctccgggccccggacctaggagtttccaggtgtctaggaaaatgccagaagaactcaccaggtgccaggaagcatcccttttccggaaagtccttttacttggatctgcctgctggcaagaatctccagtttttgacgggggccattcagcaactgggtggggtaattgagggttttctgagcaaagaagtaagttacatcgtgtccagccgcagagaagtaaaggcagagagcagtgggaaaagccatagaggctgccctagccctagccccagtgaggtcagagtggaaacatcggccatggttgatccaaaaggcagccaccccaggccttcacggaaacccgttgactcggtgcctctaagcagagggaaggagctgctgcagaaggctatcagaaaccaggggagcatcagtggaggaggcagtgggggcagcagcagcctcctgaccaatgcccgctcttggggagtgaggattctgcacgtggatgaaatgatgatgcacgtgcaacagctgtctcttgcgtctttatgtgtgaaaaaacaacagccaaagaagccagagggaacatgtccagcagcagagtcaagaacacggaaagtggccagactgaaggccccgttcctcaaaatcgaagatgaaagcaggaagtttcgtcctttccatcatcagtttaaatcctttcctgaaatttcttttcttggacccaaagatgcaagtccctttgaggccccgacgaccctgggcagcatgcaccataccagagaatccaaggatggagagccaagcccacgatcagctgcccacaccatgcccaggaggaagaaaggctactgcgagtgctgtcaggaggccttcgaggagctccatgtgcatcttcagagtgcccagcaccggagctttgccctggaagcccatctatatgcagaagtggacaggatcattgctcagctcagccacagctttgcagacatccctttccaggctggcctccccaggtggtcaggttccccagcttctgattgtgaccctctctgtcctgagactctgcacccccatcagccctcccatcccagggcagcatctcccaggataaggaaagaagacagctgccaggcatcagtgacccaaggcagggctgcgggccagcagcgatggacagaatcactagatggtgtgatgggacctcctgcaagtcacacatgtgtgagtgccacaaccctcctgccggccttgcccaagggctccagggagcagggctgcctctgtccctgcccagcctcctttacccagtctcatctggtcacttccttggctctgctgcctggggagtggtcgcctgcagaggacatgcccctccatccctcccaagaaaactcctttgccccggcggacattcctgttaagggcccactcctcttccctgaagccagaccgtggcttatgtctgcacgctgctgggttcgtccctttccttttgtgacatggggttgcctcattccccatgacaccacccctctgcatgaggaagtttccccttgcccctgtctcagacttggatacctttacctgctgctcacacaaagcctgtggtgccgggttcgggtgccctcattgtcaactgcaggacccattccccgaacctcacatccgtgtacccttgccttcccctcctatctcaatgatcatgaccttggacatctctgccaggccaaaccccaaggctggaacactcctcagccatttctccattgcggcttcctggctgtagactcaggttagaggtgaacccagaacacctgagacttgacccaggatggatgggtgctgcttgatgtgaatgaggtcccgcagtggctccttggcgtgagcactgctcagactcctttccactccagccccctttccacatcgcaccagatgacttttacccagacccagtgggcattgccttatcttgcagtcagtcccttttcaacatgttgccgtttctttctgaagaggtgtcctccctccacaagtcacactgtctgtccctggccctccagcccacctcgccaaccactcttgttggtttccttctcagacttgccacctttcccctctgccccaaaatgccatgctcctctcctggaaaacacttgagttgattcagtaaatcgacttcaaatacttgaaggctcccaccttctgttctctggctccttcctgcggtctatacctaccgcctcctcttcacctccttcccttccacacttccttcctgggtagctctgcctgaagcattccactaagatcatctattccaaggtcatggacaggctactggtgaccaaagttggttccttttctcctttctttcctccttgaagcctggctcccttggtcgcagcagcccctcagtggcctggttctcctgtccccctgcccttcctcaccattgcccattccctcgttcgttcattcagcacaggccttgccgtctgccctgagtcagctccgagacacctgaagagccctccagccctaactactttactcagactaggtccccaggcctttgttcttgcctcttctcgctgagcctttcacttctcggcagatgtgaccgattggtagctccaccccaactcccttctgctgggtggaatgcaggagctagctgcctccaactcactgtgacctcagaaaaatgcctttattactcgggcctcagtttcctcgtctttaagtaaggggcttggatgagatgatttcaggaccctttccaataataaaatactgtgactgcca

SEQ ID NO: 124950 - DNA, 1810 bp, Homo sapiens
  Payload ID: 4536
  Gene Symbol: DBF4B
  Gene Name: DBF4 zinc finger B
  Uniprot ID: Q8NFT6
  ENST ID: ENST00000393547
  CDS Start-End: 214-1509
gtagggcggatctcgcagctacggcgttcttttaggggtggagccggcaggaaatttaaactgaagccgcggccgaaaacgccaagagattgatgctgtagctgccctgagataaccaggactgtggaatcgggaagagctcatggagctcgcgaatgtaatacggaggcctctgaggaaggagtacggaggccgagaaggagccggcatttgatgagcgaaccgggaaagggagacgattgcctcgagctggagagttccatggctgagagtaggctccgggccccggacctaggagtttccaggtgtctaggaaaatgccagaagaactcaccaggtgccaggaagcatcccttttccggaaagtccttttacttggatctgcctgctggcaagaatctccagtttttgacgggggccattcagcaactgggtggggtaattgagggttttctgagcaaagaagtaagttacatcgtgtccagccgcagagaagtaaaggcagagagcagtgggaaaagccatagaggctgccctagccctagccccagtgaggtcagagtggaaacatcggccatggttgatccaaaaggcagccaccccaggccttcacggaaacccgttgactcggtgcctctaagcagagggaaggagctgctgcagaaggctatcagaaaccaggggagcatcagtggaggaggcagtgggggcagcagcagcctcctgaccaatgcccgctcttggggagtgaggattctgcacgtggatgaaatgatgatgcacgtgcaacagctgtctcttgcgtctttatgtgtgaaaaaacaacagccaaagaagccagagggaacatgtccagcagcagagtcaagaacacggaaagtggccagactgaaggccccgttcctcaaaatcgaagatgaaagcaggaagtttcgtcctttccatcatcagtttaaatcctttcctgaaatttcttttcttggacccaaagatgcaagtccctttgaggccccgacgaccctgggcagcatgcaccataccagagaatccaaggatggagagccaagcccacgatcagctgcccacaccatgcccaggaggaagaaaggctactgcgagtgctgtcaggaggccttcgaggagctccatgtgcatcttcagagtgcccagcaccggagctttgccctggaagcccatctatatgcagaagtggacaggatcattgctcagctcagccacagctttgcagacatccctttccaggctggcctccccaggtggtcaggttccccagcttctgattgtgaccctctctgtcctgagactctgcacccccatcagccctcccatcccagggcagcatctcccaggataaggaaagaagacagctgccaggcatcagtgacccaaggcagggctgcgggccagcagcgatggacagaatcactagatggtgtgatgggacctcctgcaagtcacacatgtcacaggccttgccgtctgccctgagtcagctccgagacacctgaagagccctccagccctaactactttactcagactaggtccccaggcctttgttcttgcctcttctcgctgagcctttcacttctcggcagatgtgaccgattggtagctccaccccaactcccttctgctgggtggaatgcaggagctagctgcctccaactcactgtgacctcagaaaaatgcctttattactcgggcctcagtttcctcgtctttaagtaaggggcttggatgagatgatttcaggaccctttccaataataaaatactgtgactgcca

SEQ ID NO: 124951 - DNA, 2998 bp, Homo sapiens
  Payload ID: 4536
  Gene Symbol: DBF4B
  Gene Name: DBF4 zinc finger B
  ENST ID: ENST00000526924
  CDS Start-End: 124-597
tgatgctgtagctgccctgagataaccaggactgtggaatcgggaagagctcatggagctcgcgaatgtaatacggaggcctctgaggaaggagtacggaggccgagaaggagccggcatttgatgagcgaaccgggaaagggagacgattgcctcgagctggagagttccatggctgagagtaggctccgggccccggacctaggagtttccaggtgtctaggaaaatgccagaagaactcaccaggtgccaggaagcatcccttttccggaaagtccttttacttggatctgcctgctggcaagaatctccagtttttgacgggggccattcagcaactgggtggggtaattgagggttttctgagcaaagaagtaagttacatcgtgtccagccgcagagaagtaaaggcagagagcagtgggaaaagccatagaggctgccctagccctagccccagtgaggtcagagtggaaacatcggccatggttgatccaaaaggcagccaccccaggccttcacggaaacccgttgactcggtgcctctaagcagagggaaggagctgctgcagaaggctatcagaaaccagaaatgatgatgcacgtgcaacagctgtctcttgcgtctttatgtgtgaaaaaacaacagccaaagaagccagagggaacatgtccagcagcagagtcaagaacacggaaagtggccagactgaaggccccgttcctcaaaatcgaagatgaaagcaggaagtttcgtcctttccatcatcagtttaaatcctttcctgaaatttcttttcttggacccaaagatgcaagtccctttgaggccccgacgaccctgggcagcatgcaccataccagagaatccaaggatggagagccaagcccacgatcagctgcccacaccatgcccaggaggaagaaaggctactgcgagtgctgtcaggaggccttcgaggagctccatgtgcatcttcagagtgcccagcaccggagctttgccctggaagcccatctatatgcagaagtggacaggatcattgctcagctcagccacagctttgcagacatccctttccaggctggcctccccaggtggtcaggttccccagcttctgattgtgaccctctctgtcctgagactctgcacccccatcagccctcccatcccagggcagcatctcccaggataaggaaagaagacagctgccaggcatcaggtatcccagagcaggatgggacagtggacagcacgcaggcaccagctgaacgtgcagggactggtgaggtacctggacctatagcaagctgccaggacctgggggtgtcagttgatgtgtttgtggaccccccagggataccagtgtccaggagccctgcttgccaatgcctcctgcctagctctggttttatggaactctcctctggcccagacctggcactttttggccacaagcggaaggttcagttccccagtggcagtgctaagaagagagtgggggcctcctggccacaggcttcattttttgtcccaatagcccccaacccctgcggcaccaggacaactagtggcaagcgtcttccctctcttccccttacaggccatgagtccaggctcctcgcctccctccagcccttgtgccactcacagacctgcctctctctcccagaccccttcccctggcagcccacagacagaccagcagagttctgggccacacagccctcctggctggggaaagggtggcccccagggcctgaggattctgagtgtacagccactggccctgtatcccaggaggctggccagctcctcagctgccccacagctccaggctggccatcagctcccctgtactcagctaccagtgtgcagccctcgggagcacctgtagagagcaggtctacctccctcctgcagcccctgccagccagtgcgggagccagctgttcccgatgcctctgggccccccagcctctccaggtgccctgtctccctgtctcccagccctggtcccaaccccagccccagccccagccccatgctggcagagagctgctcctacgagtccccaaggtgcttggctcttcacagggccaggcagctccagattgaagggccacagatacaacttactcctctgctgggtgctgcacacccggccagggctgaccaggacgcaggaggggcagaaccccaggacttccccaaaagagctagaaggaggcccgggcctggcctttgaagtccagcaagcagctgtcacgctcagctccatggagctgacagagccacccctcccactggccaggtctttgggagagaatctgggctgggggctgccctctcctacccctgcctcctgccatgttcctgaccaggcagagtctacagtgggcttgcccagctgaggctggccgcccacgccaggaggcagaggcgaagttggcatggggagggaccacaaaggagctggggcagcaggagtcctggcccggcttcctggccctccacaggcccttgcctctctgcagagccgcgggttagctgttggtgtgctccacccccaaccccggcctcctttctcacgagcatgtggccgctcctgctttccaaaatgactgtgtttgtcccctcccccagccccccacgctcccgcacacagatcctcaggaacatatgaagcagaggaggggcttgggctgcaccactcacagagctccctcccccaggcacttagttggggcccagcactgacctttcccctgagcccaggatgtggccagagccccctctgggacccctctcgccccttctctgcctcctcagcttgagctgcctgcccgaagttcggctgttccggggccagtgtgtcacctgccaacttccacatcaccctcctccctcgctccctcctctccttccccaaggacctccccccatttctggcagccaagccattaatctggagacagaaatgggtttgctatcga

SEQ ID NO: 124952 - DNA, 3132 bp, Homo sapiens
  Payload ID: 4537
  Gene Symbol: DCC
  Gene Name: DCC netrin 1 receptor
  ENST ID: ENST00000304775
  CDS Start-End: 1-2318
gaggagttccagtgatcaagtggaagaaagatggcattcatctggccttgggaatggatgaaaggaagcagcaactttcaaatgggtctctgctgatacaaaacatacttcattccagacaccacaagccagatgagggactttaccaatgtgaggcatctttaggagattctggctcaattattagtcggacagcaaaagttgcagtagcaggaccactgaggttcctttcacagacagaatctgtcacagccttcatgggagacacagtgctactcaagtgtgaagtcattggggagcccatgccaacaatccactggcagaagaaccaacaagacctgactccaatcccaggtgactcccgagtggtggtcttgccctctggagcattgcagatcagccgactccaaccgggggacattggaatttaccgatgctcagctcgaaatccagccagctcaagaacaggaaatgaagcagaagtcagaattttatcagatccaggactgcatagacagctgtattttctgcaaagaccatccaatgtagtagccattgaaggaaaagatgctgtcctggaatgttgtgtttctggctatcctccaccaagttttacctggttacgaggcgaggaagtcatccaactcaggtctaaaaagtattctttattgggtggaagcaacttgcttatctccaatgtgacagatgatgacagtggaatgtatacctgtgttgtcacatataaaaatgagaatattagtgcctctgcagagctcacagtcttggttccgccatggtttttaaatcatccttccaacctgtatgcctatgaaagcatggatattgagtttgaatgtacagtctctggaaagcctgtgcccactgtgaattggatgaagaatggagatgtggtcattcctagtgattattttcagatagtgggaggaagcaacttacggatacttggggtggtgaagtcagatgaaggcttttatcaatgtgtggctgaaaatgaggctggaaatgcccagaccagtgcacagctcattgtccctaagcctgctatcccaagctccagtgtcctcccttcggctcccagagatgtggtccctgtcttggtttccagccgatttgtccgtctcagctggcgcccacctgcagaagcgaaagggaacattcaaactttcacggtctttttctccagagaaggtgacaacagggaacgagcattgaatacaacacagcctgggtcccttcagctcactgtgggaaacctgaagccagaagccatgtacacctttcgagttgtggcttacaatgaatggggaccgggagagagttctcaacccatcaaggtggccacacagcctgagttgcaagttccagggccagtagaaaacctgcaagctgtatctacctcacctacctcaattcttattacctgggaaccccctgcctatgcaaacggtccagtccaaggttacagattgttctgcactgaggtgtccacaggaaaagaacagaatatagaggttgatggactatcttataaactggaaggcctgaaaaaattcaccgaatatagtcttcgattcttagcttataatcgctatggtccgggcgtctctactgatgatataacagtggttacactttctgacgtgccaagtgccccgcctcagaacgtctccctggaagtggtcaattcaagaagtatcaaagttagctggctgcctcctccatcaggaacacaaaatggatttattaccggctataaaattcgacacagaaagacgacccgcaggggtgagatggaaacactggagccaaacaacctctggtacctattcacaggactggagaaaggaagtcagtacagtttccaggtgtcagccatgacagtcaatggtactggaccaccttccaactggtatactgcagagactccagagaatgatctagatgaatctcaagttcctgatcaaccaagctctcttcatgtgaggccccagactaactgcatcatcatgagttggactcctcccttgaacccaaacatcgtggtgcgaggttatattatcggttatggcgttgggagcccttacgctgagacagtgcgtgtggacagcaagcagcgatattattccattgagaggttagagtcaagttcccattatgtaatctccctaaaagcttttaacaatgccggagaaggagttcctctttatgaaagtgccaccaccaggtctataaccgtcagaagacacaacatctctaagttacacagcaacaggcctcaaaccaaacacaatgtatgaattctcggtcatggtaacaaaaaacagaaggtccagtacttggagcatgactgcacatgccaccacgtatgaagcagcccccacctctgctcccaaggacttgacagtcattactagggaagggaagcctcgtgccgtcattgtgagttggcagcctcccttggaagccaatgggaaaattactgcttacatcttattttataccttggacaagaacatcccaattgatgactggattatggaaacaatcagtggtgataggcttactcatcaaatcatggatctcaaccttgatactatgtattactttcgaattcaagcacgaaattcaaaaggagtggggccactctctgatcctatcctcttcaggactctgaaagtggaacaccctgacaaaatggctaatgaccaaggtatggtggctcaatctgtcattttgtgttccttgaatcaatcctgtctgttagacatgtcagtcattactttatattcctcttttcacctggaccatacacctgatgaagcagacactggcgtgacgattaatcttgttaatgaagttctgcttggctgaggctgcggctctgataaggaagatgtaaattttcttgagaggaaattgttttgtctccattctgaaggaccaattaaaatgtcaagcttctttgtatgaaataaatttttagtctctgtctgcacttctgaataattcacattaagtataattaagctcagcataattttcaagctgctcttgcaccctttcctgagctatggattaaagttctgtagctctacagagaaaacccgtaaa

SEQ ID NO: 124953 - DNA, 10206 bp, Homo sapiens
  Payload ID: 4537
  Gene Symbol: DCC
  Gene Name: DCC netrin 1 receptor
  Uniprot ID: P43146
  ENST ID: ENST00000442544
  CDS Start-End: 617-4960
gtagtacggttccaactcccagctcgcacaccgctggcggacaccccagtaacaagtgagagcgctccaccccgcagtcccccccgcctctcctccctgggtcccctcggctctcggaagaaaaaccaacagcatctccagctctcgcgcggaattgtctcttcaactttacccaaccgacgacaaggaaccagcctcaaccttttaatgcacagcccggccacaggattgccttccatctcctcttggtccctcctggatgtggtttattgatgacttgcgagcccctcagagagctgtcttccctcctctggctccctccgtttccttgagttagttttctaaggttttaccggggctcgggatctcttggaccgaatggaactttttgctgcctgcttttgctgctgattctgtcagtggacaaggaaaaaggcttcgaaggcagcagaggcgcaggggaggtggagaaagaggtggaggaagaggacgaggaggaggaggaagccgaaggggctcggcgcgtgtgtgtgcatgtgtgcatgcgtgtgtgagtgcatgtgtgtgagtgctgccgctgcccgcgacccctggccccgaaggtgttggctgaaatatggagaatagtcttagatgtgtttgggtacccaagctggcttttgtactcttcggagcttccttgttcagcgcgcatcttcaagtaaccggttttcaaattaaagctttcacagcactgcgcttcctctcagaaccttctgatgccgtcacaatgcggggaggaaatgtcctcctcgactgctccgcggagtccgaccgaggagttccagtgatcaagtggaagaaagatggcattcatctggccttgggaatggatgaaaggaagcagcaactttcaaatgggtctctgctgatacaaaacatacttcattccagacaccacaagccagatgagggactttaccaatgtgaggcatctttaggagattctggctcaattattagtcggacagcaaaagttgcagtagcaggaccactgaggttcctttcacagacagaatctgtcacagccttcatgggagacacagtgctactcaagtgtgaagtcattggggagcccatgccaacaatccactggcagaagaaccaacaagacctgactccaatcccaggtgactcccgagtggtggtcttgccctctggagcattgcagatcagccgactccaaccgggggacattggaatttaccgatgctcagctcgaaatccagccagctcaagaacaggaaatgaagcagaagtcagaattttatcagatccaggactgcatagacagctgtattttctgcaaagaccatccaatgtagtagccattgaaggaaaagatgctgtcctggaatgttgtgtttctggctatcctccaccaagttttacctggttacgaggcgaggaagtcatccaactcaggtctaaaaagtattctttattgggtggaagcaacttgcttatctccaatgtgacagatgatgacagtggaatgtatacctgtgttgtcacatataaaaatgagaatattagtgcctctgcagagctcacagtcttggttccgccatggtttttaaatcatccttccaacctgtatgcctatgaaagcatggatattgagtttgaatgtacagtctctggaaagcctgtgcccactgtgaattggatgaagaatggagatgtggtcattcctagtgattattttcagatagtgggaggaagcaacttacggatacttggggtggtgaagtcagatgaaggcttttatcaatgtgtggctgaaaatgaggctggaaatgcccagaccagtgcacagctcattgtccctaagcctgctatcccaagctccagtgtcctcccttcggctcccagagatgtggtccctgtcttggtttccagccgatttgtccgtctcagctggcgcccacctgcagaagcgaaagggaacattcaaactttcacggtctttttctccagagaaggtgacaacagggaacgagcattgaatacaacacagcctgggtcccttcagctcactgtgggaaacctgaagccagaagccatgtacacctttcgagttgtggcttacaatgaatggggaccgggagagagttctcaacccatcaaggtggccacacagcctgagttgcaagttccagggccagtagaaaacctgcaagctgtatctacctcacctacctcaattcttattacctgggaaccccctgcctatgcaaacggtccagtccaaggttacagattgttctgcactgaggtgtccacaggaaaagaacagaatatagaggttgatggactatcttataaactggaaggcctgaaaaaattcaccgaatatagtcttcgattcttagcttataatcgctatggtccgggcgtctctactgatgatataacagtggttacactttctgacgtgccaagtgccccgcctcagaacgtctccctggaagtggtcaattcaagaagtatcaaagttagctggctgcctcctccatcaggaacacaaaatggatttattaccggctataaaattcgacacagaaagacgacccgcaggggtgagatggaaacactggagccaaacaacctctggtacctattcacaggactggagaaaggaagtcagtacagtttccaggtgtcagccatgacagtcaatggtactggaccaccttccaactggtatactgcagagactccagagaatgatctagatgaatctcaagttcctgatcaaccaagctctcttcatgtgaggccccagactaactgcatcatcatgagttggactcctcccttgaacccaaacatcgtggtgcgaggttatattatcggttatggcgttgggagcccttacgctgagacagtgcgtgtggacagcaagcagcgatattattccattgagaggttagagtcaagttcccattatgtaatctccctaaaagcttttaacaatgccggagaaggagttcctctttatgaaagtgccaccaccaggtctataaccgatcccactgacccagttgattattatcctttgcttgatgatttccccacctcggtcccagatctctccacccccatgctcccaccagtaggtgtacaggctgtggctcttacccatgatgctgtgagggtcagctgggcagacaactctgtccctaagaaccaaaagacgtctgaggtgcgactttacaccgtccggtggagaaccagcttttctgcaagtgcaaaatacaagtcagaagacacaacatctctaagttacacagcaacaggcctcaaaccaaacacaatgtatgaattctcggtcatggtaacaaaaaacagaaggtccagtacttggagcatgactgcacatgccaccacgtatgaagcagcccccacctctgctcccaaggacttgacagtcattactagggaagggaagcctcgtgccgtcattgtgagttggcagcctcccttggaagccaatgggaaaattactgcttacatcttattttataccttggacaagaacatcccaattgatgactggattatggaaacaatcagtggtgataggcttactcatcaaatcatggatctcaaccttgatactatgtattactttcgaattcaagcacgaaattcaaaaggagtggggccactctctgatcctatcctcttcaggactctgaaagtggaacaccctgacaaaatggctaatgaccaaggtcgtcatggagatggaggttattggccagttgatactaatttgattgatagaagcaccctaaatgagccgccaattggacaaatgcaccccccgcatggcagtgtcactcctcagaagaacagcaacctgcttgtgatcattgtggtcaccgttggtgtcatcacagtgctggtagtggtcatcgtggctgtgatttgcacccgacgctcttcagcccagcagagaaagaaacgggccacccacagtgctggcaaaaggaagggcagccagaaggacctccgaccccctgatctttggatccatcatgaagaaatggagatgaaaaatattgaaaagccatctggcactgaccctgcaggaagggactctcccatccaaagttgccaagacctcacaccagtcagccacagccagtcagaaacccaactgggaagcaaaagcacctctcattcaggtcaagacactgaggaagcagggagctctatgtccactctggagaggtcgctggctgcacgccgagccccccgggccaagctcatgattcccatggatgcccagtccaacaatcctgctgtcgtgagcgccatcccggtgccaacgctagaaagtgcccagtacccaggaatcctcccgtctcccacctgtggatatccccacccgcagttcactctccggcctgtgccattcccaacactctcagtggaccgaggtttcggagcaggaagaagtcagtcagtgagtgaaggaccaactacccaacaaccacctatgctgcccccatctcagcctgagcattctagcagcgaggaggcaccaagcagaaccatccccacagcttgtgttcgaccaactcacccactccgcagctttgctaatcctttgctacctccaccaatgagtgcaatagaaccgaaagtcccttacacaccacttttgtctcagccagggcccactcttcctaagacccatgtgaaaacagcctcccttgggttggctggaaaagcaagatcccctttgcttcctgtgtctgtgccaacagcccctgaagtgtctgaggagagccacaaaccaacagaggattcagccaatgtgtatgaacaggatgatctgagtgaacaaatggcaagtttggaaggactcatgaagcagcttaatgccatcacaggctcagccttttaacatgtatttctgaatggatgaggtgaattttccgggaactttgcagcataccaattacccataaacagcacacctgtgtccaagaactctaaccagtgtacaggtcacccatcaggaccactcagttaaggaagatcctgaagcagttcagaaggaataagcattccttctttcacaggcatcaggaattgtcaaatgatgattatgagttccctaaacaaaagcaaagatgcattttcactgcaatgtcaaagtttaagctgctagaatagtcatgggcctttgtcactgcagtgaccacactgtcataactaatacctatgttttcctttgtcaaggcctgttgtttaatgtgtaggtctagtcttacaaaatgcaagtgcattatttaagcctgtaccatgccatggcaaaccagtgcaagctcactattttgttttcaacttaaacatacaaagcacccatgggaatctctcatgccatagcaccaaaggattggatgttttccttacagcacaaaaagtaaatagtaaacaaacaaaaggcagagaatgcttatgtttgtaactcagtcattcatcttgcacaagtggtggatattagtgagtggctaaaaattcacctattttggcaagtatttgtaaatccacccttggttaatatgtatgtctggagtccaggaatataaaaatctgcaactagtggcattctgccagcagcagtacatttctggaaagaggatataatatgcaatcttctcagacacatggtaattatatgcttaagcttgtaataggacagttttcaatttgggtggcttttgtgccataccacactgtgatacaatttcaaagcttcactaaggccatcttccttaggagtttggccagaagaatgcccccaccccttcaccccatccctccctgagttctccttggcaactagcgttgggtgaaatggccagctccacatgtcatatggtgcactggccaatgtcgcctgtcttctaatcccgtagaaatggcagactccctgagagcaggaagagaaggaaaataaaaggtagcttctaacagtaccttctcttaaagaatgccaactctgcctacagggtcagtgttggcaagcattggccaccagacccttttgttaagggaaacttttacactacacctgtgtcagagtcagggggaagcagaggggcaggtgccacctgacacttccgacatgtaaatccagcagatacttttcaaagcagcatcttaaactgtggactacagttttaaacttctattgccatgtttatctacagcttggaactagctaaaattaagaacattttgtatgcagcattttagtttctgaattttcagctgcatttggagttaatccctgtttatgcagctgaatcgccaaaagggagctagtttgcatatttatcagttaggtgacttgaaaacccaatgagagagtttcagctgaattattcctttcagctctgcctttgatttcaagcttgagtaggtcataattttaaaagagcatggaagggataggatctttacaacctaatagctccttttattaggtgggtaattatatatgaatccctgaataaaatattttgagcaaaatggcactgtaacagaagtaataattcagtttatttttttacagttttatgtcgggaaggaaatctgatgtcaaagagagggctgttcaaatggttcattagaaagtccggtccatttgcgaatttgttccttcaacaagagtgctcattcaagttactcagattttctggaagtcttttctgaagagctatgtgatgttgttctatgggacagactactcttatttaacatctgggcacttaggtagacaaccttctactgacctggaataaagtgtttcctaacataatattgaattattcagaaataatccattacttcaaaaaagaaaatattcattgggctagcccaaccttctctaggccctaagaattattacctcccctttctaattctagcaaacatggaacattctccttaggcacttgacacccacgagggtaatcctgagtgctcagtttggaataggttgcaaatctcagattttagggattgagtcacaccttcaatctatagaatgaagttgaccaattaaaaaaaaaaaaaaaacctatcattttcacaaatttctagatccttctagtcaaaaataattatttaggaaataaaatttttaaaaatccatttaaatacatgttatttgtcttcagtggaagttatatttctgctgcatgcttttgaaactttcttcattaaatagaatggtttgtcttagtaactggcaatgccagtattagcaccatgcatttaatctataatacaatcaatttaaacatcctcaaaaaactctagtatcatttacctggtagtattaatatacaatgatgtcaccacaacttttgtataactctgttccctttaccctcaaatgattcatatatgtatataattgcctgcccaagttttcaggtaacttattaatttcccagtctcctgatctcttgacaagaagaaacctgtgaatactgcaaactagcctctgacttcctcctactgagtctagttcatggtatccaggactctttatgctcataactctctctgattcccattgggtgatacctgacagccaaccagccgctctgccaccagaactcatttctccctgaaaaagaagaaaatcatatttggcagagcattctctggtctgccctgtaatgtgcttaaatgtcaggcaacatcctcttttttttaaaaaaaatggtatttttctttaaatttcaccctaataagaaagctattttctctcctctgcagaaatttctgcatttgtgaaacttataaaaatttagatagttcaaatgtataaagaatatttggatgatgctctagccaaaagttaaatatttcgtagtgaatcatagccaataagaaaccagtcatacttgcctctttgaataacagagatataagcttctagaatatttaaataatgaagttttacatttgggtattataaaatgcatactcaattgaatgagctgaaaaaaataccaagccagtgatataagtggagatttattaaggattcctgttgagtatattcttagtttcctcaaaatagggattattcaaaattaggtgtatgttcaatctcctgctttggttccagctacacaaggagagccatcctgtgctagtgtgatgtttcagacaacattctgaaactaaaatgtttggcacttattggcttttccaataaagaatctcttaagtacaggtatttctggaagctgttggtgtctgtgcttgaagatgattgctgatacttatccaccctttgggtacttctgttgactttgtttaaataatcatcttatggttgtccccaaatgtaatatggtatctcagatatagcagctggactgtaattacaacaaaaggttacctctaaagataacatcttaccattttagataaaattgtgtcccagaattcttatggtttcggaatgtacatttctagtcaatgaaagaaagaaaaatggaaaaattgtctagtttcaggcatgtttaaagaaaacaaagtcatctgaactttaaaatagatgcagagcagggttactttccctttcactcagttcccttcatgcaaccacaggcagtcctgcaggccagaggttactatcctaacctgctcataaccatatactatacagagcccacaactttctggagatgcagaagcagccatacactcaagtctctgtttttgtaaatcacattcaaagcaacattttactcataatttgcatttctctggtgactttcagaaatcactttagtattgtacagaaaagctttttatttgagtctagtgtttaaaattaaattggatacttgggaaaatcatagataggtgttttgtatgatattccattccaatgcaaaatatatgtacccatgcctcaatgtatcttgctatctaaatacctgttgccaaaaagtattgatttgggaaaaaaaatgccaatttcctggtcagtgaggttatgtaaaagacaaaataccacacccatatcagcaaatgaatattactactcatctggactcttcgttgccactattgcataacgttcacgtggcagacttccagttgcactctctgaaggacttttttctcttactctcaatagagagcctttgtacattgtcatcctatgattgttgttggtagaagagcaagagcaaaactctgcaagatttaataaacacaggggcatgggccaagggatctcactgtgtgctgaacatgtattttcagatgcaagaaaggaatgatggagaggaggagaaatgctgttttttattattgtagggtaaatctgacaattctgaactttgtgaattgtcagcttgtttgggggaagggtgggcgggtatggggtgtactttttataagtaatatttaatttattatttagagtggcttctttttggataatttatgataaaaagggagatctggttgggatctagatacggctgttaaagctgcagtgttccatacctcagagggaccactttggaaatgaattgtccattgctgagtatgaagagatgtccagtccaggcaaagccttcactgaagttccatcatcgccacttctccctttttagggtcattcaaagaagataacaccaaacctaaataattctgaaagcattttgcagatcagtgctactcattcaaagggctttgcaactcaaacagattgttagtgtgctagtgataagtttatttggtagaaatgggtatactacagctttaactagccttagtgagaaaagaaattttttgttgttacaaaacaccttttttaacaaaaaggtattttgagcctacaaaaagtttctttaaactgtcagattctagcattgttaaccaaattagactagtgattgcaatatttaagtgtaaatcttgttctacaagaaaggaaacttgcttacagtttaaaacaatgactgtttctacacatgatcttgtatactactacacaaggaaaagggggttttgtaaacactgtagaacagtctcatattcatttttttatagaaatgttattccaatggtgcattttttgtttaataaataaagttttgatacaaa

SEQ ID NO: 124954 - DNA, 9525 bp, Homo sapiens
  Payload ID: 4537
  Gene Symbol: DCC
  Gene Name: DCC netrin 1 receptor
  ENST ID: ENST00000412726
  CDS Start-End: 1-4275
tccctgtgctctcttgttccaggttttcaaattaaagctttcacagcactgcgcttcctctcagaaccttctgatgccgtcacaatgcggggaggaaatgtcctcctcgactgctccgcggagtccgaccgaggagttccagtgatcaagtggaagaaagatggcattcatctggccttgggaatggatgaaaggaagcagcaactttcaaatgggtctctgctgatacaaaacatacttcattccagacaccacaagccagatgagggactttaccaatgtgaggcatctttaggagattctggctcaattattagtcggacagcaaaagttgcagtagcaggaccactgaggttcctttcacagacagaatctgtcacagccttcatgggagacacagtgctactcaagtgtgaagtcattggggagcccatgccaacaatccactggcagaagaaccaacaagacctgactccaatcccaggtgactcccgagtggtggtcttgccctctggagcattgcagatcagccgactccaaccgggggacattggaatttaccgatgctcagctcgaaatccagccagctcaagaacaggaaatgaagcagaagtcagaattttatcagatccaggactgcatagacagctgtattttctgcaaagaccatccaatgtagtagccattgaaggaaaagatgctgtcctggaatgttgtgtttctggctatcctccaccaagttttacctggttacgaggcgaggaagtcatccaactcaggtctaaaaagtattctttattgggtggaagcaacttgcttatctccaatgtgacagatgatgacagtggaatgtatacctgtgttgtcacatataaaaatgagaatattagtgcctctgcagagctcacagtcttggttccgccatggtttttaaatcatccttccaacctgtatgcctatgaaagcatggatattgagtttgaatgtacagtctctggaaagcctgtgcccactgtgaattggatgaagaatggagatgtggtcattcctagtgattattttcagatagtgggaggaagcaacttacggatacttggggtggtgaagtcagatgaaggcttttatcaatgtgtggctgaaaatgaggctggaaatgcccagaccagtgcacagctcattgtccctaagcctgctatcccaagctccagtgtcctcccttcggctcccagagatgtggtccctgtcttggtttccagccgatttgtccgtctcagctggcgcccacctgcagaagcgaaagggaacattcaaactttcacggtctttttctccagagaaggtgacaacagggaacgagcattgaatacaacacagcctgggtcccttcagctcactgtgggaaacctgaagccagaagccatgtacacctttcgagttgtggcttacaatgaatggggaccgggagagagttctcaacccatcaaggtggccacacagcctgagttgcaagttccagggccagtagaaaacctgcaagctgtatctacctcacctacctcaattcttattacctgggaaccccctgcctatgcaaacggtccagtccaaggttacagattgttctgcactgaggtgtccacaggaaaagaacagaatatagaggttgatggactatcttataaactggaaggcctgaaaaaattcaccgaatatagtcttcgattcttagcttataatcgctatggtccgggcgtctctactgatgatataacagtggttacactttctgacgtgccaagtgccccgcctcagaacgtctccctggaagtggtcaattcaagaagtatcaaagttagctggctgcctcctccatcaggaacacaaaatggatttattaccggctataaaattcgacacagaaagacgacccgcaggggtgagatggaaacactggagccaaacaacctctggtacctattcacaggactggagaaaggaagtcagtacagtttccaggtgtcagccatgacagtcaatggtactggaccaccttccaactggtatactgcagagactccagagaatgatctagatgaatctcaagttcctgatcaaccaagctctcttcatgtgaggccccagactaactgcatcatcatgagttggactcctcccttgaacccaaacatcgtggtgcgaggttatattatcggttatggcgttgggagcccttacgctgagacagtgcgtgtggacagcaagcagcgatattattccattgagaggttagagtcaagttcccattatgtaatctccctaaaagcttttaacaatgccggagaaggagttcctctttatgaaagtgccaccaccaggtctataaccgatcccactgacccagttgattattatcctttgcttgatgatttccccacctcggtcccagatctctccacccccatgctcccaccagtaggtgtacaggctgtggctcttacccatgatgctgtgagggtcagctgggcagacaactctgtccctaagaaccaaaagacgtctgaggtgcgactttacaccgtccggtggagaaccagcttttctgcaagtgcaaaatacaagtcagaagacacaacatctctaagttacacagcaacaggcctcaaaccaaacacaatgtatgaattctcggtcatggtaacaaaaaacagaaggtccagtacttggagcatgactgcacatgccaccacgtatgaagcagcccccacctctgctcccaaggacttgacagtcattactagggaagggaagcctcgtgccgtcattgtgagttggcagcctcccttggaagccaatgggaaaattactgcttacatcttattttataccttggacaagaacatcccaattgatgactggattatggaaacaatcagtggtgataggcttactcatcaaatcatggatctcaaccttgatactatgtattactttcgaattcaagcacgaaattcaaaaggagtggggccactctctgatcctatcctcttcaggactctgaaagtggaacaccctgacaaaatggctaatgaccaaggtcgtcatggagatggaggttattggccagttgatactaatttgattgatagaagcaccctaaatgagccgccaattggacaaatgcaccccccgcatggcagtgtcactcctcagaagaacagcaacctgcttgtgatcattgtggtcaccgttggtgtcatcacagtgctggtagtggtcatcgtggctgtgatttgcacccgacgctcttcagcccagcagagaaagaaacgggccacccacagtgctggcaaaaggaagggcagccagaaggacctccgaccccctgatctttggatccatcatgaagaaatggagatgaaaaatattgaaaagccatctggcactgaccctgcaggaagggactctcccatccaaagttgccaagacctcacaccagtcagccacagccagtcagaaacccaactgggaagcaaaagcacctctcattcaggtcaagacactgaggaagcagggagctctatgtccactctggagaggtcgctggctgcacgccgagccccccgggccaagctcatgattcccatggatgcccagtccaacaatcctgctgtcgtgagcgccatcccggtgccaacgctagaaagtgcccagtacccaggaatcctcccgtctcccacctgtggatatccccacccgcagttcactctccggcctgtgccattcccaacactctcagtggaccgaggtttcggagcaggaagaagtcagtcagtgagtgaaggaccaactacccaacaaccacctatgctgcccccatctcagcctgagcattctagcagcgaggaggcaccaagcagaaccatccccacagcttgtgttcgaccaactcacccactccgcagctttgctaatcctttgctacctccaccaatgagtgcaatagaaccgaaagtcccttacacaccacttttgtctcagccagggcccactcttcctaagacccatgtgaaaacagcctcccttgggttggctggaaaagcaagatcccctttgcttcctgtgtctgtgccaacagcccctgaagtgtctgaggagagccacaaaccaacagaggattcagccaatgtgtatgaacaggatgatctgagtgaacaaatggcaagtttggaaggactcatgaagcagcttaatgccatcacaggctcagccttttaacatgtatttctgaatggatgaggtgaattttccgggaactttgcagcataccaattacccataaacagcacacctgtgtccaagaactctaaccagtgtacaggtcacccatcaggaccactcagttaaggaagatcctgaagcagttcagaaggaataagcattccttctttcacaggcatcaggaattgtcaaatgatgattatgagttccctaaacaaaagcaaagatgcattttcactgcaatgtcaaagtttaagctgctagaatagtcatgggcctttgtcactgcagtgaccacactgtcataactaatacctatgttttcctttgtcaaggcctgttgtttaatgtgtaggtctagtcttacaaaatgcaagtgcattatttaagcctgtaccatgccatggcaaaccagtgcaagctcactattttgttttcaacttaaacatacaaagcacccatgggaatctctcatgccatagcaccaaaggattggatgttttccttacagcacaaaaagtaaatagtaaacaaacaaaaggcagagaatgcttatgtttgtaactcagtcattcatcttgcacaagtggtggatattagtgagtggctaaaaattcacctattttggcaagtatttgtaaatccacccttggttaatatgtatgtctggagtccaggaatataaaaatctgcaactagtggcattctgccagcagcagtacatttctggaaagaggatataatatgcaatcttctcagacacatggtaattatatgcttaagcttgtaataggacagttttcaatttgggtggcttttgtgccataccacactgtgatacaatttcaaagcttcactaaggccatcttccttaggagtttggccagaagaatgcccccaccccttcaccccatccctccctgagttctccttggcaactagcgttgggtgaaatggccagctccacatgtcatatggtgcactggccaatgtcgcctgtcttctaatcccgtagaaatggcagactccctgagagcaggaagagaaggaaaataaaaggtagcttctaacagtaccttctcttaaagaatgccaactctgcctacagggtcagtgttggcaagcattggccaccagacccttttgttaagggaaacttttacactacacctgtgtcagagtcagggggaagcagaggggcaggtgccacctgacacttccgacatgtaaatccagcagatacttttcaaagcagcatcttaaactgtggactacagttttaaacttctattgccatgtttatctacagcttggaactagctaaaattaagaacattttgtatgcagcattttagtttctgaattttcagctgcatttggagttaatccctgtttatgcagctgaatcgccaaaagggagctagtttgcatatttatcagttaggtgacttgaaaacccaatgagagagtttcagctgaattattcctttcagctctgcctttgatttcaagcttgagtaggtcataattttaaaagagcatggaagggataggatctttacaacctaatagctccttttattaggtgggtaattatatatgaatccctgaataaaatattttgagcaaaatggcactgtaacagaagtaataattcagtttatttttttacagttttatgtcgggaaggaaatctgatgtcaaagagagggctgttcaaatggttcattagaaagtccggtccatttgcgaatttgttccttcaacaagagtgctcattcaagttactcagattttctggaagtcttttctgaagagctatgtgatgttgttctatgggacagactactcttatttaacatctgggcacttaggtagacaaccttctactgacctggaataaagtgtttcctaacataatattgaattattcagaaataatccattacttcaaaaaagaaaatattcattgggctagcccaaccttctctaggccctaagaattattacctcccctttctaattctagcaaacatggaacattctccttaggcacttgacacccacgagggtaatcctgagtgctcagtttggaataggttgcaaatctcagattttagggattgagtcacaccttcaatctatagaatgaagttgaccaattaaaaaaaaaaaaaaaacctatcattttcacaaatttctagatccttctagtcaaaaataattatttaggaaataaaatttttaaaaatccatttaaatacatgttatttgtcttcagtggaagttatatttctgctgcatgcttttgaaactttcttcattaaatagaatggtttgtcttagtaactggcaatgccagtattagcaccatgcatttaatctataatacaatcaatttaaacatcctcaaaaaactctagtatcatttacctggtagtattaatatacaatgatgtcaccacaacttttgtataactctgttccctttaccctcaaatgattcatatatgtatataattgcctgcccaagttttcaggtaacttattaatttcccagtctcctgatctcttgacaagaagaaacctgtgaatactgcaaactagcctctgacttcctcctactgagtctagttcatggtatccaggactctttatgctcataactctctctgattcccattgggtgatacctgacagccaaccagccgctctgccaccagaactcatttctccctgaaaaagaagaaaatcatatttggcagagcattctctggtctgccctgtaatgtgcttaaatgtcaggcaacatcctcttttttttaaaaaaaatggtatttttctttaaatttcaccctaataagaaagctattttctctcctctgcagaaatttctgcatttgtgaaacttataaaaatttagatagttcaaatgtataaagaatatttggatgatgctctagccaaaagttaaatatttcgtagtgaatcatagccaataagaaaccagtcatacttgcctctttgaataacagagatataagcttctagaatatttaaataatgaagttttacatttgggtattataaaatgcatactcaattgaatgagctgaaaaaaataccaagccagtgatataagtggagatttattaaggattcctgttgagtatattcttagtttcctcaaaatagggattattcaaaattaggtgtatgttcaatctcctgctttggttccagctacacaaggagagccatcctgtgctagtgtgatgtttcagacaacattctgaaactaaaatgtttggcacttattggcttttccaataaagaatctcttaagtacaggtatttctggaagctgttggtgtctgtgcttgaagatgattgctgatacttatccaccctttgggtacttctgttgactttgtttaaataatcatcttatggttgtccccaaatgtaatatggtatctcagatatagcagctggactgtaattacaacaaaaggttacctctaaagataacatcttaccattttagataaaattgtgtcccagaattcttatggtttcggaatgtacatttctagtcaatgaaagaaagaaaaatggaaaaattgtctagtttcaggcatgtttaaagaaaacaaagtcatctgaactttaaaatagatgcagagcagggttactttccctttcactcagttcccttcatgcaaccacaggcagtcctgcaggccagaggttactatcctaacctgctcataaccatatactatacagagcccacaactttctggagatgcagaagcagccatacactcaagtctctgtttttgtaaatcacattcaaagcaacattttactcataatttgcatttctctggtgactttcagaaatcactttagtattgtacagaaaagctttttatttgagtctagtgtttaaaattaaattggatacttgggaaaatcatagataggtgttttgtatgatattccattccaatgcaaaatatatgtacccatgcctcaatgtatcttgctatctaaatacctgttgccaaaaagtattgatttgggaaaaaaaatgccaatttcctggtcagtgaggttatgtaaaagacaaaataccacacccatatcagcaaatgaatattactactcatctggactcttcgttgccactattgcataacgttcacgtggcagacttccagttgcactctctgaaggacttttttctcttactctcaatagagagcctttgtacattgtcatcctatgattgttgttggtagaagagcaagagcaaaactctgcaagatttaataaacacaggggcatgggccaagggatctcactgtgtgctgaacatgtattttcagatgcaagaaaggaatgatggagaggaggagaaatgctgttttttattattgtagggtaaatctgacaattctgaactttgtgaattgtcagcttgtttgggggaagggtgggcgggtatggggtgtactttttataagtaatatttaatttattatttagagtggcttctttttggataatttatgataaaaagggagatctggttgggatctagatacggctgttaaagctgcagtgttccatacctcagagggaccactttggaaatgaattgtccattgctgagtatgaagagatgtccagtccaggcaaagccttcactgaagttccatcatcgccacttctccctttttagggtcattcaaagaagataacaccaaacctaaataattctgaaagcattttgcagatcagtgctactcattcaaagggctttgcaactcaaacagattgttagtgtgctagtgataagtttatttggtagaaatgggtatactacagctttaactagccttagtgagaaaagaaattttttgttgttacaaaacaccttttttaacaaaaaggtattttgagcctacaaaaagtttctttaaactgtcagattctagcattgttaaccaaattagactagtgattgcaatatttaagtgtaaatcttgttctacaagaaaggaaacttgcttacagtttaaaacaatgactgtttctacacatgatcttgtatactactacacaaggaaaagggggttttgtaaacactgtagaacagtctcatattcatttttttatagaaatgttattccaatggtgcattttttgtttaataaataaagttttgatacaaagttc

SEQ ID NO: 124955 - DNA, 470 bp, Homo sapiens
  Payload ID: 4537
  Gene Symbol: DCC
  Gene Name: DCC netrin 1 receptor
  ENST ID: ENST00000582875
  CDS Start-End: 1-267
cgaggagttccagtgatcaagtggaagaaagatggcattcatctggccttgggaatggatgaaaggaagcagcaactttcaaatgggtctctgctgatacaaaacatacttcattccagacaccacaagccagatgagggactttaccaatgtgaggcatctttaggagattctggctcaattattagtcggacagcaaaagttgcagtagcagagggaaatgtgaggctgagaaagtttggacaacatagccatggcagtttataactcaaagtatatggatggatgacactcgctagagagttgcaacagccgatgcagctgtccccaggccccaaactcacttatatttcctgaaacaccaggaaaagcatcttttatttttatatgagagccctaagagattattttcatcttattcaaaaatgaaaagattttatttaattaaaaaatctatttctattatctta

SEQ ID NO: 124956 - DNA, 546 bp, Homo sapiens
  Payload ID: 4537
  Gene Symbol: DCC
  Gene Name: DCC netrin 1 receptor
  ENST ID: ENST00000581559
  CDS Start-End: 1-213
gttccagtgatcaagtggaagaaagatggcattcatctggccttgggaatggatgaaaggaagcagcaactttcaaatgggtctctgctgatacaaaacatacttcattccagacaccacaagccagatgagggactttaccaatgtgaggcatctttaggagattctggctcaattattagtcggacagcaaaagttgcagtagcagactaggtgtcatgtgatataactggacccaggagaatgaccccacaactgaaagatttttatgaaggatgatttactattctccaacgtactgacatttttctacagcccaatcattgctggggagaccactgaggttcctttcacagacagaatctgtcacagccttcatgggagacacagtgctactcaagtgtgaagtcattggggagcccatgccaacaatccactggcagaagaaccaacaagacctgactccaatcccaggtgactcccgagtggtggtcttgccctctggagcattgcagatcagccgactccaaccgggggacattggaa

SEQ ID NO: 124957 - DNA, 621 bp, Homo sapiens
  Payload ID: 4537
  Gene Symbol: DCC
  Gene Name: DCC netrin 1 receptor
  ENST ID: ENST00000578080
  CDS Start-End: 1-545
aaattaaagctttcacagcactgcgcttcctctcagaaccttctgatgccgtcacaatgcggggaggaaatgtcctcctcgactgctccgcggagtccgaccgaggagttccagtgatcaagtggaagaaagatggcattcatctggccttgggaatggatgaaaggaagcagcaactttcaaatgggtctctgctgatacaaaacatacttcattccagacaccacaagccagatgagggactttaccaatgtgaggcatctttaggagattctggctcaattattagtcggacagcaaaagttgcagtagcaggagcaaatataagaattttgcctagaaggtcaacttcatcctgtgcagcagtctggaaaatgtatcccagggcccttgaatacgctcagaattctatttgggaaggtttggttacagtgcagagctttccattttacatttatagagatattgtttattttcaaatgataagcagaaaattaaattgctctgactctgtaattcttaatgacttaatgatcttcatttagctaaatgttcccattgttttgtagttaaagcatgagagaaagaaaaaataagaaataaatgtggtcttataagtaa

SEQ ID NO: 124958 - DNA, 444 bp, Homo sapiens
  Payload ID: 4537
  Gene Symbol: DCC
  Gene Name: DCC netrin 1 receptor
  ENST ID: ENST00000578949
  CDS Start-End: 139-444
ttgcacagagagaaaaggccatgtgagaacagagaaggtgttgtctggaagccagggagaggacccttactagaagccaactttgctgttccgccatggtttttaaatcatccttccaacctgtatgcctatgaaagcatggatattgagtttgaatgtacagtctctggaaagcctgtgcccactgtgaattggatgaagaatggagatgtggtcattcctagtgattattttcagatagtgggaggaagcaacttacggatacttggggtggtgaagtcagatgaaggcttttatcaatgtgtggctgaaaatgaggctggaaatgcccagaccagtgcacagctcattgtccctaagcctgctatcccaagctccagtgtcctcccttcggctcccagagatgtggtccctgtcttggtttccagccgatttgtccgtctc

SEQ ID NO: 124959 - DNA, 576 bp, Homo sapiens
  Payload ID: 4537
  Gene Symbol: DCC
  Gene Name: DCC netrin 1 receptor
  ENST ID: ENST00000579349
  CDS Start-End: 1-223
agttccagtgatcaagtggaagaaagatggcattcatctggccttgggaatggatgaaaggaagcagcaactttcaaatgggtctctgctgatacaaaacatacttcattccagacaccacaagccagatgagggactttaccaatgtgaggcatctttaggagattctggctcaattattagtcggacagcaaaagttgcagtagcaggtctttgttcttagagctcccaagatggcggcaggccactcccaagatggcagcaagccttttattctctgacctggggttcttggcctcatggattccaaggaatggaaacttgggccatgtggaccactgaggttcctttcacagacagaatctgtcacagccttcatgggagacacagtgctactcaagtgtgaagtcattggggagcccatgccaacaatccactggcagaagaaccaacaagacctgactccaatcccaggtgactcccgagtggtggtcttgccctctggagcattgcagatcagccgactccaaccgggggacattggaatttaccgatgctcagctcgaaatccagcca

SEQ ID NO: 124960 - DNA, 750 bp, Homo sapiens
  Payload ID: 4537
  Gene Symbol: DCC
  Gene Name: DCC netrin 1 receptor
  ENST ID: ENST00000579941
  CDS Start-End: 1-626
tcagctgggcagacaactctgtccctaagaaccaaaagacgtctgaggtgcgactttacaccgtccggtggagaaccagcttttctgcaagtgcaaaatacaagtcagaagacacaacatctctaagttacacagcaacaggcctcaaaccaaacacaatgtatgaattctcggtcatggtaacaaaaaacagaaggtccagtacttggagcatgactgcacatgccaccacgtatgaagcagcccccacctctgctcccaaggacttgacagtcattactagggaagggaagcctcgtgccgtcattgtgagttggcagcctcccttggaagccaatgggaaaattactgcttacatcttattttataccttggacaagaacatcccaattgatgactggattatggaaacaatcagtggtgataggcttactcatcaaatcatggatctcaaccttgatactatgtattactttcgaattcaagcacgaaattcaaaaggagtggggccactctctgatcctatcctcttcaggactctgaaagtggaacaccctgacaaaatggctaatgaccaagacactggcgtgacgattaatcttgttaatgaagttctgcttggctgaggctgcggctctgataaggaagatgtaaattttcttgagaggaaattgttttgtctccattctgaaggaccaattaaaatgtcaagcttctttgtatgaaataaatttttagtctctgtctgca

SEQ ID NO: 124961 - DNA, 3517 bp, Homo sapiens
  Payload ID: 4537
  Gene Symbol: DCC
  Gene Name: DCC netrin 1 receptor
  ENST ID: ENST00000581580
  CDS Start-End: 266-3496
aagaagagttactggagcactctctccacccttgcacagagagaaaaggccatgtgagaacagagaaggtgttgtctggaagccagggagaggacccttactagaagccaactttgctggatccttgtgtttacattgaggccacccagataatccaggatattctactcatctcaagatccttaacttcacagctacaaagttcctttcaccagttccgccatggtttttaaatcatccttccaacctgtatgcctatgaaagcatggatattgagtttgaatgtacagtctctggaaagcctgtgcccactgtgaattggatgaagaatggagatgtggtcattcctagtgattattttcagatagtgggaggaagcaacttacggatacttggggtggtgaagtcagatgaaggcttttatcaatgtgtggctgaaaatgaggctggaaatgcccagaccagtgcacagctcattgtccctaagcctgctatcccaagctccagtgtcctcccttcggctcccagagatgtggtccctgtcttggtttccagccgatttgtccgtctcagctggcgcccacctgcagaagcgaaagggaacattcaaactttcacggtctttttctccagagaaggtgacaacagggaacgagcattgaatacaacacagcctgggtcccttcagctcactgtgggaaacctgaagccagaagccatgtacacctttcgagttgtggcttacaatgaatggggaccgggagagagttctcaacccatcaaggtggccacacagcctgagttgcaagttccagggccagtagaaaacctgcaagctgtatctacctcacctacctcaattcttattacctgggaaccccctgcctatgcaaacggtccagtccaaggttacagattgttctgcactgaggtgtccacaggaaaagaacagaatatagaggttgatggactatcttataaactggaaggcctgaaaaaattcaccgaatatagtcttcgattcttagcttataatcgctatggtccgggcgtctctactgatgatataacagtggttacactttctgacgtgccaagtgccccgcctcagaacgtctccctggaagtggtcaattcaagaagtatcaaagttagctggctgcctcctccatcaggaacacaaaatggatttattaccggctataaaattcgacacagaaagacgacccgcaggggtgagatggaaacactggagccaaacaacctctggtacctattcacaggactggagaaaggaagtcagtacagtttccaggtgtcagccatgacagtcaatggtactggaccaccttccaactggtatactgcagagactccagagaatgatctagatgaatctcaagttcctgatcaaccaagctctcttcatgtgaggccccagactaactgcatcatcatgagttggactcctcccttgaacccaaacatcgtggtgcgaggttatattatcggttatggcgttgggagcccttacgctgagacagtgcgtgtggacagcaagcagcgatattattccattgagaggttagagtcaagttcccattatgtaatctccctaaaagcttttaacaatgccggagaaggagttcctctttatgaaagtgccaccaccaggtctataaccgatctctccacccccatgctcccaccagtaggtgtacaggctgtggctcttacccatgatgctgtgagggtcagctgggcagacaactctgtccctaagaaccaaaagacgtctgaggtgcgactttacaccgtccggtggagaaccagcttttctgcaagtgcaaaatacaagtcagaagacacaacatctctaagttacacagcaacaggcctcaaaccaaacacaatgtatgaattctcggtcatggtaacaaaaaacagaaggtccagtacttggagcatgactgcacatgccaccacgtatgaagcagcccccacctctgctcccaaggacttgacagtcattactagggaagggaagcctcgtgccgtcattgtgagttggcagcctcccttggaagccaatgggaaaattactgcttacatcttattttataccttggacaagaacatcccaattgatgactggattatggaaacaatcagtggtgataggcttactcatcaaatcatggatctcaaccttgatactatgtattactttcgaattcaagcacgaaattcaaaaggagtggggccactctctgatcctatcctcttcaggactctgaaagtggaacaccctgacaaaatggctaatgaccaaggtcgtcatggagatggaggttattggccagttgatactaatttgattgatagaagcaccctaaatgagccgccaattggacaaatgcaccccccgcatggcagtgtcactcctcagaagaacagcaacctgcttgtgatcattgtggtcaccgttggtgtcatcacagtgctggtagtggtcatcgtggctgtgatttgcacccgacgctcttcagcccagcagagaaagaaacgggccacccacagtgctggcaaaaggaagggcagccagaaggacctccgaccccctgatctttggatccatcatgaagaaatggagatgaaaaatattgaaaagccatctggcactgaccctgcaggaagggactctcccatccaaagttgccaagacctcacaccagtcagccacagccagtcagaaacccaactgggaagcaaaagcacctctcattcaggtcaagacactgaggaagcagggagctctatgtccactctggagaggtcgctggctgcacgccgagccccccgggccaagctcatgattcccatggatgcccagtccaacaatcctgctgtcgtgagcgccatcccggtgccaacgctagaaagtgcccagtacccaggaatcctcccgtctcccacctgtggatatccccacccgcagttcactctccggcctgtgccattcccaacactctcagtggaccgaggtttcggagcaggaagaacagtgagtgaaggaccaactacccaacaaccacctatgctgcccccatctcagcctgagcattctagcagcgaggaggcaccaagcagaaccatccccacagcttgtgttcgaccaactcacccactccgcagctttgctaatcctttgctacctccaccaatgagtgcaatagaaccgaaagtcccttacacaccacttttgtctcagccagggcccactcttcctaagacccatgtgaaaacagcctcccttgggttggctggaaaagcaagatcccctttgcttcctgtgtctgtgccaacagcccctgaagtgtctgaggagagccacaaaccaacagaggattcagccaatgtggagatggagtgggtgaaacaatatgcaatctcttattatccccttttattaccagcatcttcattcagtgtatgaacaggatgatctgagtgaaca

SEQ ID NO: 124962 - DNA, 1931 bp, Homo sapiens
  Payload ID: 4538
  Gene Symbol: DCTD
  Gene Name: dCMP deaminase
  Uniprot ID: P32321
  ENST ID: ENST00000357067
  CDS Start-End: 67-636
gacttccttccctgagcacggcggcggcggggacgagcaccggcctgcgcgcggagccggcaccggatggtgggcgggggccagccgtgcggacccaacatgagtgaagtttcctgcaagaaacgggacgactatttggaatggccagagtattttatggctgtggccttcttatcagcacagagaagcaaagatccaaattcccaggtcggcgcctgcatcgtgaattcagaaaacaagattgtcgggattgggtacaatgggatgccaaatgggtgcagtgatgacgtgttgccttggagaaggacagcagagaataagctggacaccaaatacccgtacgtgtgccatgcggagctgaatgccatcatgaacaaaaattcgaccgatgtgaaaggctgtagtatgtatgttgccttgttcccttgtaatgaatgcgctaagctcatcatccaggcaggtataaaagaagtgattttcatgtctgataaataccatgatagtgacgaggcaactgctgcgaggctcctgtttaatatggccggggtgacattccggaaattcataccgaagtgcagcaagattgtcattgactttgattcaattaacagcagaccgagtcaaaagcttcagtgagttacatctcattcaatctccagaagattgggattatcgtcttctaagaggttgctaatgcctttcatcttgaagttacacataacttcttactagccagtatggcaaaagtaggcatctaaagaatataaagcctcaaatcttccttactgtctctcttgtcacatggaatctacatgtgtttgaactattgctttagggtttaaaataggggagcctgtggtggcctggtgcacagggctagaacgagagtgcctccccttcttgtgtcctggctggctgggatgctggtggctcttcagaggagcatcagctgtctgtcatctgctgcgatccggcagcctctcttcactgctacatgtgctggaaggacaaataaataattgtggttgtgttcttaatggggacgagcagacacactgatctgaacatctggcccaagtgaagcatggcatatagtgcccttggaagaaaattaggcctcaaatgacagtagcattgaagtgtttgctgcagagttgagggaaacccccagccaccctcccggaatccgagatagggtggcacatctgtcctgacagacgaggagtgtaactgaaccaggaatatttcctccattcctgctctcccactgcacacagggtggtggcacattatccctctggggggtggggacgcctgttgttttggctcaatttgggtttgttggtcacatggagctcttccatttcgtttagctgaataatgagttgttcctagaggagacagcctgtctctccttgttgcccccaaagcccatgccctgccgtggtggcagctggggctgtggatgggaggggtccccaacatggatgtgttgcccctcctccgcatgccaacgcagttcatgtacaaggcccctctgcaactggagagaaaattaattcctatcccgtgagtggattgtgagaaattccacccacgtggagacagcttactgcagcactgttggtgttcggagctcttctgtgccctggctccatgctttcacctacacaagcatcaccttcctaatcaccgcggggcggggagcgtgtggctgtgccccttctctttaatctcatttaatttttattaaacatgctcagtacctgtgttgagaaaaggctttctttatcctaaagattattacctttttaaagtgctcttatattttcatgagtttttattttgtctctgagattttgtattccacattctagggtattctgtaatttggctccttaccaatattattaaaatcttattaaaatcta

SEQ ID NO: 124963 - DNA, 1972 bp, Homo sapiens
  Payload ID: 4538
  Gene Symbol: DCTD
  Gene Name: dCMP deaminase
  Uniprot ID: P32321
  ENST ID: ENST00000438320
  CDS Start-End: 292-828
tgaacaccgccggccggaccgcgggctgcgtcacggggaccgggaggcgtacggcgacgcggagcagcgcctttgcggcgtgcgacccgcccccgccgtccctccctccctcccctcagggcttcgggcccccggggccagccgccgtcctgcgaacgcgcggcgcccgggccgctgcccccttccggccccgcggcggccccgcctcctcccccgacttccttccctgagcacggcggcggcggggacgagcaccggcctgcgcgcggagccggcaccggatgacccaacatgagtgaagtttcctgcaagaaacgggacgactatttggaatggccagagtattttatggctgtggccttcttatcagcacagagaagcaaagatccaaattcccaggtcggcgcctgcatcgtgaattcagaaaacaagattgtcgggattgggtacaatgggatgccaaatgggtgcagtgatgacgtgttgccttggagaaggacagcagagaataagctggacaccaaatacccgtacgtgtgccatgcggagctgaatgccatcatgaacaaaaattcgaccgatgtgaaaggctgtagtatgtatgttgccttgttcccttgtaatgaatgcgctaagctcatcatccaggcaggtataaaagaagtgattttcatgtctgataaataccatgatagtgacgaggcaactgctgcgaggctcctgtttaatatggccggggtgacattccggaaattcataccgaagtgcagcaagattgtcattgactttgattcaattaacagcagaccgagtcaaaagcttcagtgagttacatctcattcaatctccagaagattgggattatcgtcttctaagaggttgctaatgcctttcatcttgaagttacacataacttcttactagccagtatggcaaaagtaggcatctaaagaatataaagcctcaaatcttccttactgtctctcttgtcacatggaatctacatgtgtttgaactattgctttagggtttaaaataggggagcctgtggtggcctggtgcacagggctagaacgagagtgcctccccttcttgtgtcctggctggctgggatgctggtggctcttcagaggagcatcagctgtctgtcatctgctgcgatccggcagcctctcttcactgctacatgtgctggaaggacaaataaataattgtggttgtgttcttaatggggacgagcagacacactgatctgaacatctggcccaagtgaagcatggcatatagtgcccttggaagaaaattaggcctcaaatgacagtagcattgaagtgtttgctgcagagttgagggaaacccccagccaccctcccggaatccgagatagggtggcacatctgtcctgacagacgaggagtgtaactgaaccaggaatatttcctccattcctgctctcccactgcacacagggtggtggcacattatccctctggggggtggggacgcctgttgttttggctcaatttgggtttgttggtcacatggagctcttccatttcgtttagctgaataatgagttgttcctagaggagacagcctgtctctccttgttgcccccaaagcccatgccctgccgtggtggcagctggggctgtggatgggaggggtccccaacatggatgtgttgcccctcctccgcatgccaacgcagttcatgtacaaggcccctctgcaactggagagaaaattaattcctatcccgtgagtggattgtgagaaattccacccacgtggagacagcttactgcagcactgttggtgttcggagctcttctgtgccctggctccatgctttcacctacacaagcatcaccttcctaatcaccgcggggcggggagcgtgtggctgtgccccttctctttaatctcatttaatttttattaaacatgctcagtacctgtgttgagaaaa

SEQ ID NO: 124964 - DNA, 896 bp, Homo sapiens
  Payload ID: 4538
  Gene Symbol: DCTD
  Gene Name: dCMP deaminase
  ENST ID: ENST00000503820
  CDS Start-End: 676-896
gctgccgggcgggggcctggggccgcggacgctgggggcgcctcggccgcgctcagcctttagatcggagaatgcgggcggggtgggggcgctcggggtccccgcagtcactccagggtcgatttctcggcgggcgccgcggcctgtgcgaggccgggccccttggagtgccccgggaggtggtgctgggcgtctgaacaccacatcccttcctgcgcccgtgtgtgggttgggaatgccgggtgtaggccctggatcagagctgacggggttgcgagcggcgtggggtgtgcctgggacggtgaccggatgtgtcttcctgaatcgttgtattcgagctccagttctctctgtttctacagctgggcctcagtcctcacagggctctagtgggcgttcagccacaccaggagaaggcgcccaggggattaacaggacccttccctctcctgctcttccctcgccccccatggctccccctccctcctatttagtaggtacttctccagcaccccacagcgatgatggatgctggccctaaagccaggcactgccgccctgcactgtagcagatgcctaaataaagtgtggagcctgaagcagaagttttgggagatgcttgccttcctttagaccacattcctcgcctttctcaagatttctccgtgacccaacatgagtgaagtttcctgcaagaaacgggacgactatttggaatggccagagtattttatggctgtggccttcttatcagcacagagaagcaaagatccaaattcccaggtcggcgcctgcatcgtgaattcagaaaacaagattgtcgggattgggtacaatgggatgccaaatgggtgcagtgatgacgtgttgccttggagaaggacagcagagaataa

SEQ ID NO: 124965 - DNA, 1874 bp, Homo sapiens
  Payload ID: 4538
  Gene Symbol: DCTD
  Gene Name: dCMP deaminase
  ENST ID: ENST00000507543
  CDS Start-End: 49-183
cggcggcggcggggacgagcaccggcctgcgcgcggagccggcaccggatgctgggcctcagtcctcacagggctctagtgggcgttcagccacaccaggagaaggcgcccaggggattaacaggacccttccctctcctgctcttccctcgccccccatggctccccctccctcctatttagtagacccaacatgagtgaagtttcctgcaagaaacgggacgactatttggaatggccagagtattttatggctgtggccttcttatcagcacagagaagcaaagatccaaattcccaggtcggcgcctgcatcgtgaattcagaaaacaagattgtcgggattgggtacaatgggatgccaaatgggtgcagtgatgacgtgttgccttggagaaggacagcagagaataagctggacaccaaatacccgtacgtgtgccatgcggagctgaatgccatcatgaacaaaaattcgaccgatgtgaaaggctgtagtatgtatgttgccttgttcccttgtaatgaatgcgctaagctcatcatccaggcaggtataaaagaagtgattttcatgtctgataaataccatgatagtgacgaggcaactgctgcgaggctcctgtttaatatggccggggtgacattccggaaattcataccgaagtgcagcaagattgtcattgactttgattcaattaacagcagaccgagtcaaaagcttcagtgagttacatctcattcaatctccagaagattgggattatcgtcttctaagaggttgctaatgcctttcatcttgaagttacacataacttcttactagccagtatggcaaaagtaggcatctaaagaatataaagcctcaaatcttccttactgtctctcttgtcacatggaatctacatgtgtttgaactattgctttagggtttaaaataggggagcctgtggtggcctggtgcacagggctagaacgagagtgcctccccttcttgtgtcctggctggctgggatgctggtggctcttcagaggagcatcagctgtctgtcatctgctgcgatccggcagcctctcttcactgctacatgtgctggaaggacaaataaataattgtggttgtgttcttaatggggacgagcagacacactgatctgaacatctggcccaagtgaagcatggcatatagtgcccttggaagaaaattaggcctcaaatgacagtagcattgaagtgtttgctgcagagttgagggaaacccccagccaccctcccggaatccgagatagggtggcacatctgtcctgacagacgaggagtgtaactgaaccaggaatatttcctccattcctgctctcccactgcacacagggtggtggcacattatccctctggggggtggggacgcctgttgttttggctcaatttgggtttgttggtcacatggagctcttccatttcgtttagctgaataatgagttgttcctagaggagacagcctgtctctccttgttgcccccaaagcccatgccctgccgtggtggcagctggggctgtggatgggaggggtccccaacatggatgtgttgcccctcctccgcatgccaacgcagttcatgtacaaggcccctctgcaactggagagaaaattaattcctatcccgtgagtggattgtgagaaattccacccacgtggagacagcttactgcagcactgttggtgttcggagctcttctgtgccctggctccatgctttcacctacacaagcatcaccttcctaatcaccgcggggcggggagcgtgtggctgtgccccttctctttaatctcatttaatttttattaaacatgctcagtacctgtgttgagaaaa

SEQ ID NO: 124966 - DNA, 578 bp, Homo sapiens
  Payload ID: 4538
  Gene Symbol: DCTD
  Gene Name: dCMP deaminase
  ENST ID: ENST00000503182
  CDS Start-End: 72-578
accggccaagggtccccacggggacgctgcgacacagcgggctcactccagagacccaaaccagacccaacatgagtgaagtttcctgcaagaaacgggacgactatttggaatggccagagtattttatggctgtggccttcttatcagcacagagaagcaaagatccaaattcccaggtcggcgcctgcatcgtgaattcagaaaacaagattgtcgggattgggtacaatgggatgccaaatgggtgcagtgatgacgtgttgccttggagaaggacagcagagaataagctggacaccaaatacccgtacgtgtgccatgcggagctgaatgccatcatgaacaaaaattcgaccgatgtgaaaggctgtagtatgtatgttgccttgttcccttgtaatgaatgcgctaagctcatcatccaggcaggtataaaagaagtgattttcatgtctgataaataccatgatagtgacgaggcaactgctgcgaggctcctgtttaatatggccggggtgacattccggaaattcataccgaagtgcagcaagattgtcattgactttgattcaatt

SEQ ID NO: 124967 - DNA, 1027 bp, Homo sapiens
  Payload ID: 4538
  Gene Symbol: DCTD
  Gene Name: dCMP deaminase
  ENST ID: ENST00000503988
  CDS Start-End: 851-1027
tggcaccgtcccgagcgcgtggcgcggggcgctggctgccgggcgggggcctggggccgcggacgctgggggcgcctcggccgcgctcagcctttagatcggagaatgcgggcggggtgggggcgctcggggtccccgcagtcactccagggtcgatttctcggcgggcgccgcggcctgtgcgaggccgggccccttggagtgccccgggaggtggtgctgggcgtctgaacaccacatcccttcctgcgcccgtgtgtgggttgggaatgccgggtgtaggccctggatcagagctgacggggttgcgagcggcgtggggtgtgcctgggacggtgaccggatgtgtcttcctgaatcgttgtattcgagctccagttctctctgtttctacagctgggcctcagtcctcacagggctctagtgggcgttcagccacaccaggagaaggcgcccaggggattaacaggacccttccctctcctgctcttccctcgccccccatggctccccctccctcctatttagtaggtacttctccagcaccccacagcgatgatggatgctggccctaaagccaggcactgccgccctgcactgtagcagatgcctaaataaagtgtggagcctgaagcagaagttttgggagatgcttgccttcctttagaccacattcctcgcctttctcaagatttctccgtggtacccaccccgtttttgtgttgtcttccttccttgcccttgtttcattccttttgaaagcgaccactcccctgaagtcctaggacccccttcgtgggctctccctgccgtagacagtctctgcttgcccctgggagacagacccaacatgagtgaagtttcctgcaagaaacgggacgactatttggaatggccagagtattttatggctgtggccttcttatcagcacagagaagcaaagatccaaattcccaggtcggcgcctgcatcgtgaattcagaaaacaagattgtcgggattgggtacaatgggatgccaaatggg

SEQ ID NO: 124968 - DNA, 683 bp, Homo sapiens
  Payload ID: 4538
  Gene Symbol: DCTD
  Gene Name: dCMP deaminase
  ENST ID: ENST00000512766
  CDS Start-End: 327-683
agggcttcgggcccccggggccagccgccgtcctgcgaacgcgcggcgcccgggccgctgcccccttccggccccgcggcggccccgcctcctcccccgacttccttccctgagcacggcggcggcggggacgagcaccggcctgcgcgcggagccggcaccggatggtgggcgggggccagccgtgcgggcactgccgccctgcactgtagcagatgcctaaataaagtgtggagcctgaagcagaagttttgggagatgcttgccttcctttagaccacattcctcgcctttctcaagatttctccgtgggagacagacccaacatgagtgaagtttcctgcaagaaacgggacgactatttggaatggccagagtattttatggctgtggccttcttatcagcacagagaagcaaagatccaaattcccaggtcggcgcctgcatcgtgaattcagaaaacaagattgtcgggattgggtacaatgggatgccaaatgggtgcagtgatgacgtgttgccttggagaaggacagcagagaataagctggacaccaaatacccgtacgtgtgccatgcggagctgaatgccatcatgaacaaaaattcgaccgatgtgaaaggctgtagtatgtatgttgccttgttcccttgtaatgaatgcgctaagctcatcatccag

SEQ ID NO: 124969 - DNA, 564 bp, Homo sapiens
  Payload ID: 4538
  Gene Symbol: DCTD
  Gene Name: dCMP deaminase
  ENST ID: ENST00000509757
  CDS Start-End: 65-199
cttccttccctgagcacggcggcggcggggacgagcaccggcctgcgcgcggagccggcaccggatgctgggcctcagtcctcacagggctctagtgggcgttcagccacaccaggagaaggcgcccaggggattaacaggacccttccctctcctgctcttccctcgccccccatggctccccctccctcctatttagtaggtacttctccagcaccccacagcgatgatggatgctggccctaaagccaggcactgccgccctgcactgtagcagatgcctaaataaagtgtggagcctgaagcagaagttttgggagatgcttgccttcctttagaccacattcctcgcctttctcaagatttctccgtgacccaacatgagtgaagtttcctgcaagaaacgggacgactatttggaatggccagagtattttatggctgtggccttcttatcagcacagagaagcaaagatccaaattcccaggtcggcgcctgcatcgtgaattcagaaaacaagattgtcgggattgggtacaatgggatgccaaatgggtgcagtg

SEQ ID NO: 124970 - DNA, 645 bp, Homo sapiens
  Payload ID: 4538
  Gene Symbol: DCTD
  Gene Name: dCMP deaminase
  ENST ID: ENST00000514754
  CDS Start-End: 350-645
ggttgccaggcctctcagatgtggggcagcgtaatcagtgggtgaccgtggttcccagcacccactctccactgcatccttgtcttaggcactgccgccctgcactgtagcagatgcctaaataaagtgtggagcctgaagcagaagttttgggagatgcttgccttcctttagaccacattcctcgcctttctcaagatttctccgtggtacccaccccgtttttgtgttgtcttccttccttgcccttgtttcattccttttgaaagcgaccactcccctgaagtcctaggacccccttcgtgggctctccctgccgtagacagtctctgcttgcccctgacccaacatgagtgaagtttcctgcaagaaacgggacgactatttggaatggccagagtattttatggctgtggccttcttatcagcacagagaagcaaagatccaaattcccaggtcggcgcctgcatcgtgaattcagaaaacaagattgtcgggattgggtacaatgggatgccaaatgggtgcagtgatgacgtgttgccttggagaaggacagcagagaataagctggacaccaaatacccgtacgtgtgccatgcggagctgaatgccatcatgaacaaaaattcgaccgatgtgaa

SEQ ID NO: 124971 - DNA, 794 bp, Homo sapiens
  Payload ID: 4538
  Gene Symbol: DCTD
  Gene Name: dCMP deaminase
  Uniprot ID: P32321
  ENST ID: ENST00000510370
  CDS Start-End: 231-767
ctcctcccccgacttccttccctgagcacggcggcggcggggacgagcaccggcctgcgcgcggagccggcaccggatggtgggcgggggccagccgtgcgggcactgccgccctgcactgtagcagatgcctaaataaagtgtggagcctgaagcagaagttttgggagatgcttgccttcctttagaccacattcctcgcctttctcaagatttctccgtgacccaacatgagtgaagtttcctgcaagaaacgggacgactatttggaatggccagagtattttatggctgtggccttcttatcagcacagagaagcaaagatccaaattcccaggtcggcgcctgcatcgtgaattcagaaaacaagattgtcgggattgggtacaatgggatgccaaatgggtgcagtgatgacgtgttgccttggagaaggacagcagagaataagctggacaccaaatacccgtacgtgtgccatgcggagctgaatgccatcatgaacaaaaattcgaccgatgtgaaaggctgtagtatgtatgttgccttgttcccttgtaatgaatgcgctaagctcatcatccaggcaggtataaaagaagtgattttcatgtctgataaataccatgatagtgacgaggcaactgctgcgaggctcctgtttaatatggccggggtgacattccggaaattcataccgaagtgcagcaagattgtcattgactttgattcaattaacagcagaccgagtcaaaagcttcagtgagttacatctcattcaatctccagaaga

SEQ ID NO: 124972 - DNA, 592 bp, Homo sapiens
  Payload ID: 4538
  Gene Symbol: DCTD
  Gene Name: dCMP deaminase
  ENST ID: ENST00000510307
  CDS Start-End: 232-592
atcgttgtattcgagctccagttctctctgtttctacagctgggcctcagtcctcacagggctctagtgggcgttcagccacaccaggagaaggcgcccaggggattaacaggacccttccctctcctgctcttccctcgccccccatggctccccctccctcctatttagtaggtacttctccagcaccccacagcgatgatggatgctggccctaaagccagacccaacatgagtgaagtttcctgcaagaaacgggacgactatttggaatggccagagtattttatggctgtggccttcttatcagcacagagaagcaaagatccaaattcccaggtcggcgcctgcatcgtgaattcagaaaacaagattgtcgggattgggtacaatgggatgccaaatgggtgcagtgatgacgtgttgccttggagaaggacagcagagaataagctggacaccaaatacccgtacgtgtgccatgcggagctgaatgccatcatgaacaaaaattcgaccgatgtgaaaggctgtagtatgtatgttgccttgttcccttgtaatgaatgcgctaagctcatcatccaggcag

SEQ ID NO: 124973 - DNA, 879 bp, Homo sapiens
  Payload ID: 4538
  Gene Symbol: DCTD
  Gene Name: dCMP deaminase
  ENST ID: ENST00000507631
  CDS Start-End: 94-219
gccccgcctcctcccccgacttccttccctgagcacggcggcggcggggacgagcaccggcctgcgcgcggagccggcaccggatgacccaacatgagtgaagtttcctgcaagaaacgggacgactatttggaatggccagagtattttatggctgtggccttcttatcagcacagagaagcaaagatccaaattcccagtgtgccatgcggagctgaatgccatcatgaacaaaaattcgaccgatgtgaaaggctgtagtatgtatgttgccttgttcccttgtaatgaatgcgctaagctcatcatccaggcaggtataaaagaagtgattttcatgtctgataaataccatgatagtgacgaggcaactgctgcgaggctcctgtttaatatggccggggtgacattccggaaattcataccgaagtgcagcaagattgtcattgactttgattcaattaacagcagaccgagtcaaaagcttcagtgagttacatctcattcaatctccagaagattgggattatcgtcttctaagaggttgctaatgcctttcatcttgaagttacacataacttcttactagccagtatggcaaaagtaggcatctaaagaatataaagcctcaaatcttccttactgtctctcttgtcacatggaatctacatgtgtttgaactattgctttagggtttaaaataggggagcctgtggtggcctggtgcacagggctagaacgagagtgcctccccttcttgtgtcctggctggctgggatgctggtggctcttcagaggagcatcagctgtctgtcatctgctgcgatccggcagcctctcttcactgctacatgtgctggaaggacaaataaataatt

SEQ ID NO: 124974 - DNA, 1829 bp, Homo sapiens
  Payload ID: 4538
  Gene Symbol: DCTD
  Gene Name: dCMP deaminase
  ENST ID: ENST00000500813
  CDS Start-End: 90-215
cctgagcacggcggcggcggggacgagcaccggcctgcgcgcggagccggcaccggatggtgggcgggggccagccgtgcggacccaacatgagtgaagtttcctgcaagaaacgggacgactatttggaatggccagagtattttatggctgtggccttcttatcagcacagagaagcaaagatccaaattcccagtgtgccatgcggagctgaatgccatcatgaacaaaaattcgaccgatgtgaaaggctgtagtatgtatgttgccttgttcccttgtaatgaatgcgctaagctcatcatccaggcaggtataaaagaagtgattttcatgtctgataaataccatgatagtgacgaggcaactgctgcgaggctcctgtttaatatggccggggtgacattccggaaattcataccgaagtgcagcaagattgtcattgactttgattcaattaacagcagaccgagtcaaaagcttcagtgagttacatctcattcaatctccagaagattgggattatcgtcttctaagaggttgctaatgcctttcatcttgaagttacacataacttcttactagccagtatggcaaaagtaggcatctaaagaatataaagcctcaaatcttccttactgtctctcttgtcacatggaatctacatgtgtttgaactattgctttagggtttaaaataggggagcctgtggtggcctggtgcacagggctagaacgagagtgcctccccttcttgtgtcctggctggctgggatgctggtggctcttcagaggagcatcagctgtctgtcatctgctgcgatccggcagcctctcttcactgctacatgtgctggaaggacaaataaataattgtggttgtgttcttaatggggacgagcagacacactgatctgaacatctggcccaagtgaagcatggcatatagtgcccttggaagaaaattaggcctcaaatgacagtagcattgaagtgtttgctgcagagttgagggaaacccccagccaccctcccggaatccgagatagggtggcacatctgtcctgacagacgaggagtgtaactgaaccaggaatatttcctccattcctgctctcccactgcacacagggtggtggcacattatccctctggggggtggggacgcctgttgttttggctcaatttgggtttgttggtcacatggagctcttccatttcgtttagctgaataatgagttgttcctagaggagacagcctgtctctccttgttgcccccaaagcccatgccctgccgtggtggcagctggggctgtggatgggaggggtccccaacatggatgtgttgcccctcctccgcatgccaacgcagttcatgtacaaggcccctctgcaactggagagaaaattaattcctatcccgtgagtggattgtgagaaattccacccacgtggagacagcttactgcagcactgttggtgttcggagctcttctgtgccctggctccatgctttcacctacacaagcatcaccttcctaatcaccgcggggcggggagcgtgtggctgtgccccttctctttaatctcatttaatttttattaaacatgctcagtacctgtgttgagaaaaggctttctttatcctaaagattattacctttttaaagtgctcttatattttcatgagtttttattttgtctctgagattttgtattccacattctagggtattctgtaatttggctccttaccaatattattaaaatcttattaaaatctaccctaccaaagcatgtacatttttatgttattataattatatgc

SEQ ID NO: 124975 - DNA, 615 bp, Homo sapiens
  Payload ID: 4538
  Gene Symbol: DCTD
  Gene Name: dCMP deaminase
  ENST ID: ENST00000513348
  CDS Start-End: 33-86
gagcaccggcctgcgcgcggagccggcaccggatggtgggcgggggccagccgtgcggctgggcctcagtcctcacagggctctagtgggcgttcagccacaccaggagaaggcgcccaggggattaacaggacccttccctctcctgctcttccctcgccccccatggctccccctccctcctatttagtaggtacttctccagcaccccacagcgatgatggatgctggccctaaagccaggcactgccgccctgcactgtagcagatgcctaaataaagtgtggagcctgaagcagaagttttgggagatgcttgccttcctttagaccacattcctcgcctttctcaagatttctccgtgacccaacatgagtgaagtttcctgcaagaaacgggacgactatttggaatggccagagtattttatggctgtggccttcttatcagcacagagaagcaaagatccaaattcccaggtcggcgcctgcatcgtgaattcagaaaacaagattgtcgggattgggtacaatgggatgccaaatgggtgcagtgatgacgtgttgccttggagaaggacagcagagaataagctggacaccaaatacccgtacg

SEQ ID NO: 124976 - DNA, 332 bp, Homo sapiens
  Payload ID: 4538
  Gene Symbol: DCTD
  Gene Name: dCMP deaminase
  ENST ID: ENST00000508994
  CDS Start-End: 262-332
gcgaacgcgcggcgcccgggccgctgcccccttccggccccgcggcggccccgcctcctcccccgacttccttccctgagcacggcggcggcggggacgagcaccggcctgcgcgcggagccggcaccggatggcactgccgccctgcactgtagcagatgcctaaataaagtgtggagcctgaagcagaagttttgggagatgcttgccttcctttagaccacattcctcgcctttctcaagatttctccgtgacccaacatgagtgaagtttcctgcaagaaacgggacgactatttggaatggccagagtattttatggctgtggcctt

SEQ ID NO: 124977 - DNA, 568 bp, Homo sapiens
  Payload ID: 4538
  Gene Symbol: DCTD
  Gene Name: dCMP deaminase
  ENST ID: ENST00000509218
  CDS Start-End: 66-200
acttccttccctgagcacggcggcggcggggacgagcaccggcctgcgcgcggagccggcaccggatgctgggcctcagtcctcacagggctctagtgggcgttcagccacaccaggagaaggcgcccaggggattaacaggacccttccctctcctgctcttccctcgccccccatggctccccctccctcctatttagtaggtacttctccagcaccccacagcgatgatggatgctggccctaaagccaggcactgccgccctgcactgtagcagatgcctaaataaagtgtggagcctgaagcagaagttttgggagatgcttgccttcctttagaccacattcctcgcctttctcaagatttctccgtgggagacagacccaacatgagtgaagtttcctgcaagaaacgggacgactatttggaatggccagagtattttatggctgtggccttcttatcagcacagagaagcaaagatccaaattcccaggtcggcgcctgcatcgtgaattcagaaaacaagattgtcgggattgggtacaatgggatgccaaatgggtg

SEQ ID NO: 124978 - DNA, 7954 bp, Homo sapiens
  Payload ID: 4539
  Gene Symbol: DCUN1D1
  Gene Name: DCN1, defective in cullin neddylation 1, domain containing 1
  Uniprot ID: Q96GG9
  ENST ID: ENST00000292782
  CDS Start-End: 155-934
cgaggtccggggctgcctcctcgggccgcgccgggccgccccgcactgcgcatgagcgggagccgggcaagcccgtgagaggagccgccgccgccgccgccgtccattcgctgcggagccggaggaggaggggagaggcctggaggacaccaacatgaacaagttgaaatcatcgcagaaggataaagttcgtcagtttatgatcttcacacaatctagtgaaaaaacagcagtaagttgtctttctcaaaatgactggaagttagatgttgcaacagataattttttccaaaatcctgaactttatatacgagagagtgtaaaaggatcattggacaggaagaagttagaacagctgtacaatagatacaaagaccctcaagatgagaataaaattggaatagatggcatacagcagttctgtgatgacctggcactcgatccagccagcattagtgtgttgattattgcgtggaagttcagagcagcaacacagtgcgagttctccaaacaggagttcatggatggcatgacagaattaggatgtgacagcatagaaaaactaaaggcccagatacccaagatggaacaagaattgaaagaaccaggacgatttaaggatttttaccagtttacttttaattttgcaaagaatccaggacaaaaaggattagatctagaaatggccattgcctactggaacttagtgcttaatggaagatttaaattcttagacttatggaataaatttttgttggaacatcataaacgatcaataccaaaagacacttggaatcttcttttagacttcagtacgatgattgcagatgacatgtctaattatgatgaagaaggagcatggcctgttcttattgatgactttgtggaatttgcacgccctcaaattgctgggacaaaaagtacaacagtgtagcactaaaggaaccttctagaatgtacatagtctgtacaataaatacaacagaaaattgcacagtcaatttctgctggctggactgaactgaagatcaatcctcacaattcagactgagggttgagacaaaactttaaggatacatcttggaccatatcgtatttcattcttctaatggtggtttgggcttgtcttctagtctgggccgctctaaacatttataattccaacattgtggatttcatcttatatctgtggaccatcctagtttattctcccataagtcttagaagctttatggtgattattttgaggttttcattctcgcataaagcacaatgctgtcttcatcagaaaacagttggcataagaattaaacatatgaacatcacaaaacaatttataaaaacttcttaaatatacgctttgggctagttgcaaagactatgctaatagcacttccagtgagagtgatatatttaagtgtactggatctggaatggtgttttggtttggggggaattttttttttttcctggcaaatcacatgtgttgttgatgtgagtatctgatgaaaaaacaatgtcagaataaccgacatgaaaattttttaggataacttggtgcctacctgaaaaatgtattgtgttttagactcttgatttcaaaaggttccacagaactagtctgcgcttaccttacccatgtttatatatagctgtcctacagggagcttttatttagaaaatgtctgcataatgttagattcttctcctgtctacattatgcactacataattggacttcattatgcttttgaaatgcttatctgcctgtcacataagttaaactatttaatttgttttgaatgttttggattgctacacaatacaatattctaaatttaggcatgagggtttttttgttttgtttttactttttttttgtcatcgcactatggaacacaaatggaattctcttaatttataagaagatagttgcagttaaattttgaaaatggttgtaatgagccatgaagttcaatctttataatataggtactgctctttcagacaaatagtccattttcgatgacttattattttgttgaaattgctttaactgctaatcactgtggttgccaaatatttacttcaggagcaaagattttcaaacaagcatacacgatgcaaaataccaatctggcttctagtctctttactgttttcgtttcactcagattagctcagttttctcatcaaagcagaatgctatcttgtatgtatttttttcattacaagccccatgagctgcttttatgctgaaaatggtcatttccctgttcacttactgacatgtgaagaagggtttcttgctttcttaaacatttccgtaaggcaggctagaaatgtaatacttcaaatgtttgatgattatggtcttttgataggaatagattctgcttgggatatatatccaggcactctctaaggtctagggttgatattaacaaaggaatgtacttagaatagcagtacattttatgcaaatatggaaattattttaagaaacaatgacatatcaaaactgctttttacatgattttgaaatagactagaaagctttccctatagacatattaatattccaatcataactttaattcaagaatgcagttttaccaaaagaaaaatttgaaaatttctattcaggctactggaattggttattaaaagaaaaaggaaaaagaagaatcttgctgctttcagtatttcctgatttttttgtaaatataaagaggaacttcaattatgaaaaatttttaaaagatatatatatctatatatctatatatatgtactgttttgtttcctgtcttgaagattttgagttatggttattggtttcagattgattaattcacatatgctgtgttttgaaatgagatcccattagcttttttttttttttttttttttcaatataaagtgttttctttaaaagtcatattggttcgtggcctagtgccttggattttacatatttttctttttaaatgcaaaaccttttcaacaaaatagtgtttgtcatcaggttggtactaaacatttataattactgtgtaattataaacaaaaatacataaagctttgaatataattatgtagcataaaagttaaggttgttcactatgatggcatcttagaattaaacaaaacttttactagggctgaaaagagaagactgatttaatgtggtgtgattattctgaagataaatgtctggctacagggaatattttgtactaaaaaatgattacacatatggctgtgtgtgtttgagtctgtgtctgtgagagagccagagagagtgagagagattgacagagaaagggagagacacacacacgccccttgaattgctttaactcctaagtgtttcagtcctcattccggtaaactccccatgctgattctttgttttaaactgaaccataggtacagtttcctttttgccaaatgtcaaaacaggtacaaattttaaaatgtaatgctttttaaatagaaaaatgtataaaattagaagtgcccacatataaaaaatacttgagatgaagattatctttagtgaatatcatctgcatatctctgtaagttcaattgtgtttcttacagtccctgtcatattaccaacagaggcaataaaagctgcagtgaaattgccatgactaaatcttttcacatatttcagtgtattttttttatagatttaaaatatacctgaaaacttttctaggaagaataattattcatggaaagagcattgtaatggcatgttttggggagaaaagacatgccaagtcttgtttactacatttaagatgtttacaactatactgggctgctttattaacaatactgtacttgcataatatggcattataagtacatgtccttccttagacttttaaaaagttttaatgagagaaagtaaatttactcaacaaaataacatgagaaatcctttacgtaatatctttactggggaattcttatttaagcaaggtacactattttttcctcagacttaaatgaatgaagtgttcatttattttttatttgatgataatcaagaagtgagtagtagtagctaacttaatgtacactttgcttaggtttttaaacatgttactattaagactacgtattgtaaaccttctgtaattttcacatatgaatgacaggagaaagttaaacctaatcgaaggagttttggaataaaaaagtggtgctggggaaattcaccatggttcacaaagtatgcctttgtaaaactgaatcaacttttagcaagaattaatttatgtagttttaaatgttaaattgtgtatatttaacagaaaatacttatctggcacctcagcagttttaatgttaccttatacttttaacagtatgatttatattgaatacttagatgttttcataagattttatcaaatttgataatgtaatgataaaatgtttttttaaatgtgaactatttaacatataaatggggacacaaaacctgaattgtgatttctacataatgtgataattagggttcaaattatgactcatcatttaattgattataaatgagtatatttctgaactctttattgcctccatttttacaatcataatatagcaataatttctatttttatttcataggactgtggtgaagttatttatcatgacacctttatctttgatttctgagggaaaggggtgtatattttgtagttaagataaatgagaaagttcctaatagtacaaatgcccttttccaggtttatctttgctatttgttgccatttttcttaaatatttgctttatttgtacccgatttctggaggcaaatagtgctgttttttcaaactcataatatagttacataaatgattttatcagagcattcttgctatcttattttctttcctacctgttgagtaagtagcatttcttgctcaccaactcatttatttgactaggttcagtgtttcctattaatgtgtttttttattttcctttggttgattttgaaaaatctgtcacaaataaggaagttatggtaaaagatgcacagcctttgtagttagtggaattctcaataagtaatgtctttatggagttttaaagggaaattatttaaagggaatcatgttatagttgtccattttttaaattgagattttaaaagtgtttttaagtatagcccaattttctatttacttacaagtgcttcatgattgttttcttttttattttttgccatcatgctgtgcagaaatcataatgtagcttgtaatacttcagagcattggtcttgaagctgtaacttggggctgctgtccttcatgaggtagggccatagcaggcaggccctttcccacttcctttatggcattctacttttatctgttgtaggctgttagtgtttcatattcgatttggtttggggaaaaatactcagttaaaaaaattttttttaatgattggctttagagggactgttacctctttggcatatctgtcagcggaatggaaagaaatggagtcagactgaaattcatgccagcttaatcactgaaggcagcactgctttgaaaagaagaattttcaacccacatcgtaaaaacaaagcctgattggaaacaatgaagtgtttgaaacttaggggcagcatgtaagtggcttaatgagcaaacaaacggaacatactcattttatatttaaaaagtacatatatattcaaatgcatgttcatatgaatattataattttatttcaggttatgaaatattctgagaaaaccttatatctgatggaaaacttgggcaatacccaatacgaagcaagagatttttacaaaaagaaatactatagggcataaggttgggggaagaccaattaatgaaatggctaagggacaatgctaattaaatcgttaacagtgattttgtcacataattacatgacttatagctaaaagagcaatatttaatcagtaagatttagagatgggtgtacttggaatcctttgaaagcagcgtgtttagttttcaagcaaatgctaatgttcttaatcctaatagtatattagacttcgttgtgttgaatatatcaaatgaacgaactatgaaccagagctttaaaatagtgatttgtaagactttgttacaatggtacttaaaaaattgctttgtataatttacacactgtaaaattcacccattgtacatgtacaattaattgtttttagtaaacttaagagttgtgcagtccaattttagaacatgtccatcagcccccaaaatttactcctgctgctctgcggttaatttgctcctgcctccagccccacgcagccacactgatctgctttctgtacagatttaccctttctagaaatttcacagaggtagaatcatgcagttagtcttttatatctggcatctttcacttagcatgtttttgaggttcatccatgttgcagcttatacctgcgtgtagttcctttagttgctgacttagtgttcactgtttggatataccacattttgtttatccattcaccagttgatagacatttggctggcctacaattagtttttttaaattgcgaataataatgctatgaacattcataaatgtctttgtgtggacatgttttcatctcagattcctagttgtggaattgtcaggttgtgtggtaaatttatacctaacgtttttaaaaaaactgctgaactttttccaaagtggctgtacttctagaactattcctgccacagtgcatgcggactgccgtgtctgcacatccttgccaatacttgtcttttttattgcagccatcctggcgggtatttactttatgtgtgtgagttatacctaggcatcccaactcgtgtatcgattggatgtgcagtttgagtgagtttcaagtggcctcagcgattgctgtaaaattagttactctagtagacatgtactctcttggaggtagtattttctgtagtcagtgagggtaataataatacttccagtgggggttccagtccctcagtgatctctggtgagaagaaatgtgtcagcgaagagtggtgctgatggctggtgctttggctctgttattgtttgtaccaaggttgatacagctactcgactagcctatgactgactggtggtggtaattaaactttgtacagattactgtgtgcagatagttactgtcttaatattaagtttcccagagattttacttttgagatagctgagaattaacgactcttggaatttataaaaatttagttgataccatttagttgctgccagctgcctgtgttcttatacataggagacatcggagtgagtgctttttaaaaaattaatggcgtatgtcaggtatatgtaaaaggacaattgcataatgaactcatgttaacatgatcaatccatggccaatcttgatttatctaaatgccattcatctttgaacccctatttattttgaagcaaatcccagatagcaaatcatttcatttgtaaatatttcaatatgtatgtctaaaagataaggactgttaaataaaaccacaattctgttgttagacttaactgttaacagtttgttagtgttaataactacccagcagtgttcaagttgtgcctttttttttttttttccaattcaagtcaggattcaaataagattcctacattgcatacatctcaaatgtcctacccagtggatccccacactctccactctttggcttcaaattcatttttttgaaaaaacaatgattgctttagcactttaaatttctatgcaatttcaaatgtaaggtgaaattttgatgtacttaataaaaaaattctaacgaatatatttttcaagttaatgtagtatataagaagctattatatcaacagattttcctttaacttaaaaatacatcgtgacttgta

SEQ ID NO: 124979 - DNA, 504 bp, Homo sapiens
  Payload ID: 4539
  Gene Symbol: DCUN1D1
  Gene Name: DCN1, defective in cullin neddylation 1, domain containing 1
  ENST ID: ENST00000497606
  CDS Start-End: 119-504
agggggcaacggccttgcccctgcccctctgccggctccattgtgtctggtcggggactggggtctggggttccggaacaagttgaaatcatcgcagaaggataaagttcgtcagtttatgatcttcacacaatctagtgaaaaaacagcagtaagttgtctttctcaaaatgactggaagttagatgttgcaacagataattttttccaaaatcctgaactttatatacgagagagtgtaaaaggatcattggacaggaagaagttagaacagctgtacaatagatacaaagaccctcaagatgagaataaaattggaatagatggcatacagcagttctgtgatgacctggcactcgatccagccagcattagtgtgttgattattgcgtggaagttcagagcagcaacacagtgcgagttctccaaacaggagttcatggatggcatgacagaattaggatgtgacagcatagaaaaactaaaggcccagatacccaagat

SEQ ID NO: 124980 - DNA, 560 bp, Homo sapiens
  Payload ID: 4539
  Gene Symbol: DCUN1D1
  Gene Name: DCN1, defective in cullin neddylation 1, domain containing 1
  ENST ID: ENST00000487822
  CDS Start-End: 284-560
ttgctgggtctccactcctagctgttactgcaagtccatgcctctaccatgagggtggaggagttaagatcaacagatccacatgtaccttgaggtgacagactggctctggtgaatattcccattttcctttttagaagccgcccccagctgctcaacttatccgccgccgctcgtgcccgcttccagcctgcgtagacccggccgtggtcgtccggaaggaaccgcgtaggaaacggagaacaagttgaaatcatcgcagaaggataaagttcgtcagtttatgatcttcacacaatctagtgaaaaaacagcagtaagttgtctttctcaaaatgactggaagttagatgttgcaacagataattttttccaaaatcctgaactttatatacgagagagtgtaaaaggatcattggacaggaagaagttagaacagctgtacaatagatacaaagaccctcaagatgagaataaaattggaatagatggcatacagcagttctgtgatgacctggcactcgatccagccagcattagtgtgttgattattgcgtgga

SEQ ID NO: 124981 - DNA, 659 bp, Homo sapiens
  Payload ID: 4539
  Gene Symbol: DCUN1D1
  Gene Name: DCN1, defective in cullin neddylation 1, domain containing 1
  ENST ID: ENST00000492563
  CDS Start-End: 32-139
ggaggaggggagaggcctggaggacaccaacatgaacaagttgaaatcatcgcagaaggataaagttcgtcagtttatgatcttcacacaatctagtgaaaaaacagcaaccctcaagatgagaataaaattggaatagatggcatacagcagttctgtgatgacctggcactcgatccagccagcattagtgtgttgattattgcgtggaagttcagagcagcaacacagtgcgagttctccaaacaggagttcatggatggcatgacagaattaggatgtgacagcatagaaaaactaaaggcccagatacccaagatggaacaagaattgaaagaaccaggacgatttaaggatttttaccagtttacttttaattttgcaaagaatccaggacaaaaaggattagatctagaaatggccattgcctactggaacttagtgcttaatggaagatttaaattcttagacttatggaataaatttttgttggaacatcataaacgatcaataccaaaagacacttggaatcttcttttagacttcagtacgatgattgcagatgacatgtctaattatgatgaagaaggagcatggcctgttcttattgatgactttgtggaatttgcacgccctcaaattgctgggacaaaaagtac

SEQ ID NO: 124982 - DNA, 970 bp, Homo sapiens
  Payload ID: 4539
  Gene Symbol: DCUN1D1
  Gene Name: DCN1, defective in cullin neddylation 1, domain containing 1
  ENST ID: ENST00000469954
  CDS Start-End: 176-910
ggtggtcttggacagtttctcattgctgggtctccactcctagctgttactgcaagtccatgcctctaccatgagggtggaggagttaagatcaacagatccacatgtaccttgaggtgacagactggctctgaacaagttgaaatcatcgcagaaggataaagttcgtcagtttatgatcttcacacaatctagtgaaaaaacagcagtaagttgtctttctcaaaatgactggaagttagatgttgcaacagataattttttccaaaatcctgaactttatatacgagagagtgtaaaaggatcattggacaggaagaagttagaacagctgtacaatagatacaaagaccctcaagatgagaataaaattggaatagatggcatacagcagttctgtgatgacctggcactcgatccagccagcattagtgtgttgattattgcgtggaagttcagagcagcaacacagtgcgagttctccaaacaggagttcatggatggcatgacagaattaggatgtgacagcatagaaaaactaaaggcccagatacccaagatggaacaagaattgaaagaaccaggacgatttaaggatttttaccagtttacttttaattttgcaaagaatccaggacaaaaaggattagatctagaaatggccattgcctactggaacttagtgcttaatggaagatttaaattcttagacttatggaataaatttttgttggaacatcataaacgatcaataccaaaagacacttggaatcttcttttagacttcagtacgatgattgcagatgacatgtctaattatgatgaagaaggagcatggcctgttcttattgatgactttgtggaatttgcacgccctcaaattgctgggacaaaaagtacaacagtgtagcactaaaggaaccttctagaatgtacatagtctgtacaataaatacaacagaaaattgca

SEQ ID NO: 124983 - DNA, 567 bp, Homo sapiens
  Payload ID: 4539
  Gene Symbol: DCUN1D1
  Gene Name: DCN1, defective in cullin neddylation 1, domain containing 1
  ENST ID: ENST00000460412
  CDS Start-End: 274-567
attgctgggtctccactcctagctgttactgcaagtccatgcctctaccatgagggtggaggagttaagatcaacagatccacatgtaccttgaggtgacagactggctctgagtttcgctcttgttgcccaggctgaagtgcaatggcgtgatcttggctcaccgcaacctccgcctcccgggttcaagcgattctcctgcctcagcctcccaagtagctgggattacagaacaagttgaaatcatcgcagaaggataaagttcgtcagtttatgatcttcacacaatctagtgaaaaaacagcagtaagttgtctttctcaaaatgactggaagttagatgttgcaacagataattttttccaaaatcctgaactttatatacgagagagtgtaaaaggatcattggacaggaagaagttagaacagctgtacaatagatacaaagaccctcaagatgagaataaaattggaatagatggcatacagcagttctgtgatgacctggcactcgatccagccagcattagtgtgttgattattgcgtggaagttcagagcagcaaca

SEQ ID NO: 124984 - DNA, 461 bp, Homo sapiens
  Payload ID: 4539
  Gene Symbol: DCUN1D1
  Gene Name: DCN1, defective in cullin neddylation 1, domain containing 1
  ENST ID: ENST00000466812
  CDS Start-End: 237-461
tagctgttactgcaagtccatgcctctaccatgagggtggaggagttaagatcaacagatccacatgtaccttgaggtgacagactggctctgccgcccccagctgctcaacttatccgccgccgctcgtgcccgcttccagcctgcgtagacccggccgtggtcgtccggaaggaaccgcgtaggaaacggagaacaagttgaaatcatcgcagaaggataaagttcgtcagtttatgatcttcacacaatctagtgaaaaaacagcagtaagttgtctttctcaaaatgactggaagttagatgttgcaacagataattttttccaaaatcctgaactttatatacgagagagtgtaaaaggatcattggacaggaagaagttagaacagctgtacaatagatacaaagaccctcaagatgagaataaaattggaatagatggcatacagcagttctgt

SEQ ID NO: 124985 - DNA, 3147 bp, Homo sapiens
  Payload ID: 4539
  Gene Symbol: DCUN1D1
  Gene Name: DCN1, defective in cullin neddylation 1, domain containing 1
  ENST ID: ENST00000632685
  CDS Start-End: 95-829
attcgctgcggagccggaggaggaggggagaggcctggaggacaccaacatgaacaagttgaaatcatcgcagaaggataaagttcgtcagtttatgatcttcacacaatctagtgaaaaaacagcagtaagttgtctttctcaaaatgactggaagttagatgttgcaacagataattttttccaaaatcctgaactttatatacgagagagtgtaaaaggatcattggacaggaagaagttagaacagctgtacaatagatacaaagaccctcaagatgagaataaaattggaatagatggcatacagcagttctgtgatgacctggcactcgatccagccagcattagtgtgttgattattgcgtggaagttcagagcagcaacacagtgcgagttctccaaacaggagttcatggatggcatgacagaattaggatgtgacagcatagaaaaactaaaggcccagatacccaagatggaacaagaattgaaagaaccaggacgatttaaggatttttaccagtttacttttaattttgcaaagaatccaggacaaaaaggattagatctagaaatggccattgcctactggaacttagtgcttaatggaagatttaaattcttagacttatggaataaatttttgttggaacatcataaacgatcaataccaaaagacacttggaatcttcttttagacttcagtacgatgattgcagatgacatgtctaattatgatgaagaaggagcatggcctgttcttattgatgactttgtggaatttgcacgccctcaaattgctgggacaaaaagtacaacagtgtagcactaaaggaaccttctagaatgtacatagtctgtacaataaatacaacagaaaattgcacagtcaatttctgctggctggactgaactgaagatcaatcctcacaattcagactgagggttgagacaaaactttaaggatacatcttggaccatatcgtatttcattcttctaatggtggtttgggcttgtcttctagtctgggccgctctaaacatttataattccaacattgtggatttcatcttatatctgtggaccatcctagtttattctcccataagtcttagaagctttatggtgattattttgaggttttcattctcgcataaagcacaatgctgtcttcatcagaaaacagttggcataagaattaaacatatgaacatcacaaaacaatttataaaaacttcttaaatatacgctttgggctagttgcaaagactatgctaatagcacttccagtgagagtgatatatttaagtgtactggatctggaatggtgttttggtttggggggaattttttttttttcctggcaaatcacatgtgttgttgatgtgagtatctgatgaaaaaacaatgtcagaataaccgacatgaaaattttttaggataacttggtgcctacctgaaaaatgtattgtgttttagactcttgatttcaaaaggttccacagaactagtctgcgcttaccttacccatgtttatatatagctgtcctacagggagcttttatttagaaaatgtctgcataatgttagattcttctcctgtctacattatgcactacataattggacttcattatgcttttgaaatgcttatctgcctgtcacataagttaaactatttaatttgttttgaatgttttggattgctacacaatacaatattctaaatttaggcatgagggtttttttgttttgtttttactttttttttgtcatcgcactatggaacacaaatggaattctcttaatttataagaagatagttgcagttaaattttgaaaatggttgtaatgagccatgaagttcaatctttataatataggtactgctctttcagacaaatagtccattttcgatgacttattattttgttgaaattgctttaactgctaatcactgtggttgccaaatatttacttcaggagcaaagattttcaaacaagcatacacgatgcaaaataccaatctggcttctagtctctttactgttttcgtttcactcagattagctcagttttctcatcaaagcagaatgctatcttgtatgtatttttttcattacaagccccatgagctgcttttatgctgaaaatggtcatttccctgttcacttactgacatgtgaagaagggtttcttgctttcttaaacatttccgtaaggcaggctagaaatgtaatacttcaaatgtttgatgattatggtcttttgataggaatagattctgcttgggatatatatccaggcactctctaaggtctagggttgatattaacaaaggaatgtacttagaatagcagtacattttatgcaaatatggaaattattttaagaaacaatgacatatcaaaactgctttttacatgattttgaaatagactagaaagctttccctatagacatattaatattccaatcataactttaattcaagaatgcagttttaccaaaagaaaaatttgaaaatttctattcaggctactggaattggttattaaaagaaaaaggaaaaagaagaatcttgctgctttcagtatttcctgatttttttgtaaatataaagaggaacttcaattatgaaaaatttttaaaagatatatatatctatatatctatatatatgtactgttttgtttcctgtcttgaagattttgagttatggttattggtttcagattgattaattcacatatgctgtgttttgaaatgagatcccattagcttttttttttttttttttttttcaatataaagtgttttctttaaaagtcatattggttcgtggcctagtgccttggattttacatatttttctttttaaatgcaaaaccttttcaacaaaatagtgtttgtcatcaggttggtactaaacatttataattactgtgtaattataaacaaaaatacataaagctttgaatataattatgtagcataaaagttaaggttgttcactatgatggcatcttagaattaaacaaaacttttactagggctgaaaagagaagactgatttaatgtggtgtgattattctgaagataaatgtctggctacagggaatattttgtactaaaaaatgatt

SEQ ID NO: 124986 - DNA, 2626 bp, Homo sapiens
  Payload ID: 4540
  Gene Symbol: DCUN1D2
  Gene Name: DCN1, defective in cullin neddylation 1, domain containing 2
  ENST ID: ENST00000332592
  CDS Start-End: 36-416
agaagcgggcggcgcgggggagatggtgtgacagcatggagaagctaaaggctcttctgccaagactggagcaggagctgaaggacacagccaagtttaaagatttttatcagtttaccttcaccttcgctaagaacccagggcagaaaggtttagacttagaaatggctgttgcgtattggaaattagtgttatctggaaggtttaaatttttagatctctggaacacattcttaatggaacatcacaaaagatcaattccaagggacacctggaacctcctgctggactttggaaacatgattgcggatgatatgtctaactacgatgaagaaggagcttggcccgttcttatagatgattttgtagaatatgcacggccagtagtcacaggtggaaaacgcagccttttctaggcagcaagttaagcaggagtaagattatgaaatgatttgtatcctgcaaggagattgcagtcagttcctgggtgcattgtcgctgattccagaagtcattcttgaccagccatgaaaccagaggcgccatcccattctgccggaggacagccagcggctgctttgtggacaccgcaggaagttcctcgggacacggctgctttgggatgtttggagatttgtcatcatagcttttgcgttaggaaatttctgcatgattttttaatatttacaaaatactaaggtagagccatagcgccgcctgtgggaccgcagagcatgctgcgtagctcgcgcgtcaggcgaaccagcgtccggcagcgtcccgccgaatgacgttgcggtggcactggcaacacggcatgtgtcctctgcagggcgctgcgtttttatacacgtcaaagctgttaagaatgtgccctaagggagaggatcttgtcgtagagtctaatgttttttaaaattggtgccagcaattcacgatttatattttttgaattaccaaatatctagatttaccagctctatttttgttttcattttctctagacattcatctgaaaatcattttatggttctcaatccccatgtagctttgcatagcaacggcacacgtggcacgattccagcagagtttatctcacaccgtttatatatcactgggcctctcttacttaaatattatttgacctgcctgagaagcttcataaagtatgtttttttaaaatatattttaattacatttaaaaagacatttttccatgaaaaacatttattttatgagtgatgaattatagattttaaaatcaaggccgggcgtggtggctcacacctgtaatcccagcattttgggaggccgaggcaggtggatcacctgaggtcaggagtttgagaccagcctggccaacatggtgaaaccctgtctctactaaaaatacaaaaattagccgggcatggtggcacatgcctgtaatcccagctactcaggaggctgaggcaggagattcgcttgaactcaggagacggaggttacagtgagtcgagatcgcgccactgcactccagcctggacgacagagtgagattctgtctcaaaataaatacatacatacatacaataaaaccgaatgagctggttctttccatcctcttgtggtacccgtagtgcccagcatccagacctttgtgcccctgtgcacatttggaagctaaaatgtacatcgttgtctgaaaaaacccaaccccaaaaccttcatctgattggtgagctgaagtctgtccttgcaccatgttatcatctgtttctcgtgtccgcctggttgaggaggacccacgagtgctgccgaggtgtggagggctggtattgagttgtggacatcactgttgaccctacctcacgtgccgagactctcatgtcacaggcgtgccttgctgcccccctgcagcactgtgcaggacgtggaccagctggagctgctgcccagcacagaggagagtcgccgcagatgacctagctgcggtgtgagagagcatggcccagacaagcagctgggttggcttctgagaacaggacttaccctgggcttcaggaacatctgatggctgaggttagtgtgcttggaggctgcaggacgaactgtcgatgtttcttagcagagatggtcacagagggcagcagggacaggactggaagggacctgcagcctgcagaccccgcctggcccccgctggcttctggctggtccagtgatgggcaagtgacagaccttccccaggctctgcttccagaactctaatgggaaactgggcctgtctacctttagaagtcttcgattctcagagagcatttgtctaatacaataaaaactggcattaatacaaacctcaaaaacgtgagcgtatcttccaggcttcatggattcttgacatgtaattgttttgttcagaaaagtttatagaattcacataattctgtataaactatggagatccacagtacttttttgtttttgagatttaaagttctaagggattgtcaatagatatcaaaatattaatcattggacaaaggcttttccaaaaattgtgggtttttttcttctgttgtatccatttgagtcctgcatgctgtgaaatgctgagaacagaagcattaaattggtttttctcggg

SEQ ID NO: 124987 - DNA, 3164 bp, Homo sapiens
  Payload ID: 4540
  Gene Symbol: DCUN1D2
  Gene Name: DCN1, defective in cullin neddylation 1, domain containing 2
  Uniprot ID: Q6PH85
  ENST ID: ENST00000375403
  CDS Start-End: 23-583
agaagcgggcggcgcgggggagatgcataagcttaaatcgtctcagaaggacaaggtccgccagtttatggcgtgcactcaggctggcgagagaactgctatctactgcttaacgcagaatgagtggagactagacgaggccacggacagcttcttccaaaacccagactcgctccacagggagtccatgcggaacgctgtggacaagaagaagctggagcggctgtacggcaggtacaaagatccacaagatgaaaacaaaattggagtcgatgggattcaacagttttgtgatgatctgagcctggatcctgccagtatcagtgtattggtcatagcgtggaagttcagggcagcaactcagtgtgaatttagcagaaaggaatttctagatggcatgacagaacttgggtgtgacagcatggagaagctaaaggctcttctgccaagactggagcaggagctgaaggacacagccaagtttaaagatttttatcagtttaccttcaccttcgctaagaacccagggcagaaaggtttaggttcacctccatttctcaatgtgaaagctttacatcattaagatgagttgaatatagatttcaattaatgttcttcctaagtgataaggatgtagacttataagcaggacaagactaatcatcttcttagcattttactgcgggtcccatcgacttagaaatggctgttgcgtattggaaattagtgttatctggaaggtttaaatttttagatctctggaacacattcttaatggaacatcacaaaagatcaattccaagggacacctggaacctcctgctggactttggaaacatgattgcggatgatatgtctaactacgatgaagaaggagcttggcccgttcttatagatgattttgtagaatatgcacggccagtagtcacaggtggaaaacgcagccttttctaggcagcaagttaagcaggagtaagattatgaaatgatttgtatcctgcaaggagattgcagtcagttcctgggtgcattgtcgctgattccagaagtcattcttgaccagccatgaaaccagaggcgccatcccattctgccggaggacagccagcggctgctttgtggacaccgcaggaagttcctcgggacacggctgctttgggatgtttggagatttgtcatcatagcttttgcgttaggaaatttctgcatgattttttaatatttacaaaatactaaggtagagccatagcgccgcctgtgggaccgcagagcatgctgcgtagctcgcgcgtcaggcgaaccagcgtccggcagcgtcccgccgaatgacgttgcggtggcactggcaacacggcatgtgtcctctgcagggcgctgcgtttttatacacgtcaaagctgttaagaatgtgccctaagggagaggatcttgtcgtagagtctaatgttttttaaaattggtgccagcaattcacgatttatattttttgaattaccaaatatctagatttaccagctctatttttgttttcattttctctagacattcatctgaaaatcattttatggttctcaatccccatgtagctttgcatagcaacggcacacgtggcacgattccagcagagtttatctcacaccgtttatatatcactgggcctctcttacttaaatattatttgacctgcctgagaagcttcataaagtatgtttttttaaaatatattttaattacatttaaaaagacatttttccatgaaaaacatttattttatgagtgatgaattatagattttaaaatcaaggccgggcgtggtggctcacacctgtaatcccagcattttgggaggccgaggcaggtggatcacctgaggtcaggagtttgagaccagcctggccaacatggtgaaaccctgtctctactaaaaatacaaaaattagccgggcatggtggcacatgcctgtaatcccagctactcaggaggctgaggcaggagattcgcttgaactcaggagacggaggttacagtgagtcgagatcgcgccactgcactccagcctggacgacagagtgagattctgtctcaaaataaatacatacatacatacaataaaaccgaatgagctggttctttccatcctcttgtggtacccgtagtgcccagcatccagacctttgtgcccctgtgcacatttggaagctaaaatgtacatcgttgtctgaaaaaacccaaccccaaaaccttcatctgattggtgagctgaagtctgtccttgcaccatgttatcatctgtttctcgtgtccgcctggttgaggaggacccacgagtgctgccgaggtgtggagggctggtattgagttgtggacatcactgttgaccctacctcacgtgccgagactctcatgtcacaggcgtgccttgctgcccccctgcagcactgtgcaggacgtggaccagctggagctgctgcccagcacagaggagagtcgccgcagatgacctagctgcggtgtgagagagcatggcccagacaagcagctgggttggcttctgagaacaggacttaccctgggcttcaggaacatctgatggctgaggttagtgtgcttggaggctgcaggacgaactgtcgatgtttcttagcagagatggtcacagagggcagcagggacaggactggaagggacctgcagcctgcagaccccgcctggcccccgctggcttctggctggtccagtgatgggcaagtgacagaccttccccaggctctgcttccagaactctaatgggaaactgggcctgtctacctttagaagtcttcgattctcagagagcatttgtctaatacaataaaaactggcattaatacaaacctcaaaaacgtgagcgtatcttccaggcttcatggattcttgacatgtaattgttttgttcagaaaagtttatagaattcacataattctgtataaactatggagatccacagtacttttttgtttttgagatttaaagttctaagggattgtcaatagatatcaaaatattaatcattggacaaaggcttttccaaaaattgtgggtttttttcttctgttgtatccatttgagtcctgcatgctgtgaaatgctgagaacagaagcattaaattggtttttctcggg

SEQ ID NO: 124988 - DNA, 1025 bp, Homo sapiens
  Payload ID: 4540
  Gene Symbol: DCUN1D2
  Gene Name: DCN1, defective in cullin neddylation 1, domain containing 2
  ENST ID: ENST00000438545
  CDS Start-End: 1-734
gtcggcgcaggcggcgcgctggatgtgggaggccgagcccagcgagctgcgcggggcgttccgcgtggatccgagggaggaacgcgccgcgggcccgcgagccggagcggtggcgtcggaggcgcgggaccgcggggagcgcgggtttgacccggagccgcgagggacgaccgggacataagcttaaatcgtctcagaaggacaaggtccgccagtttatggcgtgcactcaggctggcgagagaactgctatctactgcttaacgcagaatgagtggagactagacgaggccacggacagcttcttccaaaacccagactcgctccacagggagtccatgcggaacgctgtggacaagaagaagctggagcggctgtacggcaggtacaaagatccacaagatgaaaacaaaattggagtcgatgggattcaacagttttgtgatgatctgagcctggatcctgccagtatcagtgtattggtcatagcgtggaagttcagggcagcaactcagtgtgaatttagcagaaaggaatttctagatggcatgacagaacttgggtgtgacagcatggagaagctaaaggctcttctgccaagactggagcaggagctgaaggacacagccaagtttaaagatttttatcagtttaccttcaccttcgctaagaacccagggcagaaaggtttaggttcacctccatttctcaatgtgaaagctttacatcattaagatgagttgaatatagatttcaattaatgttcttcctaagtgataaggatgtagacttataagcaggacaagactaatcatcttcttagcattttactgcgggtcccatcgacttagaaatggctgttgcgtattggaaattagtgttatctggaaggtttaaatttttagatctctggaacacattcttaatggaacatcacaaaagatcaattccaagggacacctggaacctcctgctggactttggaaacatgattgcggatgatatgtctaactacgatgaagaag

SEQ ID NO: 124989 - DNA, 562 bp, Homo sapiens
  Payload ID: 4540
  Gene Symbol: DCUN1D2
  Gene Name: DCN1, defective in cullin neddylation 1, domain containing 2
  ENST ID: ENST00000439909
  CDS Start-End: 292-562
agaagcgggcggcgcgggggagatgcgtgctgtataccgaaacagagtgaaagtgatccataaacttacgtagtttattcgatcaacatgattggcccgccagccccggaagactgtgcagtctttgtaactgatgaagagcaaggctttgtctctaattctgcccagttaaagtgcaggcgttaggctaaagctgggacaaacctggagcggcttcattggctttcctacttcttttgcatcccaaagcataagcttaaatcgtctcagaaggacaaggtccgccagtttatggcgtgcactcaggctggcgagagaactgctatctactgcttaacgcagaatgagtggagactagacgaggccacggacagcttcttccaaaacccagactcgctccacagggagtccatgcggaacgctgtggacaagaagaagctggagcggctgtacggcaggtacaaagatccacaagatgaaaacaaaattggagtcgatgggattcaacagttttgtgatgatctgagcctggatcctgccagtatcagtgtattggtcatag

SEQ ID NO: 124990 - DNA, 460 bp, Homo sapiens
  Payload ID: 4540
  Gene Symbol: DCUN1D2
  Gene Name: DCN1, defective in cullin neddylation 1, domain containing 2
  ENST ID: ENST00000465710
  CDS Start-End: 409-460
gtcggaggcgcgggaccgcggggagcgcgggtttgacccggagccgcgagggacgaccgggagatgctggagaggagcgttccactgctgccgaggttggagatccaagagcagggatgaatttaactccccctccctctagcgtgctgtataccgaaacagagtgaaagtgatccataaacttacgtagtttattcgatcaacatgattggcccgccagccccggaagactgtgcagtctttgtaactgatgaagagcaaggctttgtctctaattctgcccagttaaagtgcaggcgttaggctaaagctgggacaaacctggagcggcttcattggctttcctacttcttttgcatcccaaagcataagcttaaatcgtctcagaaggacaaggtccgccagtttatggcgtgcactcaggctggcgagagaactgctatctactgcttaacgcaga

SEQ ID NO: 124991 - DNA, 499 bp, Homo sapiens
  Payload ID: 4540
  Gene Symbol: DCUN1D2
  Gene Name: DCN1, defective in cullin neddylation 1, domain containing 2
  ENST ID: ENST00000496873
  CDS Start-End: 141-499
gcacttcctggccggcgtggggcctggcagccgcaggctggcgttggaccccgcaggggcgagccaaggccctcgcagagggctggacgcgcaggggctgtggggcgcgagctcccgtgggcccccgggcggcgctgagcatgccgggagtgggagtccccgcggccggctcccggcactgccccggagccgagggccgcggccgtccgaggacgagggcggagccgccgccgcgcctgcgcagaaggccggggccggccagaagcgggcggcgcgggggagatgatccacaagatgaaaacaaaattggagtcgatgggattcaacagttttgtgatgatctgagcctggatcctgccagtatcagtgtattggtcatagcgtggaagttcagggcagcaactcagtgtgaatttagcagaaaggaatttctagatggcatgacagaacttgggtgtgacagcatggagaagctaaaggctcttctgccaagactgga

SEQ ID NO: 124992 - DNA, 2045 bp, Homo sapiens
  Payload ID: 4540
  Gene Symbol: DCUN1D2
  Gene Name: DCN1, defective in cullin neddylation 1, domain containing 2
  Uniprot ID: Q6PH85
  ENST ID: ENST00000478244
  CDS Start-End: 284-1063
agcacttcctggccggcgtggggcctggcagccgcaggctggcgttggaccccgcaggggcgagccaaggccctcgcagagggctggacgcgcaggggctgtggggcgcgagctcccgtgggcccccgggcggcgctgagcatgccgggagtgggagtccccgcggccggctcccggcactgccccggagccgagggccgcggccgtccgaggacgagggcggagccgccgccgcgcctgcgcagaaggccggggccggccagaagcgggcggcgcgggggagatgcataagcttaaatcgtctcagaaggacaaggtccgccagtttatggcgtgcactcaggctggcgagagaactgctatctactgcttaacgcagaatgagtggagactagacgaggccacggacagcttcttccaaaacccagactcgctccacagggagtccatgcggaacgctgtggacaagaagaagctggagcggctgtacggcaggtacaaagatccacaagatgaaaacaaaattggagtcgatgggattcaacagttttgtgatgatctgagcctggatcctgccagtatcagtgtattggtcatagcgtggaagttcagggcagcaactcagtgtgaatttagcagaaaggaatttctagatggcatgacagaacttgggtgtgacagcatggagaagctaaaggctcttctgccaagactggagcaggagctgaaggacacagccaagtttaaagatttttatcagtttaccttcaccttcgctaagaacccagggcagaaaggtttagacttagaaatggctgttgcgtattggaaattagtgttatctggaaggtttaaatttttagatctctggaacacattcttaatggaacatcacaaaagatcaattccaagggacacctggaacctcctgctggactttggaaacatgattgcggatgatatgtctaactacgatgaagaaggagcttggcccgttcttatagatgattttgtagaatatgcacggccagtagtcacaggtggaaaacgcagccttttctaggcagcaagttaagcaggagtaagattatgaaatgatttgtatcctgcaaggagattgcagtcagttcctgggtgcattgtcgctgattccagaagtcattcttgaccagccatgaaaccagaggcgccatcccattctgccggaggacagccagcggctgctttgtggacaccgcaggaagttcctcgggacacggctgctttgggatgtttggagatttgtcatcatagcttttgcgttaggaaatttctgcatgattttttaatatttacaaaatactaaggtagagccatagcgccgcctgtgggaccgcagagcatgctgcgtagctcgcgcgtcaggcgaaccagcgtccggcagcgtcccgccgaatgacgttgcggtggcactggcaacacggcatgtgtcctctgcagggcgctgcgtttttatacacgtcaaagctgttaagaatgtgccctaagggagaggatcttgtcgtagagtctaatgttttttaaaattggtgccagcaattcacgatttatattttttgaattaccaaatatctagatttaccagctctatttttgttttcattttctctagacattcatctgaaaatcattttatggttctcaatccccatgtagctttgcatagcaacggcacacgtggcacgattccagcagagtttatctcacaccgtttatatatcactgggcctctcttacttaaatattatttgacctgcctgagaagcttcataaagtatgtttttttaaaatatattttaattacatttaaaaagacatttttccatgaaaaacatttattttatgagtgatgaattatagattttaaaatcaaggccgggcgtggtggctcacacctgtaatcccagcattttgggaggccgaggcaggtggatcacctgaggtcaggagtttgagaccagcctggccaacatggtgaaaccctgtctctactaaaaatacaaaaa

SEQ ID NO: 124993 - DNA, 578 bp, Homo sapiens
  Payload ID: 4540
  Gene Symbol: DCUN1D2
  Gene Name: DCN1, defective in cullin neddylation 1, domain containing 2
  ENST ID: ENST00000465938
  CDS Start-End: 177-578
gtgcagtctttgtaactgatgaagagcaaggctttgtctctaattctgcccagttaaagtgcaggcgttaggctaaagctgggacaaacctggagcggcttcattggctttcctacttcttttgcatcccaaagcataagcttaaatcgtctcagaaggacaaggtccgccagtttatggcgtgcactcaggctggcgagagaactgctatctactgcttaacgcagaatgagtggagactagacgaggccacggacagcttcttccaaaacccagactcgctccacagggagtccatgcggaacgctgtggacaagaagaagctggagcggctgtacggcaggtacaaagatccacaagatgaaaacaaaattggagtcgatgggattcaacagttttgtgatgatctgagcctggatcctgccagtatcagtgtattggtcatagcgtggaagttcagggcagcaactcagtgtgaatttagcagaaaggaatttctagatggcatgacagaacttgggtgtgacagcatggagaagctaaaggctcttctgccaagactggagcaggagctgaag

SEQ ID NO: 124994 - DNA, 6162 bp, Homo sapiens
  Payload ID: 4541
  Gene Symbol: DCUN1D3
  Gene Name: DCN1, defective in cullin neddylation 1, domain containing 3
  Uniprot ID: Q8IWE4
  ENST ID: ENST00000324344
  CDS Start-End: 287-1201
cggggcggccgccgccggtgggccgcagatgaagaggaggcggtggcagtggtggaagaagaggcggcggcggcgggggtagggagcctggaaacgcgagcggggatggtaggtggtttggacccgccgggccgccgtcgtttccagaaagggtttgactggaggaacctctggagcagctgttggctggctcctctggctgatggcatgttgaggtacatgggccagcggcagcgagggcatccaatccagaggggtccactctagaggccaggccaccagcaccatgggccagtgtgtcaccaagtgtaagaatccctcatcgaccctgggcagcaaaaatggagaccgtgagcccagcaacaagtcacatagcaggaggggtgcaggccaccgtgaggagcaggtaccaccctgtggcaagccaggtggagatatcctcgtcaacgggaccaagaaggccgaggctgccactgaggcctgccagctgccaacgtcctcgggagatgctgggagggagtccaagtccaatgccgaggagtcttccttgcaaagattggaagaactgttcaggcgctacaaggatgagcgggaagatgcaattttggaggaaggcatggagcgcttttgcaatgacctgtgtgttgaccccacagaatttcgagtgctgctcttggcttggaagttccaggctgcaaccatgtgcaaattcaccaggaaggagttttttgatggctgcaaagcaataagtgcagacagcattgacggaatctgtgcacggttccctagcctcttaacagaagccaaacaagaggataaattcaaggatctctaccggtttacatttcagtttggcctggactctgaagaagggcagcggtcactgcatcgggaaatagccattgccctgtggaaactagtctttacccagaacaatcctccggtattggaccaatggctaaacttcctaacagagaacccctcggggatcaagggcatctcccgggacacttggaacatgttccttaacttcactcaggtgattggccctgacctcagcaactacagtgaagatgaggcctggccaagtctctttgacacctttgtggagtgggaaatggagcgaaggaaaagagaaggggaagggagaggtgcactcagctcagggcctgagggcttgtgtcccgaggagcagacttagtggctctgtcccaggagcagcagcaaggatctgccagctgccctgcagccaactgaggaattggaccattttggaaattactgaagatccggatattttctactttacacctttctctgccttgtatctgaaagggctctaaaatgctgtatcatgttttaggcactttcttcatttttttggttattttggttatttcctttttggggggatctcccagaatatttgaacctggttacatgttgtgtatctttttttgaagccttcagatagaataagcctgccatttcttgcacaaatttaggttttttttttgtttttttttgtttttttttttttttttttggtaggggagggcatagagcagggcggggggatgggactgttaggttgaattaacattacaaaatgatacagtgccagatctcagtttcgcatattgtttttcagggcaggtctgtactgtgtgtagtgctgtttacatagatgaatttaggttgtaataattatttttaaagatttacacagatttgaatagcagtgttaactgttaaccacattgcattaattcccaggcgatttagagctcttggagagccaaggccagccaagagcatttgtagtctggtgacaacccccttttaagctaatttatccagaaccctgatttccctcacttcttgctcattccttctttgacctattgcatttcatgttgagtttttccatcaacatgctgcacctgtcagtcaagtgagcattttttaagaacacattgtactgagaaccacttaagcattgaatgcggagaaagcagtgctacctcagttttgctggaagtagacttctttgatagttttctttctttgatgaagtttctgtattttcatgttgtaagtggaaatacttttttttgtttgtttgtttcatttgccttggagccaaagtttctgttcctggtggtcgggaaactgcctgccggccaactgacttgaaggaaaactgtggtatggagctctgcttgaatttttttttttttaatatttttatttttttctttgaatatcatcagcttacttgtctggcaagggcagaagcctggggttggcctgaactctgccaaacaaatatcaaagtgtatttaatagttaaatttgtgccctttcccttcttgctgcacccatgttgtcacttaacccccaggagttatttattatctttttgttaaagtcaggctcatttggggtaatgtgatgactgtttaggtttacatgaccctcctctcctttccctacccccaaatatgtatatatacatatataaaatatgtatatattttacctatataaaatatatatatatacacatatatgtatctatattcctttgtttctttgcctgcttatactggccataaaagagggagctgccttcaatgtataaagtataagaagagtgccagggaatgccataatggaggcttttggatctgaatttggaccatttcactaaagagaacatgagtttgctcagccctttcctcacaagagggagggccccggttccccagacttctccacgcgctggctccataaaggccagctttggccaggctgccacaggggcctgaggagctcactctgggcctacctggtttcagttagagggtcctcctgttatttttccatttaaaaagtatgtcctcagaaaactgtactggaaggatgggtggcaggaacttgtatagttcagcttccaacactttggaacagattaaaaagggaatcttttaaataaaaacgtataaaaatatttatactcttgaggtaatgagactttgtctgttaaacatttggaggtttctcccttaacctaataccccgctgcgtcccaggtatgtttctcagcctgggcaggaattgcatgttttgagttccattgtgagcagccttacagctctgggctcccatcttaaggattattaaagagttttggcagttggtatttttctaaaactgatattgaccatagggaacatacttggaatttgtttttttttttaaatcctaaacctgacagttcctccttcagaggggcaaatgggaaactttaagatcacccacggtatagtactgctagaaagctgaagggggtcttgggccagatgcctggcttctgttctagctaaataagactcttgaataagtctccaggggtcccagcaggttctgtgggatcagttgtagctgggtacccagactgaggttttaaaaagactgctttttcattaagccagtttgcaactcattttccccggttctggattgggtagtggttgactgagggaaaagccaggctgctcttggccagataaggccctttccatcccagatcagagtgtatcagagaaagctgcacaaaagaggcaggcagcccaggaccctgagtactctggagaaactaggttccttccccaccctttaagaagacattccgtgcattagatgtactagagtggatgtattttgttgttttttaaattaactatttagcctcctcatcccccaccaaaaaagccatttagttattttttggttatattgatccatttgcaaatgagaagccagaaaagggagcagtcagggagggacttacaagttcctttcaagtttgagtacttgatgctcagcaaagatttcaagcttctgcagtagctctgggccaatgcttgactctttcatgaccacaagaaatgcagtttttctgcaaagggatccaaggtgaggtgtgtgtagggtttgaagttatacttctgggaagtgaaaagtcttgttcctttcaacctagaaataggtttgccacttaatgagtgagcagtaagtctgtgtaagaggctgaatgcatgcccctcagataagccagtacactccttgcttagcaacagaacatcagggtgatgtggagaggggcaggatgtggacgccactttggaaatcggcaacatctgagggcaacaacaaacaagtgtgttgggaaataagaaataactcagttttgacaactggctttgtcagcttttgtgatgtttctttagcagtttattggaaagatggtatgagatgacgtgctgcttcattgaattgctctttcccccatctttgccaaatctcaatgtatcgttcttaaccccacctcctgtaaggggctttgctatgcttcagctggttgtctcagcagctgaagtgctgcccacctgtgtgagttgggtccaggaaaccatgtctgcccttctgataagggaagatgaatctagagctgggtgaagatctaaattttaaccaaacccctgggcccaggaaaataacaattgaaaatgtacaaggcagtgttttcaatattaaacttccccaaggaaagcacaaactagtctttttggaaagggagaaaggattaagccacacagtattagtctttgaagcagtactggtctctaggggctggtgccaaaatggagtcccatagtagttacactcgatggcctcatgtactatatactgtgccaaattgtattaaacagtggtggggagttactgggataagaacttgtctaaaagtttacaaaccaaaacagatctgttaggttggtgcaaaagtaagtttttgccatacttaatgtattgccattaagtatggcaaaaaccacaattacttttacaccaacctatgtatttaagaatgtttggtttgccagattccaaatgaggtcttcagtgcagcaaagcccaaaaggtgtagactcagttatgcaattataaggttaaggcgtagaagaaagctgctgctaggtttttgttgcattttacttgactgctctgctgtttttcttgtctctcatgtttggttagctatgacttgagcatcttggtaactgacaaaggtcttccttgggggacttgaacatcttggtaaatgacaggtcttcttggaggactccagcagtatcttgtttaaacgactgaaaggactattaaggttgttgaattgtgttaattgggactcattgaggaaatgcgacattgatcctcctcttattccacagtgtgttttctgatcatataaagaaggttccgaaccatccatccccctcagagtttattcccctggtaagctgtaattgcatatccagtttaaactggactgggactgcatgttggtgaggatcggcaggggttttcccccttttcgaaagatgaaatagattcttgagcactggttgcagaagccaaaatagttcaaatagctttgcataaccattgggttctgcttctgattcaggtgctgggcatcatgtcctccctattcttctcttcttggaaacccagcctatctcataaatacctacttccgccacccatccaacctccctgctcctttcaacacaaatcttggatattgccaaaggaagccattcagcagctgctggggtttttcatccccctgacatgcatacatttgctctgggagaagtgtcttccctctgaccctggtccccagctccgtctgtgcttaattgctcttacctgttgcactaatgaatatgactaggttttaaagggggaatgtgaagcaataggcacatggggcttggatgaattggtcccacagatataccctgccttaagccgctgaggtgatgagtccactgctcatgtgaccctccacctttgtggatccctcttggtttgtgaccagtgtgtctgtttgttgaggttgtacaaacttgacaaaagttaatacttttgtttgtattttctgcactgttgcactctccaaatggccccttgagtatttttattgacttgttacacacatttttgtctttgatgtctacattttttcctttaatgttttttatttggaaggttacctgctgttggatttaataaatttgtttacttgaa

SEQ ID NO: 124995 - DNA, 1996 bp, Homo sapiens
  Payload ID: 4541
  Gene Symbol: DCUN1D3
  Gene Name: DCN1, defective in cullin neddylation 1, domain containing 3
  Uniprot ID: Q8IWE4
  ENST ID: ENST00000563934
  CDS Start-End: 192-1106
agctgggctgagactgagggagagaagctggaggctgatcttggtccagcagaagctgagcagagctgctgtctttggtctttcaggttggctggctcctctggctgatggcatgttgaggtacatgggccagcggcagcgagggcatccaatccagaggggtccactctagaggccaggccaccagcaccatgggccagtgtgtcaccaagtgtaagaatccctcatcgaccctgggcagcaaaaatggagaccgtgagcccagcaacaagtcacatagcaggaggggtgcaggccaccgtgaggagcaggtaccaccctgtggcaagccaggtggagatatcctcgtcaacgggaccaagaaggccgaggctgccactgaggcctgccagctgccaacgtcctcgggagatgctgggagggagtccaagtccaatgccgaggagtcttccttgcaaagattggaagaactgttcaggcgctacaaggatgagcgggaagatgcaattttggaggaaggcatggagcgcttttgcaatgacctgtgtgttgaccccacagaatttcgagtgctgctcttggcttggaagttccaggctgcaaccatgtgcaaattcaccaggaaggagttttttgatggctgcaaagcaataagtgcagacagcattgacggaatctgtgcacggttccctagcctcttaacagaagccaaacaagaggataaattcaaggatctctaccggtttacatttcagtttggcctggactctgaagaagggcagcggtcactgcatcgggaaatagccattgccctgtggaaactagtctttacccagaacaatcctccggtattggaccaatggctaaacttcctaacagagaacccctcggggatcaagggcatctcccgggacacttggaacatgttccttaacttcactcaggtgattggccctgacctcagcaactacagtgaagatgaggcctggccaagtctctttgacacctttgtggagtgggaaatggagcgaaggaaaagagaaggggaagggagaggtgcactcagctcagggcctgagggcttgtgtcccgaggagcagacttagtggctctgtcccaggagcagcagcaaggatctgccagctgccctgcagccaactgaggaattggaccattttggaaattactgaagatccggatattttctactttacacctttctctgccttgtatctgaaagggctctaaaatgctgtatcatgttttaggcactttcttcatttttttggttattttggttatttcctttttggggggatctcccagaatatttgaacctggttacatgttgtgtatctttttttgaagccttcagatagaataagcctgccatttcttgcacaaatttaggttttttttttgtttttttttgtttttttttttttttttttggtaggggagggcatagagcagggcggggggatgggactgttaggttgaattaacattacaaaatgatacagtgccagatctcagtttcgcatattgtttttcagggcaggtctgtactgtgtgtagtgctgtttacatagatgaatttaggttgtaataattatttttaaagatttacacagatttgaatagcagtgttaactgttaaccacattgcattaattcccaggcgatttagagctcttggagagccaaggccagccaagagcatttgtagtctggtgacaacccccttttaagctaatttatccagaaccctgatttccctcacttcttgctcattccttctttgacctattgcatttcatgttgagtttttccatcaacatgctgcacctgtcagtcaagtgagcattttttaagaacacattgtactgagaaccacttaagcattgaatgcggagaaagcagtgctacctcagttttgctggaagtagacttctttgatagttttctttctttgatgaagtttctgtattttcat

SEQ ID NO: 124996 - DNA, 4312 bp, Homo sapiens
  Payload ID: 4542
  Gene Symbol: DCUN1D4
  Gene Name: DCN1, defective in cullin neddylation 1, domain containing 4
  Uniprot ID: Q92564
  ENST ID: ENST00000334635
  CDS Start-End: 181-1059
gagagacgcagcagggcggcccctgagccgcggtttagccaatggagaaggcgagatgggcgggctgggagtgcccggcggcgggtcctcagcttcgagccgaggtgcagtgagctggtggggggaccgcgaggcgagcgcgggagcctgggcggcgagccgggtgtgagctgcctgaaaatgcactcggatgccgccgctgtcaattttcagctgaactctcatctctcaacactggcaaatattcataagatctaccacacccttaataagctgaacctaacagaagacattggccaagacgatcaccaaacaggaagtctgcggtcttgcagttcttcagactgctttaataaagtgatgccaccaaggaaaaagagaagacctgcctctggagatgatttatctgccaagaaaagtagacatgatagcatgtatagaaaatatgattcgactagaataaagactgaagaagaagccttttcaagtaaaaggtgcttggaatggttctatgaatatgcaggaactgatgatgttgtaggccctgaaggcatggagaaattttgtgaagacattggtgttgaaccagaaaacgtagttatgcttgtcctagcttggaaattggatgcacaaaacatgggttattttactctacaggagtggttaaaaggaatgacttctctccaatgtgatacaacagaaaaactcagaaatactttggattacttaagatcattcttaaatgattctacaaactttaaacttatttacagatatgcgtttgactttgcacgggaaaaggaccagcgcagcctagacataaacactgccaagtgcatgttgggactgttattaggaaaaatctggcccctttttccagtttttcaccaattcttagagcaatcaaaatacaaagttattaataaagaccagtggtgcaatgtcctagagtttagcagaacaattaatcttgacctcagcaactatgatgaagatggagcatggccagttttgttggacgagtttgtggagtggtataaagacaaacagatgtcctaggactttatgcatagcagcgagagagtcactgttaccacagttttgtcacccattagccataaattgctgtttgtatcaaagcgcatgctgcttctcttgcactgtttccctttcgcagggacatgttggtgtttgctattgaattggccagctctgcttgctgtgtggcattgttctcttggaaggctgctttgcagtttgtatttacactacagattggtgaatttgccaacgtcctcactgtgattatgtgtatattgctgtttaaattttgtatatgtgtataaaaggaaaaaggttcacctagagattatttctgaaaaatgtattgtaaaaataattttgtggcatttctagtccctttttttgaatgaaccaattatactttatttggtctcctatgtagcatttcagaaaacaagagaaaactgttaccatgaacaaacattgccagaattaaccttactgtttaagaggccaacttctggaaggaggtaggagtcataactttttagaggcatatgccaaatatcatttggtatacttaacaatattagtgttttaaaatgatgagttataattatttgaacatatagatatgtaacatgccacaaatcatttctaccatgcaaggtgtataagttgtttattttttagtgttaaaactataatagcttgaatataggtaccaatgaacaaattcaaattgcacctcttttcttaaaagaatgggatttaaactcttataaacattctttaacttttttgtttgtttgttctctttttttccttttgcattcttctagccagtgattgatctgctaatgctttctttgccactctaagtaaaatttatttcacctcctcaatgaaaacctcatggttttgctggctgtttataactgcatcgcacttctagttgtggcttgaattttcagttaagctttcatggtatgtaattttccagccttttgagaaaacaagcatactataagtgagagctgttttgttttccttgtttgtttgtttcatgctaggcttttcctggcagcatgtccattgcaggcagtggacaagaaaccaccagcattgagctaacccagtacatgctaggacctgtcctagaggggccacttttcattacctgagttatttgtacagaagggcaatagccattatttttgtggatgaggaaacaagaataaacagaatggtatttttaggtttgtattttatgtctttttttttttttttttttgccattcttgaggaaatatagagatgacatgttttcaccccaactatctggtgctattgaatgactaattcagtccctaaagttctgtgaaaacacaaaagtctaatgatttgagtgagtaaaaggtaatggtgcatttgaacaagtaaatgctgtcgtggtcagcaagatccgtgatttgaacatgtgatgactggaaaaaggtttgggttatttggaactctggctaaaacttctttcgggtgacatgtgatcgtttaaatggcattaagtgaataaagcacacagacagtgctactcttgaccactattttaccatttctttgcaaacagtgttcacattttcatattttttccctaactaaaccaccaaagaaagaaattttgtatgtatatacagtgtgtgtgtatacaaaatcatgatatagtagaatgcaactactttctttttctaccaaacgaaaggttttatttgctgtgaaataaaccagaagtttaaaaaaccctgtagtgattaagcatacttaaccactccttatttgtagattcactttcaaccttaaaaattaataccagtttgcataaaccaatatctgaaaagaacaggaaatgttaatggcaagcaacagctattaatactgatgtgatggatgcatttgttttgcagtggtgactggcctaggcaggtttggatctgtgaagaattgattcattttcaaaattattccataaagttaaaaagttacactttaaaggcaacaggtcatacagttctttaaatctgatcaactgtagctttatttaaagcaaatataaatcatagatgaagttattttaaacactatgttagaatatagagatttttaaaaaatgctgataagcacagttaattctaaaatgagaggattgttacaggagggagatgttacagttaatccacaatcaacattttgatggtagggaaaaaactgcgtaaaaactattgcattatgtatgataagaaagtaagtattccaaagggataatcttgcatattaagaaaactccaaataatctttaaactgccttgaaaaataaacctctttgactgctgagcggcagagtgcttacccttgattgtcttgattttatatatttatttctaaggggagaaaaaggggtcagacagagtaatatgatacattttcttaaaaacttctctaagttgcacaaaactgaacaatcatcaagcacttatttactggctaatgttgaataaattagggtgccttcatctgggttttctttagtacctaagtctacaaccctttctctttttctattgtgtttcgaactccacattgcaatactctgttgtcatggaatacaacctttagatgtttactgctgaagtaggtcagaaattgtattatttgatttgcctcaaacatccactgtaatgttacatgcaccttttttgaagcatgaactctgaattatgtttttataaatctgactaggcaaacctagattctggtttcacaatggatttattttctctctcagtctccattttaacagtgcttttgaagtttatacagaaagctttaaaagttagtttgtgcccttggtttttattcttaaaactgctaaaatacctctgtaagccttatcctttattctttcatatgttgtataataaatgtatagatttcattgaccaactaaaatgttgggtgtctgtaaatgagaccaaaacgtgggttgcttttttcataaaataatttctattgggggttactgttcaatgacagcaggtaacctataactgtgaatgcttcgtgtcgtcagtatttgcattacattcataaaagtgtgcaagtcctgtgactcccagcttaactgaaatactgttatgccacctaacttgagtacagcaaactggttttaggtttcaatgacattgatgtaaaatgatatcccatgaataaaaagtatttgtgtttggtttcagaa

SEQ ID NO: 124997 - DNA, 4207 bp, Homo sapiens
  Payload ID: 4542
  Gene Symbol: DCUN1D4
  Gene Name: DCN1, defective in cullin neddylation 1, domain containing 4
  Uniprot ID: Q92564
  ENST ID: ENST00000381441
  CDS Start-End: 181-954
gagagacgcagcagggcggcccctgagccgcggtttagccaatggagaaggcgagatgggcgggctgggagtgcccggcggcgggtcctcagcttcgagccgaggtgcagtgagctggtggggggaccgcgaggcgagcgcgggagcctgggcggcgagccgggtgtgagctgcctgaaaatgcactcggatgccgccgctgtcaattttcagctgaactctcatctctcaacactggcaaatattcataagatctaccacacccttaataagctgaacctaacagaagacattggccaagacgatcaccaaacaggaagtctgcggtcttgcagttcttcagactgctttaataaagtgatgccaccaaggaaaaagagaagacctgcctctggagatgatttatctgccaagaaaagtagacatgatagcatgtatagaaaatatgattcgactagaataaagactgaagaagaagccttttcaagtaaaaggtgcttggaatggttctatgaatatgcaggaactgatgatgttgtaggccctgaaggcatggagaaattttgtgaagacattggtgttgaaccagaaaacgtagttatgcttgtcctagcttggaaattggatgcacaaaacatgggttattttactctacaggagtggttaaaaggaatgacttctctccaatgtgatacaacagaaaaactcagaaatactttggattacttaagatcattcttaaatgattctacaaactttaaacttatttacagatatgcgtttgactttgcacggcaatcaaaatacaaagttattaataaagaccagtggtgcaatgtcctagagtttagcagaacaattaatcttgacctcagcaactatgatgaagatggagcatggccagttttgttggacgagtttgtggagtggtataaagacaaacagatgtcctaggactttatgcatagcagcgagagagtcactgttaccacagttttgtcacccattagccataaattgctgtttgtatcaaagcgcatgctgcttctcttgcactgtttccctttcgcagggacatgttggtgtttgctattgaattggccagctctgcttgctgtgtggcattgttctcttggaaggctgctttgcagtttgtatttacactacagattggtgaatttgccaacgtcctcactgtgattatgtgtatattgctgtttaaattttgtatatgtgtataaaaggaaaaaggttcacctagagattatttctgaaaaatgtattgtaaaaataattttgtggcatttctagtccctttttttgaatgaaccaattatactttatttggtctcctatgtagcatttcagaaaacaagagaaaactgttaccatgaacaaacattgccagaattaaccttactgtttaagaggccaacttctggaaggaggtaggagtcataactttttagaggcatatgccaaatatcatttggtatacttaacaatattagtgttttaaaatgatgagttataattatttgaacatatagatatgtaacatgccacaaatcatttctaccatgcaaggtgtataagttgtttattttttagtgttaaaactataatagcttgaatataggtaccaatgaacaaattcaaattgcacctcttttcttaaaagaatgggatttaaactcttataaacattctttaacttttttgtttgtttgttctctttttttccttttgcattcttctagccagtgattgatctgctaatgctttctttgccactctaagtaaaatttatttcacctcctcaatgaaaacctcatggttttgctggctgtttataactgcatcgcacttctagttgtggcttgaattttcagttaagctttcatggtatgtaattttccagccttttgagaaaacaagcatactataagtgagagctgttttgttttccttgtttgtttgtttcatgctaggcttttcctggcagcatgtccattgcaggcagtggacaagaaaccaccagcattgagctaacccagtacatgctaggacctgtcctagaggggccacttttcattacctgagttatttgtacagaagggcaatagccattatttttgtggatgaggaaacaagaataaacagaatggtatttttaggtttgtattttatgtctttttttttttttttttttgccattcttgaggaaatatagagatgacatgttttcaccccaactatctggtgctattgaatgactaattcagtccctaaagttctgtgaaaacacaaaagtctaatgatttgagtgagtaaaaggtaatggtgcatttgaacaagtaaatgctgtcgtggtcagcaagatccgtgatttgaacatgtgatgactggaaaaaggtttgggttatttggaactctggctaaaacttctttcgggtgacatgtgatcgtttaaatggcattaagtgaataaagcacacagacagtgctactcttgaccactattttaccatttctttgcaaacagtgttcacattttcatattttttccctaactaaaccaccaaagaaagaaattttgtatgtatatacagtgtgtgtgtatacaaaatcatgatatagtagaatgcaactactttctttttctaccaaacgaaaggttttatttgctgtgaaataaaccagaagtttaaaaaaccctgtagtgattaagcatacttaaccactccttatttgtagattcactttcaaccttaaaaattaataccagtttgcataaaccaatatctgaaaagaacaggaaatgttaatggcaagcaacagctattaatactgatgtgatggatgcatttgttttgcagtggtgactggcctaggcaggtttggatctgtgaagaattgattcattttcaaaattattccataaagttaaaaagttacactttaaaggcaacaggtcatacagttctttaaatctgatcaactgtagctttatttaaagcaaatataaatcatagatgaagttattttaaacactatgttagaatatagagatttttaaaaaatgctgataagcacagttaattctaaaatgagaggattgttacaggagggagatgttacagttaatccacaatcaacattttgatggtagggaaaaaactgcgtaaaaactattgcattatgtatgataagaaagtaagtattccaaagggataatcttgcatattaagaaaactccaaataatctttaaactgccttgaaaaataaacctctttgactgctgagcggcagagtgcttacccttgattgtcttgattttatatatttatttctaaggggagaaaaaggggtcagacagagtaatatgatacattttcttaaaaacttctctaagttgcacaaaactgaacaatcatcaagcacttatttactggctaatgttgaataaattagggtgccttcatctgggttttctttagtacctaagtctacaaccctttctctttttctattgtgtttcgaactccacattgcaatactctgttgtcatggaatacaacctttagatgtttactgctgaagtaggtcagaaattgtattatttgatttgcctcaaacatccactgtaatgttacatgcaccttttttgaagcatgaactctgaattatgtttttataaatctgactaggcaaacctagattctggtttcacaatggatttattttctctctcagtctccattttaacagtgcttttgaagtttatacagaaagctttaaaagttagtttgtgcccttggtttttattcttaaaactgctaaaatacctctgtaagccttatcctttattctttcatatgttgtataataaatgtatagatttcattgaccaactaaaatgttgggtgtctgtaaatgagaccaaaacgtgggttgcttttttcataaaataatttctattgggggttactgttcaatgacagcaggtaacctataactgtgaatgcttcgtgtcgtcagtatttgcattacattcataaaagtgtgcaagtcctgtgactcccagcttaactgaaatactgttatgccacctaacttgagtacagcaaactggttttaggtttcaatgacattgatgtaaaatgatatcccatgaataaaaagtatttgtgtttggtttcagaa

SEQ ID NO: 124998 - DNA, 4269 bp, Homo sapiens
  Payload ID: 4542
  Gene Symbol: DCUN1D4
  Gene Name: DCN1, defective in cullin neddylation 1, domain containing 4
  Uniprot ID: Q92564
  ENST ID: ENST00000451288
  CDS Start-End: 8-1018
ggggtgcatggaggtggaggcagcgttgggctgtagcgggcagggccggggatgtgggggggtggcaccggcggggagagggagggagcgagcgagcgagcggggcacaagggtgaggatttccaaagggctgagtggtgcgggcggctccgtgagaaaggcggattttcagctgaactctcatctctcaacactggcaaatattcataagatctaccacacccttaataagctgaacctaacagaagacattggccaagacgatcaccaaacaggaagtctgcggtcttgcagttcttcagactgctttaataaagtgatgccaccaaggaaaaagagaagacctgcctctggagatgatttatctgccaagaaaagtagacatgatagcatgtatagaaaatatgattcgactagaataaagactgaagaagaagccttttcaagtaaaaggtgcttggaatggttctatgaatatgcaggaactgatgatgttgtaggccctgaaggcatggagaaattttgtgaagacattggtgttgaaccagaaaacgtagttatgcttgtcctagcttggaaattggatgcacaaaacatgggttattttactctacaggagtggttaaaaggaatgacttctctccaatgtgatacaacagaaaaactcagaaatactttggattacttaagatcattcttaaatgattctacaaactttaaacttatttacagatatgcgtttgactttgcacgggaaaaggaccagcgcagcctagacataaacactgccaagtgcatgttgggactgttattaggaaaaatctggcccctttttccagtttttcaccaattcttagagcaatcaaaatacaaagttattaataaagaccagtggtgcaatgtcctagagtttagcagaacaattaatcttgacctcagcaactatgatgaagatggagcatggccagttttgttggacgagtttgtggagtggtataaagacaaacagatgtcctaggactttatgcatagcagcgagagagtcactgttaccacagttttgtcacccattagccataaattgctgtttgtatcaaagcgcatgctgcttctcttgcactgtttccctttcgcagggacatgttggtgtttgctattgaattggccagctctgcttgctgtgtggcattgttctcttggaaggctgctttgcagtttgtatttacactacagattggtgaatttgccaacgtcctcactgtgattatgtgtatattgctgtttaaattttgtatatgtgtataaaaggaaaaaggttcacctagagattatttctgaaaaatgtattgtaaaaataattttgtggcatttctagtccctttttttgaatgaaccaattatactttatttggtctcctatgtagcatttcagaaaacaagagaaaactgttaccatgaacaaacattgccagaattaaccttactgtttaagaggccaacttctggaaggaggtaggagtcataactttttagaggcatatgccaaatatcatttggtatacttaacaatattagtgttttaaaatgatgagttataattatttgaacatatagatatgtaacatgccacaaatcatttctaccatgcaaggtgtataagttgtttattttttagtgttaaaactataatagcttgaatataggtaccaatgaacaaattcaaattgcacctcttttcttaaaagaatgggatttaaactcttataaacattctttaacttttttgtttgtttgttctctttttttccttttgcattcttctagccagtgattgatctgctaatgctttctttgccactctaagtaaaatttatttcacctcctcaatgaaaacctcatggttttgctggctgtttataactgcatcgcacttctagttgtggcttgaattttcagttaagctttcatggtatgtaattttccagccttttgagaaaacaagcatactataagtgagagctgttttgttttccttgtttgtttgtttcatgctaggcttttcctggcagcatgtccattgcaggcagtggacaagaaaccaccagcattgagctaacccagtacatgctaggacctgtcctagaggggccacttttcattacctgagttatttgtacagaagggcaatagccattatttttgtggatgaggaaacaagaataaacagaatggtatttttaggtttgtattttatgtctttttttttttttttttttgccattcttgaggaaatatagagatgacatgttttcaccccaactatctggtgctattgaatgactaattcagtccctaaagttctgtgaaaacacaaaagtctaatgatttgagtgagtaaaaggtaatggtgcatttgaacaagtaaatgctgtcgtggtcagcaagatccgtgatttgaacatgtgatgactggaaaaaggtttgggttatttggaactctggctaaaacttctttcgggtgacatgtgatcgtttaaatggcattaagtgaataaagcacacagacagtgctactcttgaccactattttaccatttctttgcaaacagtgttcacattttcatattttttccctaactaaaccaccaaagaaagaaattttgtatgtatatacagtgtgtgtgtatacaaaatcatgatatagtagaatgcaactactttctttttctaccaaacgaaaggttttatttgctgtgaaataaaccagaagtttaaaaaaccctgtagtgattaagcatacttaaccactccttatttgtagattcactttcaaccttaaaaattaataccagtttgcataaaccaatatctgaaaagaacaggaaatgttaatggcaagcaacagctattaatactgatgtgatggatgcatttgttttgcagtggtgactggcctaggcaggtttggatctgtgaagaattgattcattttcaaaattattccataaagttaaaaagttacactttaaaggcaacaggtcatacagttctttaaatctgatcaactgtagctttatttaaagcaaatataaatcatagatgaagttattttaaacactatgttagaatatagagatttttaaaaaatgctgataagcacagttaattctaaaatgagaggattgttacaggagggagatgttacagttaatccacaatcaacattttgatggtagggaaaaaactgcgtaaaaactattgcattatgtatgataagaaagtaagtattccaaagggataatcttgcatattaagaaaactccaaataatctttaaactgccttgaaaaataaacctctttgactgctgagcggcagagtgcttacccttgattgtcttgattttatatatttatttctaaggggagaaaaaggggtcagacagagtaatatgatacattttcttaaaaacttctctaagttgcacaaaactgaacaatcatcaagcacttatttactggctaatgttgaataaattagggtgccttcatctgggttttctttagtacctaagtctacaaccctttctctttttctattgtgtttcgaactccacattgcaatactctgttgtcatggaatacaacctttagatgtttactgctgaagtaggtcagaaattgtattatttgatttgcctcaaacatccactgtaatgttacatgcaccttttttgaagcatgaactctgaattatgtttttataaatctgactaggcaaacctagattctggtttcacaatggatttattttctctctcagtctccattttaacagtgcttttgaagtttatacagaaagctttaaaagttagtttgtgcccttggtttttattcttaaaactgctaaaatacctctgtaagccttatcctttattctttcatatgttgtataataaatgtatagatttcattgaccaactaaaatgttgggtgtctgtaaatgagaccaaaacgtgggttgcttttttcataaaataatttctattgggggttactgttcaatgacagcaggtaacctataactgtgaatgcttcgtgtcgtcagtatttgcattacattcataaaagtgtgcaagtcctgtgactcccagcttaactgaaatactgttatgccacctaacttgagtacagcaaactggttttaggtttcaatgacattgatgtaaaatgatatcccatgaataaaaagtatttgtgtttggtttcag

SEQ ID NO: 124999 - DNA, 548 bp, Homo sapiens
  Payload ID: 4542
  Gene Symbol: DCUN1D4
  Gene Name: DCN1, defective in cullin neddylation 1, domain containing 4
  ENST ID: ENST00000506673
  CDS Start-End: 141-332
aatggagaaggcgagatgggcgggctgggagtgcccggcggcgggtcctcagcttcgagccgaggtgcagtgagctggtggggggaccgcgaggcgagcgcgggagcctgggcggcgagccgggtgtgagctgcctgaaaatgcactcggatgccgccgctgtcagctttacaggaagtatggtgctggcatctgcttggcttctagagagtcttacaatcgtggaggaaggtgaatggagagcaggcacaccacatggcgaaagcaggagcgagagagagaaaggattttcagctgaactctcatctctcaacactggcaaatattcataagatctaccacacccttaataagctgaacctaacagaagacattggccaagacgatcaccaaacaggaagtctgcggtcttgcagttcttcagactgctttaataaagtgatgccaccaaggaaaaagagaagacctgcctctggagatgatttatctgccaagaaaagtagacatgatagcatgtatagaaaatatgattcgactagaataaagac

SEQ ID NO: 125000 - DNA, 805 bp, Homo sapiens
  Payload ID: 4542
  Gene Symbol: DCUN1D4
  Gene Name: DCN1, defective in cullin neddylation 1, domain containing 4
  ENST ID: ENST00000509068
  CDS Start-End: 46-669
ggctggacgtgcgatgaagggccgagatcggagtgtccggggtgcatggaggtggaggcagcgttgggctgtagcgggcagggccggggatgtgggggggtggcaccggcggggagagggagggagcgagcgagcgagcggggcacaagggtgaggatttccaaagggctgagtggtgcgggcggctccgtgagaaaggcggattttcagctgaactctcatctctcaacactggcaaatattcataagatctaccacacccttaataagctgaacctaacagaagacattggccaagacgatcaccaaacaggaagtctgcggtcttgcagttcttcagactgctttaataaagtgatgccaccaaggaaaaagagaagacctgcctctggagatgatttatctgccaagaaaagtagacatgatagcatgtatagaaaatatgattcgactagaataaagactgaagaagaagccttttcaagtaaaaggtgcttggaatggttctatgaatatgcaggaactgatgatgttgtaggccctgaaggcatggagaaattttgtgaagacattggtgttgaaccagaaaacatggagtctcgcactgtcgccaggctggagtgcaatggtatgatgtcggctcactgcaacctctgcctcccgggttgaagcgatttcccctgcctcagcctcctgagtagctgggactacaggtagttatgcttgtcctagcttggaaattggatgcacaaaacatgggttattttactctacaggagtggttaaaaggaatgacttctctcca

SEQ ID NO: 125001 - DNA, 843 bp, Homo sapiens
  Payload ID: 4542
  Gene Symbol: DCUN1D4
  Gene Name: DCN1, defective in cullin neddylation 1, domain containing 4
  ENST ID: ENST00000505634
  CDS Start-End: 1-350
gaactgatgatgttgtaggccctgaaggcatggagaaattttgtgaagacattggtgttgaaccagaaaacgtagttatgcttgtcctagcttggaaattggatgcacaaaacatgggttattttactctacaggagtggttaaaaggaatgacttctctccaatgtgatacaacagaaaaactcagaaatactttggattacttaagatcattcttaaatgattctacaaactttaaacttatttacagatatgcgtttgactttgcacgggccgaagatggtgttagtgattgcgagctgctggctggcacccttgcagagcaggagaaaaggaccagcgcagcctagacataaacactgccaagtgcatgttgggactgttattaggaaaaatctggcccctttttccagtttttcaccaattcttagagcaatcaaaatacaaagttattaataaagaccagtggtgcaatgtcctagagtttagcagaacaattaatcttgacctcagcaactatgatgaagatggagcatggccagttttgttggacgagtttgtggagtggtataaagacaaacagatgtcctaggactttatgcatagcagcgagagagtcactgttaccacagttttgtcacccattagccataaattgctgtttgtatcaaagcgcatgctgcttctcttgcactgtttccctttcgcagggacatgttggtgtttgctattgaattggccagctctgcttgctgtgtggcattgttctcttggaaggctgctttgcagtttgtatttacactacagattggtgaatttgccaacgtcctcactgtgattatg

SEQ ID NO: 125002 - DNA, 577 bp, Homo sapiens
  Payload ID: 4542
  Gene Symbol: DCUN1D4
  Gene Name: DCN1, defective in cullin neddylation 1, domain containing 4
  ENST ID: ENST00000512199
  CDS Start-End: 1-66
aactttaaacttatttacagatatgcgtttgactttgcacggttctatatgatgcttgagagctgaaaggatcctcagaagtcatctggtccaggcctgtcaatgtaggatgatgagattgagagccagcgaggaggggcagcagcagggcccgcatctgcccttgacgtccaggaaaaggaccagcgcagcctagacataaacactgccaagtgcatgttgggactgttattaggaaaaatctggcccctttttccagtttttcaccaattcttagagcaatcaaaatacaaagttattaataaagaccagtggtgcaatgtcctagagtttagcagaacaattaatcttgacctcagcaactatgatgaagatggagcatggccagttttgttggacgagtttgtggagtggtataaagacaaacagatgtcctaggactttatgcatagcagcgagagagtcactgttaccacagttttgtcacccattagccataaattgctgtttgtatcaaagcgcatgctgcttctcttgcactgtttccctttcgcagggacatgttggtgtttgctat

SEQ ID NO: 125003 - DNA, 1584 bp, Homo sapiens
  Payload ID: 4542
  Gene Symbol: DCUN1D4
  Gene Name: DCN1, defective in cullin neddylation 1, domain containing 4
  ENST ID: ENST00000507741
  CDS Start-End: 91-165
agcttcgagccgaggtgcagtgagctggtggggggaccgcgaggcgagcgcgggagcctgggcggcgagccgggtgtgagctgcctgaaaatgcactcggatgccgccgctgtcaatatcagttttagagaatgtggcgtggagaaattctcaaggaaagagtaaaatgctggtgatgtgctgagggaacagaaggagtgtttgtgaatgtgcacacgtccgtttctggtctctcgtgtcagcgtcctacctgcacaaggttaaggcagcattaacagattttcagctgaactctcatctctcaacactggcaaatattcataagatctaccacacccttaataagctgaacctaacagaagacattggccaagacgatcaccaaacaggaagtctgcggtcttgcagttcttcagactgctttaataaagtgatgccaccaaggaaaaagagaagacctgcctctggagatgatttatctgccaagaaaagtagacatgatagcatgtatagaaaatatgattcgactagaataaagactgaagaagaagccttttcaagtaaaaggtgcttggaatggttctatgaatatgcaggaactgatgatgttgtaggccctgaaggcatggagaaattttgtgaagacattggtgttgaaccagaaaacgtagttatgcttgtcctagcttggaaattggatgcacaaaacatgggttattttactctacaggagtggttaaaaggaatgacttctctccaatgtgatacaacagaaaaactcagaaatactttggattacttaagatcattcttaaatgattctacaaactttaaacttatttacagatatgcgtttgactttgcacgggaaaaggaccagcgcagcctagacataaacactgccaagtgcatgttgggactgttattaggaaaaatctggcccctttttccagtttttcaccaattcttagagcaatcaaaatacaaagttattaataaagaccagtggtgcaatgtcctagagtttagcagaacaattaatcttgacctcagcaactatgatgaagatggagcatggccagttttgttggacgagtttgtggagtggtataaagacaaacagatgtcctaggactttatgcatagcagcgagagagtcactgttaccacagttttgtcacccattagccataaattgctgtttgtatcaaagcgcatgctgcttctcttgcactgtttccctttcgcagggacatgttggtgtttgctattgaattggccagctctgcttgctgtgtggcattgttctcttggaaggctgctttgcagtttgtatttacactacagattggtgaatttgccaacgtcctcactgtgattatgtgtatattgctgtttaaattttgtatatgtgtataaaaggaaaaaggttcacctagagattatttctgaaaaatgtattgtaaaaataattttgtggcatttctagtccctttttttgaatgaaccaattatactttatttggtctcctatgtagcatttcagaaaacaagagaaaactgttaccatgaacaaacattgcc

SEQ ID NO: 125004 - DNA, 4840 bp, Homo sapiens
  Payload ID: 4542
  Gene Symbol: DCUN1D4
  Gene Name: DCN1, defective in cullin neddylation 1, domain containing 4
  ENST ID: ENST00000477560
  CDS Start-End: 47-478
cgagcgcgggagcctgggcggcgagccgggtgtgagctgcctgaaaatgcactcggatgccgccgctgtcaattttcagctgaactctcatctctcaacactggcaaatattcataagatctaccacacccttaataagctgaacctaacagaagacattggccaagacgatcaccaaacaggaagtctgcggtcttgcagttcttcagactgctttaataaagtgatgccaccaaggaaaaagagaagacctgcctctggagatgatttatctgccaagaaaagtagacatgatagcatgtatagaaaatatgattcgactagaataaagactgaagaagaagccttttcaagtaaaaggtgcttggaatggttctatgaatatgcaggaactgatgatgttgtaggccctgaaggcatggagaaattttgtgaagacattggtgttgaaccagaaaacgtgagtcaaacttactgagttgggtgaatcagttggttgtttttcatacttaaatctttgttctttagcaaataaataaataattaaaaagtagtggtatgttagtttttatgaagcagtctaagaaataagttctaattctagtttgacttataagcagattctccattcttgtaagtgatatggtgtaactacagttattttttctctcatttaatttcttgtatgtaaaaggtacagtaagccagatgcttacaaaatggtgtggccacatgtgcctacaatgacggatcaactggaggccacattgtacgctgtgtaccttcgtgcccctcagtagttgttttagcctaatgtagagtcaatctaggacttataattattcatcatgattttgagtagattgtaatcatcaagaatttttcatagatcgtttacttccaattgaatttagctcagaagtgattgcttttttttttttgagatggagtctcgcactgtcgccaggctggagtgcaatggtatgatgtcggctcactgcaacctctgcctcccgggttgaagcgatttcccctgcctcagcctcctgagtagctgggactacaggtagttatgcttgtcctagcttggaaattggatgcacaaaacatgggttattttactctacaggagtggttaaaaggaatgacttctctccaatgtgatacaacagaaaaactcagaaatactttggattacttaagatcattcttaaatgattctacaaactttaaacttatttacagatatgcgtttgactttgcacgggccgaagatggtgttagtgattgcgagctgctggctggcacccttgcagagcaggagaaaaggaccagcgcagcctagacataaacactgccaagtgcatgttgggactgttattaggaaaaatctggcccctttttccagtttttcaccaattcttagagcaatcaaaatacaaagttattaataaagaccagtggtgcaatgtcctagagtttagcagaacaattaatcttgacctcagcaactatgatgaagatggagcatggccagttttgttggacgagtttgtggagtggtataaagacaaacagatgtcctaggactttatgcatagcagcgagagagtcactgttaccacagttttgtcacccattagccataaattgctgtttgtatcaaagcgcatgctgcttctcttgcactgtttccctttcgcagggacatgttggtgtttgctattgaattggccagctctgcttgctgtgtggcattgttctcttggaaggctgctttgcagtttgtatttacactacagattggtgaatttgccaacgtcctcactgtgattatgtgtatattgctgtttaaattttgtatatgtgtataaaaggaaaaaggttcacctagagattatttctgaaaaatgtattgtaaaaataattttgtggcatttctagtccctttttttgaatgaaccaattatactttatttggtctcctatgtagcatttcagaaaacaagagaaaactgttaccatgaacaaacattgccagaattaaccttactgtttaagaggccaacttctggaaggaggtaggagtcataactttttagaggcatatgccaaatatcatttggtatacttaacaatattagtgttttaaaatgatgagttataattatttgaacatatagatatgtaacatgccacaaatcatttctaccatgcaaggtgtataagttgtttattttttagtgttaaaactataatagcttgaatataggtaccaatgaacaaattcaaattgcacctcttttcttaaaagaatgggatttaaactcttataaacattctttaacttttttgtttgtttgttctctttttttccttttgcattcttctagccagtgattgatctgctaatgctttctttgccactctaagtaaaatttatttcacctcctcaatgaaaacctcatggttttgctggctgtttataactgcatcgcacttctagttgtggcttgaattttcagttaagctttcatggtatgtaattttccagccttttgagaaaacaagcatactataagtgagagctgttttgttttccttgtttgtttgtttcatgctaggcttttcctggcagcatgtccattgcaggcagtggacaagaaaccaccagcattgagctaacccagtacatgctaggacctgtcctagaggggccacttttcattacctgagttatttgtacagaagggcaatagccattatttttgtggatgaggaaacaagaataaacagaatggtatttttaggtttgtattttatgtctttttttttttttttttttgccattcttgaggaaatatagagatgacatgttttcaccccaactatctggtgctattgaatgactaattcagtccctaaagttctgtgaaaacacaaaagtctaatgatttgagtgagtaaaaggtaatggtgcatttgaacaagtaaatgctgtcgtggtcagcaagatccgtgatttgaacatgtgatgactggaaaaaggtttgggttatttggaactctggctaaaacttctttcgggtgacatgtgatcgtttaaatggcattaagtgaataaagcacacagacagtgctactcttgaccactattttaccatttctttgcaaacagtgttcacattttcatattttttccctaactaaaccaccaaagaaagaaattttgtatgtatatacagtgtgtgtgtatacaaaatcatgatatagtagaatgcaactactttctttttctaccaaacgaaaggttttatttgctgtgaaataaaccagaagtttaaaaaaccctgtagtgattaagcatacttaaccactccttatttgtagattcactttcaaccttaaaaattaataccagtttgcataaaccaatatctgaaaagaacaggaaatgttaatggcaagcaacagctattaatactgatgtgatggatgcatttgttttgcagtggtgactggcctaggcaggtttggatctgtgaagaattgattcattttcaaaattattccataaagttaaaaagttacactttaaaggcaacaggtcatacagttctttaaatctgatcaactgtagctttatttaaagcaaatataaatcatagatgaagttattttaaacactatgttagaatatagagatttttaaaaaatgctgataagcacagttaattctaaaatgagaggattgttacaggagggagatgttacagttaatccacaatcaacattttgatggtagggaaaaaactgcgtaaaaactattgcattatgtatgataagaaagtaagtattccaaagggataatcttgcatattaagaaaactccaaataatctttaaactgccttgaaaaataaacctctttgactgctgagcggcagagtgcttacccttgattgtcttgattttatatatttatttctaaggggagaaaaaggggtcagacagagtaatatgatacattttcttaaaaacttctctaagttgcacaaaactgaacaatcatcaagcacttatttactggctaatgttgaataaattagggtgccttcatctgggttttctttagtacctaagtctacaaccctttctctttttctattgtgtttcgaactccacattgcaatactctgttgtcatggaatacaacctttagatgtttactgctgaagtaggtcagaaattgtattatttgatttgcctcaaacatccactgtaatgttacatgcaccttttttgaagcatgaactctgaattatgtttttataaatctgactaggcaaacctagattctggtttcacaatggatttattttctctctcagtctccattttaacagtgcttttgaagtttatacagaaagctttaaaagttagtttgtgcccttggtttttattcttaaaactgctaaaatacctctgtaagccttatcctttattctttcatatgttgtataataaatgtatagatttcattgaccaactaaaatgttgggtgtctgtaaatgagaccaaaacgtgggttgcttttttcataaaataatttctattgggggttactgttcaatgacagcaggtaacctataactgtgaatgcttcgtgtcgtcagtatttgcattacattcataaaagtgtgcaagtcctgtgactcccagcttaactgaaatactgttatgccacctaacttgagtacagcaaactggttttaggtttcaatgacattgatgtaaaatgatatcccatgaataaaaagtatttgtgtttggtttcagaa

SEQ ID NO: 125005 - DNA, 2293 bp, Homo sapiens
  Payload ID: 4542
  Gene Symbol: DCUN1D4
  Gene Name: DCN1, defective in cullin neddylation 1, domain containing 4
  ENST ID: ENST00000509376
  CDS Start-End: 244-384
agtggggggcggggcctcgttgccagctccagaccggcgctatgggcactccttttgtcaaatgagagacgcagcagggcggcccctgagccgcggtttagccaatggagaaggcgagatgggcgggctgggagtgcccggcggcgggtcctcagcttcgagccgaggtgcagtgagctggtggggggaccgcgaggcgagcgcgggagcctgggcggcgagccgggtgtgagctgcctgaaaatgcactcggatgccgccgctgtcaattttcagctgaactctcatctctcaacactggcaaatattcataagatctaccacacccttaataagctggaagtctgcggtcttgcagttcttcagactgctttaataaagtgatgccaccaaggaaaaagagaagacctgcctctggagatgatttatctgccaagaaaagtagacatgatagcatgtatagaaaatatgattcgactagaataaagactgaagaagaagccttttcaagtaaaaggtgcttggaatggttctatgaatatgcaggaactgatgatgttgtaggccctgaaggcatggagaaattttgtgaagacattggtgttgaaccagaaaacgtgagtcaaacttactgagttgggtgaatcagttggttgtttttcatacttaaatctttgttctttagcaaataaataaataattaaaaagtagtggtatgttagtttttatgaagcagtctaagaaataagttctaattctagtttgacttataagcagattctccattcttgtaagtgatatggtgtaactacagttattttttctctcatttaatttcttgtatgtaaaaggtacagtaagccagatgcttacaaaatggtgtggccacatgtgcctacaatgacggatcaactggaggccacattgtacgctgtgtaccttcgtgcccctcagtagttgttttagcctaatgtagagtcaatctaggacttataattattcatcatgattttgagtagattgtaatcatcaagaatttttcatagatcgtttacttccaattgaatttagctcagaagtgattgcttttttttttttgagatggagtctcgcactgtcgccaggctggagtgcaatggtatgatgtcggctcactgcaacctctgcctcccgggttgaagcgatttcccctgcctcagcctcctgagtagctgggactacaggtagttatgcttgtcctagcttggaaattggatgcacaaaacatgggttattttactctacaggagtggttaaaaggaatgacttctctccaatgtgatacaacagaaaaactcagaaatactttggattacttaagatcattcttaaatgattctacaaactttaaacttatttacagatatgcgtttgactttgcacggcaatcaaaatacaaagttattaataaagaccagtggtgcaatgtcctagagtttagcagaacaattaatcttgacctcagcaactatgatgaagatggagcatggccagttttgttggacgagtttgtggagtggtataaagacaaacagatgtcctaggactttatgcatagcagcgagagagtcactgttaccacagttttgtcacccattagccataaattgctgtttgtatcaaagcgcatgctgcttctcttgcactgtttccctttcgcagggacatgttggtgtttgctattgaattggccagctctgcttgctgtgtggcattgttctcttggaaggctgctttgcagtttgtatttacactacagattggtgaatttgccaacgtcctcactgtgattatgtgtatattgctgtttaaattttgtatatgtgtataaaaggaaaaaggttcacctagagattatttctgaaaaatgtattgtaaaaataattttgtggcatttctagtccctttttttgaatgaaccaattatactttatttggtctcctatgtagcatttcagaaaacaagagaaaactgttaccatgaacaaacattgccagaattaaccttactgtttaagaggccaacttctggaaggaggtaggagtcataactttttagaggcatatgccaaatatcatttggtatacttaacaatattagtgttttaaaatgatgagttataattatttgaacatatagatatgtaacatgccacaaatcatttctaccatgcaaggtgtataagttgtttattttttagtgttaaaactataatagcttgaatataggtaccaatgaacaaattcaaattgc

SEQ ID NO: 125006 - DNA, 548 bp, Homo sapiens
  Payload ID: 4542
  Gene Symbol: DCUN1D4
  Gene Name: DCN1, defective in cullin neddylation 1, domain containing 4
  ENST ID: ENST00000502930
  CDS Start-End: 111-251
gtgcccggcggcgggtcctcagcttcgagccgaggtgcagtgagctggtggggggaccgcgaggcgagcgcgggagcctgggcggcgagccgggtgtgagctgcctgaaaatgcactcggatgccgccgctgtcaattttcagctgaactctcatctctcaacactggcaaatattcataagatctaccacacccttaataagctggaagtctgcggtcttgcagttcttcagactgctttaataaagtgatgccaccaaggaaaaagagaagacctgcctctggagatgatttatctgccaagaaaagtagacatgatagcatgtatagaaaatatgattcgactagaataaagactgaagaagaagccttttcaagtaaaaggtgcttggaatggttctatgaatatgcaggaactgatgatgttgtaggccctgaaggcatggagaaattttgtgaagacattggtgttgaaccagaaaacgtagttatgcttgtcctagcttggaaattggatgcacaaaacatgggttattttactctacagg

SEQ ID NO: 125007 - DNA, 560 bp, Homo sapiens
  Payload ID: 4542
  Gene Symbol: DCUN1D4
  Gene Name: DCN1, defective in cullin neddylation 1, domain containing 4
  ENST ID: ENST00000510808
  CDS Start-End: 1-309
ttattttactctacaggagtggttaaaaggaatgacttctctccagaaaaggaccagcgcagcctagacataaacactgccaagtgcatgttgggactgttattaggaaaaatctggcccctttttccagtttttcaccaattcttagagcaatcaaaatacaaagttattaataaagaccagtggtgcaatgtcctagagtttagcagaacaattaatcttgacctcagcaactatgatgaagatggagcatggccagttttgttggacgagtttgtggagtggtataaagacaaacagatgtcctaggactttatgcatagcagcgagagagtcactgttaccacagttttgtcacccattagccataaattgctgtttgtatcaaagcgcatgctgcttctcttgcactgtttccctttcgcagggacatgttggtgtttgctattgaattggccagctctgcttgctgtgtggcattgttctcttggaaggctgctttgcagtttgtatttacactacagattggtgaatttgccaacgtcctcactgtgattatg

SEQ ID NO: 125008 - DNA, 645 bp, Homo sapiens
  Payload ID: 4542
  Gene Symbol: DCUN1D4
  Gene Name: DCN1, defective in cullin neddylation 1, domain containing 4
  ENST ID: ENST00000505403
  CDS Start-End: 8-645
ggggtgcatggaggtggaggcagcgttgggctgtagcgggcagggccggggatgtgggggggtggcaccggcggggagagggagggagcgagcgagcgagcggggcacaagggtgaggatttccaaagggctgagtggtgcgggcggctccgtgagaaaggcggattttcagctgaactctcatctctcaacactggcaaatattcataagatctaccacacccttaataagctgaacctaacagaagacattggccaagacgatcaccaaacaggaagtctgcggtcttgcagttcttcagactgctttaataaagtgatgccaccaaggaaaaagagaagacctgcctctggagatgatttatctgccaagaaaagtagacatgatagcatgtatagaaaatatgattcgactagaataaagactgaagaagaagccttttcaagtaaaaggtgcttggaatggttctatgaatatgcaggaactgatgatgttgtaggccctgaaggcatggagaaattttgtgaagacattggtgttgaaccagaaaacgtagttatgcttgtcctagcttggaaattggatgcacaaaacatgggttattttactctacaggagtggttaaaaggaatgacttctctcca

SEQ ID NO: 125009 - DNA, 1337 bp, Homo sapiens
  Payload ID: 4543
  Gene Symbol: DCUN1D5
  Gene Name: DCN1, defective in cullin neddylation 1, domain containing 5
  Uniprot ID: Q9BTE7
  ENST ID: ENST00000260247
  CDS Start-End: 344-1057
gattgcgtcacttccgggcctcagcgattcgcctccgggttaggctgagcctcttgcttgctgtgactggtggagctgccgcgctgtccgcgttatctcctcccggtgagaacgaaccgcagtgtccaccggcgaggagccagccctgtcccggtcagagaaagacgacgaggatacctgggagcgggcggcggccgggctgggccgcgccggtgcgggctggcgactctgctcctccgcttgctgctgtctctgggaactgggtgccagcgctgaggggcttccagcggacagggacccccttccccggctcccctgcccaccctgccggggagggcggaagatgccggtgaagaagaagagaaaatcccctggggtggcagcagcagtagcggaagacggaggcctcaaaaagtgtaaaatctccagctattgcagatcccaaccccctgctagactaataagtggagaggaacatttttcaagcaagaagtgcctggcttggttttatgaatatgcaggtcctgatgaagttgtagggccagaaggaatggaaaaattttgtgaagacattggtgttgaacctgaaaatattattatgttagttttagcgtggaaattggaggctgaaagcatgggattttttaccaaggaagaatggttaaagggaatgacttcattacagtgtgactgcacagaaaagttacaaaacaaatttgactttttgcgctcacagttgaatgatatttcgtcatttaagaatatctacagatatgcctttgattttgcaagggataaagatcagagaagccttgatattgatactgctaaatctatgttagctcttctgcttgggaggacatggccactgttttcagtattttaccagtacctggagcaatcaaagtatcgtgttatgaacaaagatcaatggtacaatgtattagaattcagcagaacagtccatgctgatcttagtaactatgatgaagatggtgcttggcctgttcttcttgatgaatttgttgagtggcaaaaagtccgtcagacatcatagcaagaactatgtgaagaaaatgcaaacctttcaattcccacgtgtatacaagctaatgtgatgagggggaaaaaaatccaacgggtgcattttcattcatatgaaagacttctcatagtacttttttttcctttttttaaaggaggtttttcttgttacatgtgatgggcattgagccacacctcttcttagactgaatattgaagtttttgttttgagttatgtttataacatttatttcagaacaataaagattcagatttgtgacaaaggccttaaa

SEQ ID NO: 125010 - DNA, 1310 bp, Homo sapiens
  Payload ID: 4543
  Gene Symbol: DCUN1D5
  Gene Name: DCN1, defective in cullin neddylation 1, domain containing 5
  ENST ID: ENST00000529281
  CDS Start-End: 306-521
gttaggctgagcctcttgcttgctgtgactggtggagctgccgcgctgtccgcgttatctcctcccggtgagaacgaaccgcagtgtccaccggcgaggagccagccctgtcccggtcagagaaagacgacgaggatacctgggagcgggcggcggccgggctgggccgcgccggtgcgggctggcgactctgctcctccgcttgctgctgtctctgggaactgggtgccagcgctgaggggcttccagcggacagggacccccttccccggctcccctgcccaccctgccggggagggcggaagatgccggtgaagaagaagagaaaatcccctggggtggcagcagcagtagcggaagacggaggcctcaaaaagtgtaaaatctccaggtaccatctccccccacccttcaagcttccctcctccctcctttgctggacaactggaggaaaaggagtcgggcccggcctgccgggctggggctggagacagctattgcagatcccaaccccctgctagactaataagtggagaggaacatttttcaagcaagaagtgcctggcttggttttatgaatatgcaggtcctgatgaagttgtagggccagaaggaatggaaaaattttgtgaagacattggtgttgaacctgaaaatattattatgttagttttagcgtggaaattggaggctgaaagcatgggattttttaccaaggaagaatggttaaagggaatgacttcattacagtgtgactgcacagaaaagttacaaaacaaatttgactttttgcgctcacagttgaatgatatttcgtcatttaagaatatctacagatatgcctttgattttgcaagggataaagatcagagaagccttgatattgatactgctaaatctatgttagctcttctgcttgggaggacatggccactgttttcagtattttaccagtacctggagcaatcaaagtatcgtgttatgaacaaagatcaatggtacaatgtattagaattcagcagaacagtccatgctgatcttagtaactatgatgaagatggtgcttggcctgttcttcttgatgaatttgttgagtggcaaaaagtccgtcagacatcatagcaagaactatgtgaagaaaatgcaaacctttcaattcccacgtgtatacaagctaatgtgatgagggggaaaaaaatccaacgggtgcattttcattcatatgaaagacttctcatagtacttttttttcctttttttaaaggaggtttttcttgttacatgtgatgggcattgagccacacctcttc

SEQ ID NO: 125011 - DNA, 808 bp, Homo sapiens
  Payload ID: 4543
  Gene Symbol: DCUN1D5
  Gene Name: DCN1, defective in cullin neddylation 1, domain containing 5
  ENST ID: ENST00000527260
  CDS Start-End: 1-586
ctattgcagatcccaaccccctgctagactaataagtggagaggaacatttttcaagcaagaagtgcctggcttggttttatgaatatgcaggtcctgatgaagttgtagggccagaaggaatggaaaaattttgtgaagacattggtgttgaacctgaaaatattattatgttagttttagcgtggaaattggaggctgaaagcatgggattttttaccaaggaagaatggttaaagggaatgacttcattacagtgtgactgcacagaaaagttacaaaacaaatttgactttttgcgctcacagttgaatgatatttcgtcatttaagaatatctacagatatgcctttgattttgcaagggataaagatcagagaagccttgatattgatactgctaaatctatgttagctcttctgcttgggaggacatggccactgttttcagtattttaccagtacctggagggcctgttcttcttgatgaatttgttgagtggcaaaaagtccgtcagacatcatagcaagaactatgtgaagaaaatgcaaacctttcaattcccacgtgtatacaagctaatgtgatgagggggaaaaaaatccaacgggtgcattttcattcatatgaaagacttctcatagtacttttttttcctttttttaaaggaggtttttcttgttacatgtgatgggcattgagccacacctcttcttagactgaatattgaagtttttgttttgagttatgtttataacatttatttcagaacaataaagattcagatttgtgacaaaggccttaaagtg

SEQ ID NO: 125012 - DNA, 842 bp, Homo sapiens
  Payload ID: 4543
  Gene Symbol: DCUN1D5
  Gene Name: DCN1, defective in cullin neddylation 1, domain containing 5
  ENST ID: ENST00000527779
  CDS Start-End: 277-531
tggtggagctgccgcgctgtccgcgttatctcctcccggtgagaacgaaccgcagtgtccaccggcgaggagccagccctgtcccggtcagagaaagacgacgaggatacctgggagcgggcggcggccgggctgggccgcgccggtgcgggctggcgactctgctcctccgcttgctgctgtctctgggaactgggtgccagcgctgaggggcttccagcggacagggacccccttccccggctcccctgcccaccctgccggggagggcggaagatgccggtgaagaagaagagaaaatcccctggggtggcagcagcagtagcggaagacggaggcctcaaaaagtgtaaaatctccagctattgcagatcccaaccccctgctagactaataagtggagaggaacatttttcaagcaagaagtgcctggcttggttttatgaatatgcaggtcctgatgaagttgtagggccagaaggaatggaaaaattttgtgaagacattggtgttgaacctgaaaatgtgtgactgcacagaaaagttacaaaacaaatttgactttttgcgctcacagttgaatgatatttcgtcatttaagaatatctacagatatgcctttgattttgcaagggataaagatcagagaagccttgatattgatactgctaaatctatgttagctcttctgcttgggaggacatggccactgttttcagtattttaccagtacctggagcaatcaaagtatcgtgttatgaacaaagatcaatggtacaatgtattagaattcagcagaacagtccatgctgatcttagtaactatgatgaagatggtgctt

SEQ ID NO: 125013 - DNA, 1535 bp, Homo sapiens
  Payload ID: 4543
  Gene Symbol: DCUN1D5
  Gene Name: DCN1, defective in cullin neddylation 1, domain containing 5
  ENST ID: ENST00000531571
  CDS Start-End: 290-493
tgcttgctgtgactggtggagctgccgcgctgtccgcgttatctcctcccggtgagaacgaaccgcagtgtccaccggcgaggagccagccctgtcccggtcagagaaagacgacgaggatacctgggagcgggcggcggccgggctgggccgcgccggtgcgggctggcgactctgctcctccgcttgctgctgtctctgggaactgggtgccagcgctgaggggcttccagcggacagggacccccttccccggctcccctgcccaccctgccggggagggcggaagatgccggtgaagaagaagagaaaatcccctggggtggcagcagcagtagcggaagacggaggcctcaaaaagtgtaaaatctccaggtaccatctccccccacccttcaagcttccctcctccctcctttgctggacaactggaggaaaaggagtcgggcccggcctgccgggctggggctggagacaggtgaggcccctttgatcgagctaggctgtaggtgccgaacaccgcgagtctccgcgcccgacccgacctcgtgttcgagtgtgtgcacgctggcgtttatggagagactagaagagccgcccacgttaagagtctacgtgccctgcagggtggggaacagatgcatatctattgcagatcccaaccccctgctagactaataagtggagaggaacatttttcaagcaagaagtgcctggcttggttttatgaatatgcaggtcctgatgaagttgtagggccagaaggaatggaaaaattttgtgaagacattggtgttgaacctgaaaatattattatgttagttttagcgtggaaattggaggctgaaagcatgggattttttaccaaggaagaatggttaaagggaatgacttcattacagtgtgactgcacagaaaagttacaaaacaaatttgactttttgcgctcacagttgaatgatatttcgtcatttaagaatatctacagatatgcctttgattttgcaagggataaagatcagagaagccttgatattgatactgctaaatctatgttagctcttctgcttgggaggacatggccactgttttcagtattttaccagtacctggagcaatcaaagtatcgtgttatgaacaaagatcaatggtacaatgtattagaattcagcagaacagtccatgctgatcttagtaactatgatgaagatggtgcttggcctgttcttcttgatgaatttgttgagtggcaaaaagtccgtcagacatcatagcaagaactatgtgaagaaaatgcaaacctttcaattcccacgtgtatacaagctaatgtgatgagggggaaaaaaatccaacgggtgcattttcattcatatgaaagacttctcatagtacttttttttcctttttttaaaggaggtttttcttgttacatgtgatgggcattgagccacacctcttcttagactgaatattgaagtttttgttttgagttatgtttataacatttatttcagaacaataaagattcagat

SEQ ID NO: 125014 - DNA, 727 bp, Homo sapiens
  Payload ID: 4543
  Gene Symbol: DCUN1D5
  Gene Name: DCN1, defective in cullin neddylation 1, domain containing 5
  ENST ID: ENST00000529294
  CDS Start-End: 1-205
gaagaagagaaaatcccctggggtggcagcagcagtagcggaagacggaggcctcaaaaagtgtaaaatctccaggtaccatctccccccacccttcaagcttccctcctccctcctttgctggacaactggaggaaaaggagtcgggcccggcctgccgggctggggctggagacagctattgcagatcccaaccccctgctagactaataagtggagaggaacatttttcaagcaagaagtgcctggcttggttttatgaatatgcaggtcctgatgaagttgtagggccagaaggaatggaaaaattttgtgaagacattggtgttgaacctgaaaatgtgtgactgcacagaaaagttacaaaacaaatttgactttttgcgctcacagttgaatgatatttcgtcatttaagaatatctacagatatgcctttgattttgcaagggataaagatcagagaagccttgatattgatactgctaaatctatgttagctcttctgcttgggaggacatggccactgttttcagtattttaccagtacctggagcaatcaaagtatcgtgttatgaacaaagatcaatggtacaatgtattagaattcagcagaacagtccatgctgatcttagtaactatgatgaagatggtgcttggcctgttcttcttgatgaatttgttgagtggcaaaaagtccgtcagacatcatagcaagaactatgtg

SEQ ID NO: 125015 - DNA, 790 bp, Homo sapiens
  Payload ID: 4543
  Gene Symbol: DCUN1D5
  Gene Name: DCN1, defective in cullin neddylation 1, domain containing 5
  ENST ID: ENST00000527576
  CDS Start-End: 283-375
tgtgactggtggagctgccgcgctgtccgcgttatctcctcccggtgagaacgaaccgcagtgtccaccggcgaggagccagccctgtcccggtcagagaaagacgacgaggatacctgggagcgggcggcggccgggctgggccgcgccggtgcgggctggcgactctgctcctccgcttgctgctgtctctgggaactgggtgccagcgctgaggggcttccagcggacagggacccccttccccggctcccctgcccaccctgccggggagggcggaagatgccggtgaagaagaagagaaaatcccctggggtggcagcagcagtagcggaagacggaggcctcaaaaagtgtaaaatctccaggtcctgatgaagttgtagggccagaaggaatggaaaaattttgtgaagacattggtgttgaacctgaaaatgtgtgactgcacagaaaagttacaaaacaaatttgactttttgcgctcacagttgaatgatatttcgtcatttaagaatatctacagatatgcctttgattttgcaagggataaagatcagagaagccttgatattgatactgctaaatctatgttagctcttctgcttgggaggacatggccactgttttcagtattttaccagtacctggagcaatcaaagtatcgtgttatgaacaaagatcaatggtacaatgtattagaattcagcagaacagtccatgctgatcttagtaactatgatgaagatggtgcttggcctgttcttcttgatgaatttgttgagtggca

SEQ ID NO: 125016 - DNA, 1030 bp, Homo sapiens
  Payload ID: 4543
  Gene Symbol: DCUN1D5
  Gene Name: DCN1, defective in cullin neddylation 1, domain containing 5
  ENST ID: ENST00000531543
  CDS Start-End: 318-776
attcgcctccgggttaggctgagcctcttgcttgctgtgactggtggagctgccgcgctgtccgcgttatctcctcccggtgagaacgaaccgcagtgtccaccggcgaggagccagccctgtcccggtcagagaaagacgacgaggatacctgggagcgggcggcggccgggctgggccgcgccggtgcgggctggcgactctgctcctccgcttgctgctgtctctgggaactgggtgccagcgctgaggggcttccagcggacagggacccccttccccggctcccctgcccaccctgccggggagggcggaagatgccggtgaagaagaagagaaaatcccctggggtggcagcagcagtagcggaagacggaggcctcaaaaagtgtaaaatctccaggtgtgactgcacagaaaagttacaaaacaaatttgactttttgcgctcacagttgaatgatatttcgtcatttaagaatatctacagatatgcctttgattttgcaagggataaagatcagagaagccttgatattgatactgctaaatctatgttagctcttctgcttgggaggacatggccactgttttcagtattttaccagtacctggagcaatcaaagtatcgtgttatgaacaaagatcaatggtacaatgtattagaattcagcagaacagtccatgctgatcttagtaactatgatgaagatggtgcttggcctgttcttcttgatgaatttgttgagtggcaaaaagtccgtcagacatcatagcaagaactatgtgaagaaaatgcaaacctttcaattcccacgtgtatacaagctaatgtgatgagggggaaaaaaatccaacgggtgcattttcattcatatgaaagacttctcatagtacttttttttcctttttttaaaggaggtttttcttgttacatgtgatgggcattgagccacacctcttcttagactgaatattgaagtttttgttttgagttatgtttataacatttatttcagaacaataaaga

SEQ ID NO: 125017 - DNA, 651 bp, Homo sapiens
  Payload ID: 4543
  Gene Symbol: DCUN1D5
  Gene Name: DCN1, defective in cullin neddylation 1, domain containing 5
  ENST ID: ENST00000525420
  CDS Start-End: 323-415
cagcgattcgcctccgggttaggctgagcctcttgcttgctgtgactggtggagctgccgcgctgtccgcgttatctcctcccggtgagaacgaaccgcagtgtccaccggcgaggagccagccctgtcccggtcagagaaagacgacgaggatacctgggagcgggcggcggccgggctgggccgcgccggtgcgggctggcgactctgctcctccgcttgctgctgtctctgggaactgggtgccagcgctgaggggcttccagcggacagggacccccttccccggctcccctgcccaccctgccggggagggcggaagatgccggtgaagaagaagagaaaatcccctggggtggcagcagcagtagcggaagacggaggcctcaaaaagtgtaaaatctccaggtcctgatgaagttgtagggccagaaggaatggaaaaattttgtgaagacattggtgttgaacctgaaaatattattatgttagttttagcgtggaaattggaggctgaaagcatgggattttttaccaaggaagaatggttaaagggaatgacttcattacagtgtgactgcacagaaaagttacaaaacaaatttgactttttgcgctcacagttgaatgatatttcgtcatttaagaata

SEQ ID NO: 125018 - DNA, 290 bp, Homo sapiens
  Payload ID: 4543
  Gene Symbol: DCUN1D5
  Gene Name: DCN1, defective in cullin neddylation 1, domain containing 5
  ENST ID: ENST00000583974
  CDS Start-End: 1-129
attattatgttagttttagcgtggaaattggaggctgaaagcatgggattttttaccaaggaagaatggttaaagggaatgacttcattacagctttctataactgaattggctttcctttttgtgtgaaagaatttgtgggtatatgaactggatataactggcctagactagccattttgtgtgactgcacagaaaagttacaaaacaaatttgactttttgcgctcacagttgaatgatatttcgtcatttaagaatatctacagatatgcctttgattttgcaagg

SEQ ID NO: 125019 - DNA, 2279 bp, Homo sapiens
  Payload ID: 4544
  Gene Symbol: DCST1
  Gene Name: DC-STAMP domain containing 1
  Uniprot ID: Q5T197
  ENST ID: ENST00000295542
  CDS Start-End: 97-2217
gacccagttccgaggactggagaggggatagaaccttgtgtccaaggaggtccttcaggagacctgggatgagtggtgcttccccaaaacagactcatggacattaaacatcatcagaatggcacaagagggcaaagaagaaaacagcctcataccacggtgcagaggctcctgacctgggggctgccagtctcctgtagctggttcctgtggcgccagccgggcgagtttcctgtcactgctctcctgctgggggcaggcgctggggggctcctggccataggtctctttcagctcctggtgaaccccatgaacatctacgaagaacagaagattatgttcttgtacagcttggtgggcttgggggccatgggctgggggacctcccctcacatccgctgtgccagcctcctactagtacccaagatgctgggcaaggaaggcaggctctttgtcctgggatacgccttggctgccatctatgtggggccagtagccaatctgcgacacaatctcaacaacgtgatcgcatcgctgggctgcaccgtggagctgcagatcaacaacacccgcgcagcttggcgcatctccacagcccccttacgggccatgttcaaggacctgctgagtagcaaagaattgctgagagcagagactcggaacatctccgccacttttgaggacctggatgcccaggtgaatagtgagacgggctacacgcctgaggataccatggactcaggggagacagcccagggcagggaggcccgccaagccccagcctccagactccacctgtcgacacagaagatgtatgagctgaagaccaagctgcgttgctcctatgtggtgaaccaggccatactcagctgccgtcgttggtttgaccgcaagcatgaacagtgcatgaagcacatctgggtcccactcctcacccacctgctctgcctgcctatgaagttcaagttcttctgtggcattgccaaggtgatggaggtttggtgccgcaatcgcatcccagtggaaggcaactttgggcagacctacgactccctcaaccagtctattcgtggcctggatggggaattttcagccaatattgacttcaaggaagagaagcaggctggggtgctggggctcaacacaagctgggagcgcgtgagcaccgaggtgcgggactacgtgtaccgccaggaggcccggctggagtgggccctggggctgctgcacgtgctgctctcctgcactttcctgctggtcctgcatgcgtctttctcctacatggacagctataaccatgacattcgttttgacaacatctacatcagtacctacttctgccagatcgatgaccgcaggaagaagctgggcaaacggactctgctgccactccgcaaagctgaggagaaaaccgtcatcttcccttgcaagcccaccatccaggcctcagaaatgagcaatgtggtgagggagctcctggagacactgcccattctgctgctgctggtggtgctgtgtggcttggactgggctctctactccatcttcgacaccatccgccaccactccttcctgcagtactccttccgcagcagtcataaactggaggtgaaggtcgggggagactccatgctagcccggcttcttcgaaaaaccattggggccctgaacacctcctcagagacagtgatggaatcaaacaacatgccctgcctgccccagcctgtgggcctggatgccagggcctactggagagctgcagtaccgattggcctgttagtgtgtctctgcctgttacaggcttttggctaccgactccggagggtcatcgcagccttctacttccccaagcgagagaagaagcggatcctgttcctctacaatgacctattgaagaaaagagcagccttcaccaaactcaggagggccgctatcctgaggcgggagcgacagcagaaggctccgcgccacccgctggcggatatcctgcaccgcggctgcccgctcctgcgccgctggctgtgccggcgctgcgtggtgtgccaggcacccgagacgcccgagtcctacgtgtgccggacgctggactgcgaggccgtgtactgctggtcgtgctgggacgacatgcggcagcggtgcccggtctgcacgccccgcgaagagctctcttcctccgcctttagtgacagcaacgacgacactgcctacgcggggtgaagaggcgtcctgctcgctcttccgcaccgtccttcccggttaataaaatgccctgtacgctt

SEQ ID NO: 125020 - DNA, 2207 bp, Homo sapiens
  Payload ID: 4544
  Gene Symbol: DCST1
  Gene Name: DC-STAMP domain containing 1
  Uniprot ID: Q5T197
  ENST ID: ENST00000368419
  CDS Start-End: 68-2062
agaaccttgtgtccaaggaggtccttcaggagacctgggatgagtggtgcttccccaaaacagactcatggacattaaacatcatcagaatggcacaagagggcaaagaagaaaacagcctcataccacggtgcagaggctcctgacctgggggctgccagtctcctgtagctggttcctgtggcgccagccgggcgagtttcctgtcactgctctcctgctgggggcaggcgctggggggctcctggccataggtctctttcagctcctggtgaaccccatgaacatctacgaagaacagaagattatgttcttgtacagcttggtgggcttgggggccatgggctgggggacctcccctcacatccgctgtgccagcctcctactagtacccaagatgctgggcaaggaaggcaggctctttgtcctgggatacgccttggctgccatctatgtggggccagtagccaatctgcgacacaatctcaacaacgtgatcgcatcgctgggctgcaccgtggagctgcagatcaacaacacccgcgcagcttggcgcatctccacagcccccttacgggccatgttcaaggacctgctgagtagcaaagaattgctgagagcagagactcggaacatctccgccacttttgaggacctggatgcccaggtgaatagtgagacgggctacacgcctgaggataccatggactcaggggagacagcccagggcagggaggcccgccaagccccagcctccagactccacctgtcgacacagaagatgtatgagctgaagaccaagctgcgttgctcctatgtggtgaaccaggccatactcagctgccgtcgttggtttgaccgcaagcatgaacagtgcatgaagcacatctgggtcccactcctcacccacctgctctgcctgcctatgaagttcaagttcttctgtggcattgccaaggtgatggaggtttggtgccgcaatcgcatcccagtggaaggcaactttgggcagacctacgactccctcaaccagtctattcgtggcctggatggggaattttcagccaatattgacttcaaggaagagaagcaggctggggtgctggggctcaacacaagctgggagcgcgtgagcaccgaggtgcgggactacgtgtaccgccaggaggcccggctggagtgggccctggggctgctgcacgtgctgctctcctgcactttcctgctggtcctgcatgcgtctttctcctacatggacagctataaccatgacattcgttttgacaacatctacatcagtacctacttctgccagatcgatgaccgcaggaagaagctgggcaaacggactctgctgccactccgcaaagctgaggagaaaaccgtcatcttcccttgcaagcccaccatccaggcctcagaaatgagcaatgtggtgagggagctcctggagacactgcccattctgctgctgctggtggtgctgtgtggcttggactgggctctctactccatcttcgacaccatccgccaccactccttcctgcagtactccttccgcagcagtcataaactggaggtgaaggtcgggggagactccatgctagcccggcttcttcgaaaaaccattggggccctgaacacctcctcagagacagtgatggaatcaaacaacatgccctgcctgccccagcctgtgggcctggatgccagggcctactggagagctgcagtaccgattggcctgttagtgtgtctctgcctgttacaggcttttggctaccgactccggagggtcatcgcagccttctacttccccaagcgagagaagaagcggatcctgttcctctacaatgacctattgaagaaaagagcagccttcaccaaactcaggagggccgctatcctgaggcgggagcgacagcagaaggctccggtcttcactgagcctcagtttctccctctgaagaatggcaagactggagagatctgtaaggcctgctcactggagatcagcctagagtggtggtcaggtgtgggactccggtgccagagggcctaagtgtgtatcccggctccttccctcattactatgacaacggtgtgaccttgagcacatgacttaactgctgtgcctgggcttttgccttccataaaatggggttaactactccatctggttgttttaaggattaaatgagttgtac

SEQ ID NO: 125021 - DNA, 2199 bp, Homo sapiens
  Payload ID: 4544
  Gene Symbol: DCST1
  Gene Name: DC-STAMP domain containing 1
  Uniprot ID: Q5T197
  ENST ID: ENST00000423025
  CDS Start-End: 92-2137
agttccgaggactggagaggggatagaaccttgtgtccaaggaggtccttcaggagacctgggatgagtggtgcttccccaaaacagactcatggacattaaacatcatcagaatggcacaagagggcaaagaagaaaacagcctcataccacggtgcagaggctcctgacctgggggctgccagtctcctgtagctggttcctgtggcgccagccgggcgagtttcctgtcactgctctcctgctgggggcaggcgctggggggctcctggccataggcttgggggccatgggctgggggacctcccctcacatccgctgtgccagcctcctactagtacccaagatgctgggcaaggaaggcaggctctttgtcctgggatacgccttggctgccatctatgtggggccagtagccaatctgcgacacaatctcaacaacgtgatcgcatcgctgggctgcaccgtggagctgcagatcaacaacacccgcgcagcttggcgcatctccacagcccccttacgggccatgttcaaggacctgctgagtagcaaagaattgctgagagcagagactcggaacatctccgccacttttgaggacctggatgcccaggtgaatagtgagacgggctacacgcctgaggataccatggactcaggggagacagcccagggcagggaggcccgccaagccccagcctccagactccacctgtcgacacagaagatgtatgagctgaagaccaagctgcgttgctcctatgtggtgaaccaggccatactcagctgccgtcgttggtttgaccgcaagcatgaacagtgcatgaagcacatctgggtcccactcctcacccacctgctctgcctgcctatgaagttcaagttcttctgtggcattgccaaggtgatggaggtttggtgccgcaatcgcatcccagtggaaggcaactttgggcagacctacgactccctcaaccagtctattcgtggcctggatggggaattttcagccaatattgacttcaaggaagagaagcaggctggggtgctggggctcaacacaagctgggagcgcgtgagcaccgaggtgcgggactacgtgtaccgccaggaggcccggctggagtgggccctggggctgctgcacgtgctgctctcctgcactttcctgctggtcctgcatgcgtctttctcctacatggacagctataaccatgacattcgttttgacaacatctacatcagtacctacttctgccagatcgatgaccgcaggaagaagctgggcaaacggactctgctgccactccgcaaagctgaggagaaaaccgtcatcttcccttgcaagcccaccatccaggcctcagaaatgagcaatgtggtgagggagctcctggagacactgcccattctgctgctgctggtggtgctgtgtggcttggactgggctctctactccatcttcgacaccatccgccaccactccttcctgcagtactccttccgcagcagtcataaactggaggtgaaggtcgggggagactccatgctagcccggcttcttcgaaaaaccattggggccctgaacacctcctcagagacagtgatggaatcaaacaacatgccctgcctgccccagcctgtgggcctggatgccagggcctactggagagctgcagtaccgattggcctgttagtgtgtctctgcctgttacaggcttttggctaccgactccggagggtcatcgcagccttctacttccccaagcgagagaagaagcggatcctgttcctctacaatgacctattgaagaaaagagcagccttcaccaaactcaggagggccgctatcctgaggcgggagcgacagcagaaggctccgcgccacccgctggcggatatcctgcaccgcggctgcccgctcctgcgccgctggctgtgccggcgctgcgtggtgtgccaggcacccgagacgcccgagtcctacgtgtgccggacgctggactgcgaggccgtgtactgctggtcgtgctgggacgacatgcggcagcggtgcccggtctgcacgccccgcgaagagctctcttcctccgcctttagtgacagcaacgacgacactgcctacgcggggtgaagaggcgtcctgctcgctcttccgcaccgtccttcccggttaataaaatgccctgtacgctt

SEQ ID NO: 125022 - DNA, 1895 bp, Homo sapiens
  Payload ID: 4544
  Gene Symbol: DCST1
  Gene Name: DC-STAMP domain containing 1
  ENST ID: ENST00000525273
  CDS Start-End: 119-1705
gacccagttccgaggactggagaggggatagaaccttgtgtccaaggaggtccttcaggagacctgggatgagtggtgcttccccaaaacagactcatggacattaaacatcatcagaatggcacaagagggcaaagaagaaaacagcctcataccagtttccccagcctctatccacctgcaagccctgaatcctaatgagccccatcccaggcagaagagtgggctgttgagctaccctgtccccctcttagcggtgcagaggctcctgacctgggggctgccagtctcctgtagctggttcctgtggcgccagccgggcgagtttcctgtcactgctctcctgctgggggcaggcgctggggggctcctggccataggtctctttcagctcctggtgaaccccatgaacatctacgaagaacagaagattatgttcttgtacagcttggtgggcttgggggccatgggctgggggacctcccctcacatccgctgtgccagcctcctactagtacccaagatgctgggcaaggaaggcaggctctttgtcctgggatacgccttggctgccatctatgtggggccagtagccaatctgcgacacaatctcaacaacgtgatcgcatcgctgggctgcaccgtggagctgcagatcaacaacacccgcgcagcttggcgcatctccacagcccccttacgggccatgttcaaggacctgctgagtagcaaagaattgctgagagcagagactcggaacatctccgccacttttgaggacctggatgcccaggtgaatagtgagacgggctacacgcctgaggataccatggactcaggggagacagcccagggcagggaggcccgccaagccccagcctccagactccacctgtcgacacagaagatgtatgagctgaagaccaagctgcgttgctcctatgtggtgaaccaggccatactcagctgccgtcgttggtttgaccgcaagcatgaacagtgcatgaagcacatctgggtcccactcctcacccacctgctctgcctgcctatgaagttcaagttcttctgtggcattgccaaggtgatggaggtttggtgccgcaatcgcatcccagtggaaggcaactttgggcagacctacgactccctcaaccagtctattcgtggcctggatggggaattttcagccaatattgacttcaaggaagagaagcaggctggggtgctggggctcaacacaagctgggagcgcgtgagcaccgaggtgcgggactacgtgtaccgccaggaggcccggctggagtgggccctggggctgctgcacgtgctgctctcctgcactttcctgctggtcctgcatgcgtctttctcctacatggacagctataaccatgacattcgttttgacaacatctacatcagtacctacttctgccagatcgatgaccgcaggaagaagctgggcaaacggactctgctgccactccgcaaagctgaggagaaaaccgtcatcttcccttgcaagcccaccatccaggcctcagaaatgagcaatgtggtgagggagctcctggagacactgcccattctgctgctgctggtggtgctgtgtggcttggactgggctctctactccatcttcgacaccatccgccaccactccttcctgcagtactccttccgcagccgcaggcagtcataaactggaggtgaaggtcgggggagactccatgctagcccggcttcttcgaaaaaccattggggccctgaacacctcctcagagacagtgatggaatcaaacaacatgccgagagaagaagcggatcctgttcctctacaatgacctattgaagaaaagagcagccttcaccaaactcaggagggccgctat

SEQ ID NO: 125023 - DNA, 2392 bp, Homo sapiens
  Payload ID: 4545
  Gene Symbol: DCST2
  Gene Name: DC-STAMP domain containing 2
  Uniprot ID: Q5T1A1
  ENST ID: ENST00000368424
  CDS Start-End: 60-2381
ggagcacagaagtcagcgggcatctcctggagacaggcagacatttggtctcagcagccatgcccaaagtcatgaaggatgttgtgcaccccttggggggagaggagcctagcatggcgagagctgtggttcgcagcgtgggaggttttaccctgggcttgtctttagccacggcctacgggcttctggagctactggtggaaggccacagcccctggggttgcctggtgggcaccctcactttggctgccttccttagcctgggcatgggattctctcgccaggtccgagccactgtcctcctgctgctgcctcaggccttctccaggcagggccggacactactgttggtggctgcttttgggttggtgcttcaagggccttgtgccaacactctacgcaacttcacccgggccagcgaggctgtagcctgtggggcagagctggccctgaaccagaccgccgaagtgctacagagggccaagcaacctcttgtcagtgccctgaacaagattaaagctattgcccggaagaccaaagaggtggctgaccgggtccgcaagttctttcggtcaatcatggatggtgtgaaacacatagccagggctctccggaatgtgtggcagtggctcctgcacatcggcgatgtgtgcaactcggaactgggcaacccttacctgaagtgtgcacgggttttcgatgatgccaaggacagctgcatgatggtcataccacaagcctaccacctgtgttacgtgctcatgcccttcaaactggcgctctgtggacttgccagcctggtccaggtgttctgcgtcatccctaagtacattcaacccttcttgcgccagaccatcggcacccccgtgattcagttgctcaaccgggtgcgtcaggagtttgagttcaacatgacagccacccaccacttctctgtggatctcaatgcctctcggagcctgtcccaggtagccatggacctccacgaggctgtcagcatgaagctgcaccgtgtccgagaggccctggctctgatgggcttcaccacgcctctgctgcttgtgcttctctacctccaagccctattttaccggtattgttacctgaactgggaccattatgacaatatctacatcactagccgattcctgcgcatggaggctgtgcgctccacggcagggctgcccacagtgctaccgctcagtgctcacgaggccaggcgctacatcccaccgggctccatcttcttgtcccaatgggagaagtttttttacattctggagaccttcaaccttatccgacacctcctcctcgtgctgttcctagtcttcctagactatgctgtcttctgggtgcttgacctggcccggcaccagctgcagggggagattgtggcccgcagtcctgtgttggtgtctctaaccgtggaaggtactggctacgctgggaatatttatcgtgacctggtgtcagcatttgatgtcctgcagcaaggcaacatcagtattttgtcccggcgttgtctccttcgtccctcggagcctgacagcactggctacatagtcattggcgtcatgtatggcctatgcttcttcatcaccctgtttggcagctatgtcagccggctgcggcgagtcatctgtgcctcctactacccatcccgggagcaggagaggatctcctacctgtacaatgtacttctgagccgccgaaccaatctgttggctgccctgcaccgatcagtgaggcggcgggcggctgaccagggccacagaagtgccttcctagtgctggccagtcggtgcccctgcctaggtccatttgtcagccacttttggctgcatcaggcctactgcctgggctgtgggcagccccaggatgagggagacatggagaacactgtgtcctgcagtacccccggctgccaaggtctctactgcctcacttgcttccgcctcctggacaatacctgctccgtgtgtgcatctcccctctcctaccagggggacctggacctggagctggactccagcgatgaggagggccctcagctatggctggctgcagctcaaaggaaggaccctgagcaggcatggttattgcagcaacagctccaagaagtgctcggcaggagcctctcaatggagtccacttccgagtccagtgacctggatgaggagaaggggcctcagcagaggaagcacgggcagcagcccttacctgaagcccatcagcctgtcagcattctcaccagccctgagccccacagaccacctgagacatcctccgccactaaaggagcccccactccagcttcagaaccctcagtccctctctcacctccctctcttcctgatccttcccacccaccccccaaataaaccaaaagtgg

SEQ ID NO: 125024 - DNA, 2494 bp, Homo sapiens
  Payload ID: 4545
  Gene Symbol: DCST2
  Gene Name: DC-STAMP domain containing 2
  Uniprot ID: Q5T1A1
  ENST ID: ENST00000485982
  CDS Start-End: 81-2000
agaatacggtgagaaattccaggagcacagaagtcagcgggcatctcctggagacaggcagacatttggtctcagcagccatgcccaaagtcatgaaggatgttgtgcaccccttggggggagaggagcctagcatggcgagagctgtggttcgcagcgtgggaggttttaccctgggcttgtctttagccacggcctacgggcttctggagctactggtggaaggccacagcccctggggttgcctggtgggcaccctcactttggctgccttccttagcctgggcatgggattctctcgccaggtccgagccactgtcctcctgctgctgcctcaggccttctccaggcagggccggacactactgttggtggctgcttttgggttggtgcttcaagggccttgtgccaacactctacgcaacttcacccgggccagcgaggctgtagcctgtggggcagagctggccctgaaccagaccgccgaagtgctacagagggccaagcaacctcttgtcagtgccctgaacaagattaaagctattgcccggaagaccaaagaggtggctgaccgggtccgcaagttctttcggtcaatcatggatggtgtgaaacacatagccagggctctccggaatgtgtggcagtggctcctgcacatcggcgatgtgtgcaactcggaactgggcaacccttacctgaagtgtgcacgggttttcgatgatgccaaggacagctgcatgatggtcataccacaagcctaccacctgtgttacgtgctcatgcccttcaaactggcgctctgtggacttgccagcctggtccaggtgttctgcgtcatccctaagtacattcaacccttcttgcgccagaccatcggcacccccgtgattcagttgctcaaccgggtgcgtcaggagtttgagttcaacatgacagccacccaccacttctctgtggatctcaatgcctctcggagcctgtcccaggtagccatggacctccacgaggctgtcagcatgaagctgcaccgtgtccgagaggccctggctctgatgggcttcaccacgcctctgctgcttgtgcttctctacctccaagccctattttaccggtattgttacctgaactgggaccattatgacaatatctacatcactagccgattcctgcgcatggaggctgtgcgctccacggcagggctgcccacagtgctaccgctcagtgctcacgaggccaggcgctacatcccaccgggctccatcttcttgtcccaatgggagaagtttttttacattctggagaccttcaaccttatccgacacctcctcctcgtgctgttcctagtcttcctagactatgctgtcttctgggtgcttgacctggcccggcaccagctgcagggggagattgtggcccgcagtcctgtgttggtgtctctaaccgtggaaggtactggctacgctgggaatatttatcgtgacctggtgtcagcatttgatgtcctgcagcaaggcaacatcagtattttgtcccggcgttgtctccttcgtccctcggagcctgacagcactggctacatagtcattggcgtcatgtatggcctatgcttcttcatcaccctgtttggcagctatgtcagccggctgcggcgagtcatctgtgcctcctactacccatcccgggagcaggagaggatctcctacctgtacaatgtacttctgagccgccgaaccaatctgttggctgccctgcaccgatcagtgaggcggcgggcggctgaccagggccacagaagtgccttcctagtgctggccagtcggtgcccctgcctaggtccatttgtcagccacttttggctgcatcaggcctactgcctgggctgtgggcagccccaggatgagggagacatggagaacactgtgtcctgcagtacccccggctgccaaggatttatatgcaagtggcattgcagcagctccctagtgtgcaccccttgacaaggatggttcatccaggtctctactgcctcacttgcttccgcctcctggacaatacctgctccgtgtgtgcatctcccctctcctaccagggggacctggacctggagctggactccagcgatgaggagggccctcagctatggctggctgcagctcaaaggaaggaccctgagcaggcatggttattgcagcaacagctccaagaagtgctcggcaggagcctctcaatggagtccacttccgagtccagtgacctggatgaggagaaggggcctcagcagaggaagcacgggcagcagcccttacctgaagcccatcagcctgtcagcattctcaccagccctgagccccacagaccacctgagacatcctccgccactaaaggagcccccactccagcttcagaaccctcagtccctctctcacctccctctcttcctgatccttcccacccaccccccaaataaaccaaaagtggacacaagtgtgaa

SEQ ID NO: 125025 - DNA, 587 bp, Homo sapiens
  Payload ID: 4545
  Gene Symbol: DCST2
  Gene Name: DC-STAMP domain containing 2
  ENST ID: ENST00000467991
  CDS Start-End: 1-60
ctccttcgtccctcggagcctgacagcactggctacatagtcattggtgcccctgcctaggtccatttgtcagccacttttggctgcatcaggcctactgcctgggctgtgggcagccccaggatgagggagacatggagaacactgtgtcctgcagtacccccggctgccaaggtctctactgcctcacttgcttccgcctcctggacaatacctgctccgtgtgtgcatctcccctctcctaccagggggacctggacctggagctggactccagcgatgaggagggccctcagctatggctggctgcagctcaaaggaaggaccctgagcaggcatggttattgcagcaacagctccaagaagtgctcggcaggagcctctcaatggagtccacttccgagtccagtgacctggatgaggagaaggggcctcagcagaggaagcacgggcagcagcccttacctgaagcccatcagcctgtcagcattctcaccagccctgagccccacagaccacctgagacatcctccgccactaaaggagcccccactccagcttcagaaccctcagtccctctctcacct

SEQ ID NO: 125026 - DNA, 1222 bp, Homo sapiens
  Payload ID: 4546
  Gene Symbol: DCTPP1
  Gene Name: dCTP pyrophosphatase 1
  Uniprot ID: Q9H773
  ENST ID: ENST00000319285
  CDS Start-End: 96-608
atagagaactcccgtaattggtcggagctctggaggcggggcttcgagcgtggctcgtgggttttccgtgaagtcgcggtgcagcggtgggcggcatgtctgtggccggtggggagattcgtggggacacggggggagaggacactgctgctcccggccggttcagcttcagcccggagcccacgctcgaggacatccgccgcctccatgctgagtttgctgcggaacgagactgggaacagttccatcagcctcggaatctcctcctggccttggttggggaagtgggggagctggcagaactctttcagtggaaaaccgatggggaacctggcccccaaggctggtcccccagggaacgggcagcccttcaagaggagcttagtgacgtcctcatctacctggtggcattagcagcccgctgccgtgtggatctgccgctagcagtgctctccaaaatggacatcaaccggcgacgctacccagcccatctggcccgcagctcttcccgcaagtatacagaattgccccatggggccatctctgaagaccaggctgtggggcctgcggacattccctgtgactccacaggccagacctcaacctagaaagatggccacaggacttgcaactcagggtggtgtctgaagagcagagagtggcctggccctggagcctttttctagtcttttcagaatagatcatgggcctgaggcctccacttcttgaggtctgaggcccagcagcctctagaaggtagcctcctggtgtttgttctcccagtaaaatggttttgggcgataacttctagattattcctggatggccagggaggctctctgtctcagcaggtgatgacgggggtaccaggggtgcctctgagacccattctcgtgtttccctgttgtaccttttgcctgcagggcagagagatctggtttctagcaaattcccagtaggatgtcatgtaagttccttccccctcttagagattgaaggctgtaagagtccagatggtggagccaggctgtctgggttcaaatgccatctttgacacttgcaagctaaatgacattactcaaattaatcgttctgcacttcagcttccttgtctatcaaataaaaagaatagtacctgcccaatagggtcgtgaggtttcaatgagttatgtgaatgctcagggcggggcctggcacatagtaaagtacacttggtaagttt

SEQ ID NO: 125027 - DNA, 853 bp, Homo sapiens
  Payload ID: 4546
  Gene Symbol: DCTPP1
  Gene Name: dCTP pyrophosphatase 1
  ENST ID: ENST00000568434
  CDS Start-End: 385-534
gaattagttgcagaatctcctggtcccaggccccattacatactacgggggtagctgcctctggcccctgcatcaccctctaacccggagacttggacttacactcctttgtcctatttcagccgccgcctccatgctgagtttgctgcggaacgagactgggaacagttccatcagcctcggaatctcctcctggccttggttggggaagtgggggagctggcagaactctttcagtggaaaaccgatggggaacctggcccccaaggctggtcccccagggaacgggcagcccttcaagaggagcttagtgacgtcctcatctacctggtggcattagcagcccgctgccgtgtggatctgccgctagcagtgctctccaaaatggacatcaaccggcgacgctacccagcccatctggcccgcagctcttcccgcaagtatacagaattgccccatggggccatctctgaagaccaggctgtggggcctgcggacattccctgtgactccacaggccagacctcaacctagaaagatggccacaggacttgcaactcagggtggtgtctgaagagcagagagtggcctggccctggagcctttttctagtcttttcagaatagatcatgggcctgaggcctccacttcttgaggtctgaggcccagcagcctctagaaggtagcctcctggtgtttgttctcccagtaaaatggttttgggcgataacttctagattattcctggatggccagggaggctctctgtctcagcaggtgatgacgggggtaccaggggtgcctctgagacccattctcgtgtttccctgttgtaccttttgcctgcagggca

SEQ ID NO: 125028 - DNA, 801 bp, Homo sapiens
  Payload ID: 4546
  Gene Symbol: DCTPP1
  Gene Name: dCTP pyrophosphatase 1
  ENST ID: ENST00000567983
  CDS Start-End: 51-266
gagcgtggctcgtgggttttccgtgaagtcgcggtgcagcggtgggcggcatgtctgtggccggtggggagattccccgctgccgtgtggatctgccgctagcagtgctctccaaaatggacatcaaccggcgacgctacccagcccatctggcccgcagctcttcccgcaagtatacagaattgccccatggggccatctctgaagaccaggctgtggggcctgcggacattccctgtgactccacaggccagacctcaacctagaaagatggccacaggacttgcaactcagggtggtgtctgaagagcagagagtggcctggccctggagcctttttctagtcttttcagaatagatcatgggcctgaggcctccacttcttgaggtctgaggcccagcagcctctagaaggtagcctcctggtgtttgttctcccagtaaaatggttttgggcgataacttctagattattcctggatggccagggaggctctctgtctcagcaggtgatgacgggggtaccaggggtgcctctgagacccattctcgtgtttccctgttgtaccttttgcctgcagggcagagagatctggtttctagcaaattcccagtaggatgtcatgtaagttccttccccctcttagagattgaaggctgtaagagtccagatggtggagccaggctgtctgggttcaaatgccatctttgacacttgcaagctaaatgacattactcaaattaatcgttctgcacttcagcttccttgtctatcaaataaaaagaatagtacctgcccaa

SEQ ID NO: 125029 - DNA, 878 bp, Homo sapiens
  Payload ID: 4546
  Gene Symbol: DCTPP1
  Gene Name: dCTP pyrophosphatase 1
  ENST ID: ENST00000568973
  CDS Start-End: 475-624
gggaagcgggctggcagcggggctcgggtcctggctctgtgggctgtccctgggtgagccttcttacctcatctgcaaaatgggcgcagcggtgcacacctgaggcaagggaaattgggtggtgcctccgagtggtaactaggaacgcccttcagcctagccctgggaagataccggcaccagataccgcctctgctctccaggcgccggggccgccgcctccatgctgagtttgctgcggaacgagactgggaacagttccatcagcctcggaatctcctcctggccttggttggggaagtgggggagctggcagaactctttcagtggaaaaccgatggggaacctggcccccaaggctggtcccccagggaacgggcagcccttcaagaggagcttagtgacgtcctcatctacctggtggcattagcagcccgctgccgtgtggatctgccgctagcagtgctctccaaaatggacatcaaccggcgacgctacccagcccatctggcccgcagctcttcccgcaagtatacagaattgccccatggggccatctctgaagaccaggctgtggggcctgcggacattccctgtgactccacaggccagacctcaacctagaaagatggccacaggacttgcaactcagggtggtgtctgaagagcagagagtggcctggccctggagcctttttctagtcttttcagaatagatcatgggcctgaggcctccacttcttgaggtctgaggcccagcagcctctagaaggtagcctcctggtgtttgttctcccagtaaaatggttttgggcgataacttctagattattcctggatggccagggaggctctctgtctcagcaggtgatgacggg

SEQ ID NO: 125030 - DNA, 749 bp, Homo sapiens
  Payload ID: 4546
  Gene Symbol: DCTPP1
  Gene Name: dCTP pyrophosphatase 1
  ENST ID: ENST00000565758
  CDS Start-End: 401-550
gcggtgggcggcatgtctgtggccggtggggagattcgtggggacacggggggagaggacactgctgctcccggccggttcagcttcagcccggagcccacgctcgaggacatgtaagcaggcctggcccagctcgggccgccgcctccatgctgagtttgctgcggaacgagactgggaacagttccatcagcctcggaatctcctcctggccttggttggggaagtgggggagctggcagaactctttcagtggaaaaccgatggggaacctggcccccaaggctggtcccccagggaacgggcagcccttcaagaggagcttagtgacgtcctcatctacctggtggcattagcagcccgctgccgtgtggatctgccgctagcagtgctctccaaaatggacatcaaccggcgacgctacccagcccatctggcccgcagctcttcccgcaagtatacagaattgccccatggggccatctctgaagaccaggctgtggggcctgcggacattccctgtgactccacaggccagacctcaacctagaaagatggccacaggacttgcaactcagggtggtgtctgaagagcagagagtggcctggccctggagcctttttctagtcttttcagaatagatcatgggcctgaggcctccacttcttgaggtctgaggcccagcagcctctagaaggtagcctcctggtgtttgttctcccagtaaaatggttttgggcgataactt

SEQ ID NO: 125031 - DNA, 7393 bp, Homo sapiens
  Payload ID: 4547
  Gene Symbol: DCAF10
  Gene Name: DDB1 and CUL4 associated factor 10
  ENST ID: ENST00000242323
  CDS Start-End: 75-1235
actcatccccaggcacgcggccaccggtcactgacaactacagaccgactctgccacccagatcaggtgcccagatgctcagtcgctcacacaggtcagtgctgacagttgcttgtgaacaaactgaagttctgctttttgaccctatatcttcaaagcacataaaaacactttctgaagctcatgaagactgtgtaaataatatcagatttcttgataaccggctgtttgctacctgctctgatgacactacaatagcactatgggatctgagaaaattgaacaccaaagtatgcactttacatggtcacactagctgggtgaagaacatcgaatatgatactaatacaagactcttagtaacatcaggatttgatggaaatgtcattatttgggacactaacaggtatacagaagatgggtgtccacataagaaattctttcacacacgttttctcatgcgaatgaggttaacaccagattgttccaaaatgttgatttcaacgtcctctggatatctcttaattttgcatgaccttgacttaactaagtctttagaagtaggcagctatcccattttaagagcaagaagaactacttcaagttcagatttgaccacttcatcaagttcatctggtcctagagtttctggctcaccttgtcatcatagtgattctaattcttctgagaaacacatgtcacgagcctctcaaagagaaggagtttcaccacgaaatagtcttgaagtcgtaacccctgaagttcttggtgagagtgaccacggaaactgcatcacgtccttacagctgcacccaaaaggctgggccactcttcttcggtgctcaagcaacagtgatgatgaggagtgtacttgtgtctatgaattccaagaaggagctccagtgcgacctgtctcacctcgctgttctctacgactgactcattacattgaagaagccaatgtaggcaggggttacatcaaagaactttgcttcagccccgatggacgaatgatttcttccccacatggctatgggattcgcttgttgggatttgacaaacagtgcagtgaacttgttgactgcttgcccaaagaagccagtcccctgcgggtgatccgttctctgtactctcataatgatgtggtactgacaacaaagttctctccaacacattgtcagattgcctcagggtgccttagtggacgggtttctttgtatcagccaaagttttaggcacaacttacatcaaataaggaactcttctggtgtttgacttaggaattgcttcaatttagatgaagtattttctttttagaagatcttataagtttgggtcaagatcctggttcttatgggtccatgaacacacttgtgaccttagtacttggtcatccagcatcatacaggcatctccaagttagactctatgcagcatcatcttttgcagcattcctctgctcctgctgatctgtgccactgaactccagttcttctggtcattttgcatggtagctcttgtcacgttccttccttcctcactctctatttctctttccctctccctgtccctctctttctttgtgtttgttgattttggtgtcaattttgtggacatttggcaggagttttgactggggtaggagaaacccatgacattagaattgaataaaacctagaagttggatattggcatattggttgttgaaaaataaatttcatcctcacttatgagtatacttggccttttaaagttactgttatgtttatctatattgagcacagataatggcattattcttataattgttaagatagtcttgcaacaaaatgtcttttaagtttcctgttaaaattataaaaagattttcatggtgagagggattttattgtgaaattctagaaaaaaatattaccacctctctttgtaatttactttacttgtatgaatttaacatctctagcatgtatccttacttgatattttgttcctatcaacagcattagaaaggaaaggagacagaatgagctttggttatttctattgcacagaaaaggatttttaaaattagattagtataatatctggccatagagtgataagaacaatatgacttagattttctgtatttcatctgccagattatttgaatcacacaggatgatgtgttaacagtattagggtggaagaggaatcaagagtaaagaggtaggggtttactcatttttcttccctgagccaggtgtgacaagccaactctgtcaccattcgtgaggggagagttgcagtcctcttcaagctgttatcataagtacagtagtcagctacttggatatcaagactaagtgctgatatgaagacttgcctttgtgttttgttatgaaacacgcaagcataaagcaggactcaagcacaaggctgactgttctactttgaataacagcttccttgcagtctcctccacatgggtggtactgtgtttagaagggattaccaaaggctggagcgatttaagctatgcactagccttgccctcttaggttgcattctctttaggccactggttctcaaacattagggtgcactgtaaccattacagagcttgtgaaaagtgcagaaacctgagcctcaccttatgagattctgattcagccagggggaggacaggaatctgtatttttcatagcaacctcaagtaatctttattctgagggtctcgggattgcaggttgaaaaacacaaccttaatcagcagtaaattcttctctactcggccaggcgcagtggctcatgcctgtaatcccagcactttgggaggccgaggtgggtggatcacaaggtcaggagttcgagaccagcctgaccaacatggtgaaacgccatctctactaaaaatacaaaaattagccgggcgtggtggtgctcacctgtaatcccagctacccaggaggctgaggcaagagaatcacttgaacccgggaggcagagggtgcagtaagccgagattgcaccactgcactccagcctaggcgacagagcgagactctgtctcaaaaaaaaaaaaaaaaaaaaaaaattcttctctacccatttgggcttaagacaattcccagaaagtgttttcattatttaaaaaataataatagtaaatgaaagcaattttagaggtggaaaataccttagaatggaatcatttgcattatttgacaaatgagagaagtgacatgacttgcctaaggtcatcctgcaaagttagtggcagagttaggacttgaattccagtcttctaattccttggtcagggcaatttctactgtgttatgctgtctgttagaaataatgacttatggacactttgtctttaagttgtattattgtaaatacccttaaactggccaatagattttagaaaggcaggcatgggagtagatgctgagaattctagccataagaagaaaagtattttaaatcttacagaaatgtttaaacaacccaaaatacatgaataaaaatgacatttctttgtaggacctgccaactaactattcacacacatttatagaggttataaggatcttggctctagaacaaatttttgaaattagatcattttaccatggatgttaacaaaattggaaattttttgtcactgagaaaattatcacaaagcacagtaaatacatatacttaccatacattttgtaaaaaacacattttttaaagaaaatagggatgggtatggtggctcacgtctgtaatcccagcactttgggaggccaaggtgggaggttcacttgagcccaggagttccagaccagtctgggcaacatggcgaaaccccatctctaccaaaaatacaaaaattagatgggcatgttggtacacgcctgtagtcctagctactcaggaggctgaggtgggaggatggtttgagcctgggaggcagaggctgcagtgagccaagattgcactattgcactccaccctgggcaatagagccagatcctgtctcaaaaaataaaaatagactgggcatggtggctcatgcctgtaatcccagcactttgggaggctgaggtgggtggatcacttgaggtcaggagtttgagaacagcctagccaacatggtgaaaccctgtctctaccaaaaatacaaaaatcatagccaagcgtggtggcaggtgcctgtaatcccagctactcaggaggctgaggcaggagactcgcatgaacctgggaggcagaggttgcagtgagccgagatcgcaccactgtactctagcctgaccagcagagcgagactctgcctcaaaaaaaaaaaaaaaaataaaataaaataaaattagttttggaggtgaaaacacccaaactgttattatttaaaaatacctaccaagtactgtggtcatattgacattcaaaagaagtttcataaatcgtatcaactctggaaagagttcatgtcagatgctagaccagcaagttacccaactcaaaattcagccaatgattctttactatagagtacctatcatgtgtcaaataatatacagacttcactactaaccctcacaaaaacttgcagggtaggtggaatgagccccaatttaatttggaggtaatagtgggtcagaaagattaaatgacttgccttaagtcatagagttagcagtgagtggcagcactgggattcaaacccaggtttgtgtcttgtccaaagcctgtgcttactgctttaccattgtgctctttagtttgtaaagtatggtaagctggcctgttatttgtttagtatcttctggattttttttttttaattatagagctagcttaccgtgtgtatcatgtaaaaaaaattcataagattaacaatttccatgagaatatcataaactcagggcacacattctggccattcctgactaaaaaacttcaagcagaataagcagctataaaatagaaaagaaaaattaaggataaacggcattgtgaaaaaaaaccgagccacacagatgagaattaaaaattaacagccagcaaactcaaaagaacctttgtcctccttgagatatggtgatgatcaaaaagttagcaaggaatattaatcaaggaattaaagggcattaggaatgctatagtattggaagaaattacatcttaacatttcaaagccccatttcacttaagagtaaaatctaatctgatgttttttactctgaattttattcagtaatttttattcataattcatgataattggtaatgtagtataattgttagtaaatgcagtacaaattgttctactgttttaaaaagttttccgcagaacagtgcatttatggcaatgctatgtttaatgagttagggacatcaaatatatagtagttccttattttcagttgtgaaaatgaaatggctaaagcagaagagacgtctattttagtcttttaaaaatgtgtgtgggtggtcttttttcctcagaagcccaaagcacatgtatattttgttatttctccttgctatattcctgagactatactaaaaactttaagaaaaggaacaagaaaaaggtaaattcatgtgttccccactgctgtgtctagaaccaagatcacattatatcattgttaaaattgtgttatctagaaagtgcaatatagggaaaacactctaagaatcttttaaaagcctagtgtttcccttatttgtcagaatatgtggtagtggcatccataagtatcttttaacttgcatttagcaggacaaatagtgtgatacttatactgatgacaatcatccccatttaatgaccagcagtcactgagcgctgtgaaaattcactcagtgataccccgtgttggtcttgaaggaaaccgtacatatgaatttttggatagctaatgtatatctctcaagtgccaacatttaaaacttgtaattatttttgatgtgagtatttcaggtatgttagtataccttcctgccttcttcttaaacatcatgctcagtataattcacattttcatgatgaaaagttaaagttatattcataatgtattattataagtatccagctctgatgtatgtaaaacacttcataaaatgtaaagggctataacaaatatgttataaagtgattctctcagccctgaggtatacagaatcatttgcctcagactgctgttggattttaaaatttttaaaatatctgctaagtaatttgctatgtcttctcccacactatcaatatgcctgcttctaacaggctccccactttcttctaatgtgctgttatgagctttggacatgagataaccgtgcctgttcagagtgtctacagtaagagctggacaaactctggggggacacagtctttgagacagctcttttggttgctttccacttttctgaaaggttcacagtaaccttctagataatagaaactcccagttaaagcctaggctagcaattttttttagttgcaactaagtaagatatactacaaactaaggatgctgctagactaaggaataaacagcaaggtaccaaagtacagcaaagcaacaacaaaggctctgtatttgcagaggggtctatcatgcttttaagaaaaaagaagagtacaggaaaaaaattcagatagacataagagtattttggatgccattaaactttgtcaataaccattaaaacataggcttaaattatcacgtattgttacaaagacacagttttgtctcattataaaataagattatatgaaatttatattctagaaatgattccaaatcatgtcctaagaatttctcccattcaaatgataatggaaattactgtcaaaaggaaaatctcaaagttaccattacgctgctctcttgtaaatgaactagggataaagatatgggttttatcaaaagccctaaggaatatatctcacattcacctcctatatgtatgtgtatatataaatgccactataaatgaaaatgtcacccagagataataaaataatttttaaagtttaaatctggtccaaagtctttaaaataggtagattttcagctttcttaagtttctccctcatttagatttcatggtttttacataaagggtgaatatttgaattttcttttaaatttcactgcatcttcaattgcccaactgtgtttcctgataaattttagattcacatttttaggaaatttggagtattccagacaatatactagatacccagaaacttttctcagtaggttctgaggtgttttaagttcttatgctagactgtaagctccttgagggcagagactgttttatttattcttgtatcctcagtgcctggtacaggacttgacacagagtagttgttcaataaatatttgttgaatgaatc

SEQ ID NO: 125032 - DNA, 3862 bp, Homo sapiens
  Payload ID: 4547
  Gene Symbol: DCAF10
  Gene Name: DDB1 and CUL4 associated factor 10
  Uniprot ID: Q5QP82
  ENST ID: ENST00000377724
  CDS Start-End: 366-2045
aaagtggagacaccagtacatactcagcctcacaggactgactggtcaggccactcatccccaggcacgcggccaccggtcactgacaactacagaccgactctgccacccagatcaggtgcccagatgctcagtcgctcacacaggtaactactcgctccctacctccgttcccgggactgcggcgccccaaacccggcggtgtctcagctttcccggtccccggcggacggtggccgaggggcggcgcgggtttccagccggtggggttaggccgctgcacgccggaagtggcagctgaacaggggcactgaggtgtcggccggcggggcagtggcccggagcggggggcgggggcgttgatcatgtttccctttgggccccatagccctggaggggacggatcggccggagccggggctgaggagccgacgccccacgaggggcaggcagcagccaccgggccgccctcgccactacatcccggggctgatgcgacccatccccctccacccgcccgaagccctcgccgccccggcgccccatcgctgtccccggccccgcgctccggagagctagggctgcctggagctccggagtcctcaactgcctccgccccgggagagccgtcacctccctcccctccgtgccggcggcccgggccagactgcagggccaagagccggggccgacacggcctcggcgcgggcctgggcggccctggcgctaggctgttcgggtggctgaaagagcgcagcctgggccgcgggctgttcgtggacccggcgcgggacaattttcgcaccatgactagcctctacggttccatccaccccgcggactcggtgtacctcagcacccgcacccacggcgccgtcttcaacctcgagtactcgcccgacgggtcagtgctgacagttgcttgtgaacaaactgaagttctgctttttgaccctatatcttcaaagcacataaaaacactttctgaagctcatgaagactgtgtaaataatatcagatttcttgataaccggctgtttgctacctgctctgatgacactacaatagcactatgggatctgagaaaattgaacaccaaagtatgcactttacatggtcacactagctgggtgaagaacatcgaatatgatactaatacaagactcttagtaacatcaggatttgatggaaatgtcattatttgggacactaacaggtatacagaagatgggtgtccacataagaaattctttcacacacgttttctcatgcgaatgaggttaacaccagattgttccaaaatgttgatttcaacgtcctctggatatctcttaattttgcatgaccttgacttaactaagtctttagaagtaggcagctatcccattttaagagcaagaagaactacttcaagttcagatttgaccacttcatcaagttcatctggtcctagagtttctggctcaccttgtcatcatagtgattctaattcttctgagaaacacatgtcacgagcctctcaaagagaaggagtttcaccacgaaatagtcttgaagtcgtaacccctgaagttcttggtgagagtgaccacggaaactgcatcacgtccttacagctgcacccaaaaggctgggccactcttcttcggtgctcaagcaacagtgatgatgaggagtgtacttgtgtctatgaattccaagaaggagctccagtgcgacctgtctcacctcgctgttctctacgactgactcattacattgaagaagccaatgtaggcaggggttacatcaaagaactttgcttcagccccgatggacgaatgatttcttccccacatggctatgggattcgcttgttgggatttgacaaacagtgcagtgaacttgttgactgcttgcccaaagaagccagtcccctgcgggtgatccgttctctgtactctcataatgatgtggtactgacaacaaagttctctccaacacattgtcagattgcctcagggtgccttagtggacgggtttctttgtatcagccaaagttttaggcacaacttacatcaaataaggaactcttctggtgtttgacttaggaattgcttcaatttagatgaagtattttctttttagaagatcttataagtttgggtcaagatcctggttcttatgggtccatgaacacacttgtgaccttagtacttggtcatccagcatcatacaggcatctccaagttagactctatgcagcatcatcttttgcagcattcctctgctcctgctgatctgtgccactgaactccagttcttctggtcattttgcatggtagctcttgtcacgttccttccttcctcactctctatttctctttccctctccctgtccctctctttctttgtgtttgttgattttggtgtcaattttgtggacatttggcaggagttttgactggggtaggagaaacccatgacattagaattgaataaaacctagaagttggatattggcatattggttgttgaaaaataaatttcatcctcacttatgagtatacttggccttttaaagttactgttatgtttatctatattgagcacagataatggcattattcttataattgttaagatagtcttgcaacaaaatgtcttttaagtttcctgttaaaattataaaaagattttcatggtgagagggattttattgtgaaattctagaaaaaaatattaccacctctctttgtaatttactttacttgtatgaatttaacatctctagcatgtatccttacttgatattttgttcctatcaacagcattagaaaggaaaggagacagaatgagctttggttatttctattgcacagaaaaggatttttaaaattagattagtataatatctggccatagagtgataagaacaatatgacttagattttctgtatttcatctgccagattatttgaatcacacaggatgatgtgttaacagtattagggtggaagaggaatcaagagtaaagaggtaggggtttactcatttttcttccctgagccaggtgtgacaagccaactctgtcaccattcgtgaggggagagttgcagtcctcttcaagctgttatcataagtacagtagtcagctacttggatatcaagactaagtgctgatatgaagacttgcctttgtgttttgttatgaaacacgcaagcataaagcaggactcaagcacaaggctgactgttctactttgaataacagcttccttgcagtctcctccacatgggtggtactgtgtttagaagggattaccaaaggctggagcgatttaagctatgcactagccttgccctcttaggttgcattctctttaggccactggttctcaaacattagggtgcactgtaaccattacagagcttgtgaaaagtgcagaaacctgagcctcaccttatgagattctgattcagccagggggaggacaggaatctgtatttttcatagcaacctcaagtaatctttattctgagggtctcgggattgcaggttgaaaaacacaaccttaatcagcagtaaattcttctctactcggccaggcgcagtggctcatgcctgtaatcccagcactttgggaggccgaggtgggtggatcacaaggtcaggagttcgagaccagcctgaccaacatggtgaaacgccatctctactaaaaatacaaaaattagccgggcgtggtggtgctcacctgtaatcccagctacccaggaggctgaggcaagagaatcacttgaacccgggaggcagagggtgcagtaagccgagattgcaccactgcactccagcctaggcgacagagcgagactctgtctc

SEQ ID NO: 125033 - DNA, 2570 bp, Homo sapiens
  Payload ID: 4548
  Gene Symbol: DCAF11
  Gene Name: DDB1 and CUL4 associated factor 11
  ENST ID: ENST00000326009
  CDS Start-End: 233-448
agtccggggacttcgataggattggagaaggtttgtgttcccgacgccttggtagttggcataggctaaagaaaagggatctcagccccgaggaagggtcaccctcctagagatagctactaccccgtctcaggagaccctggtatttctagagcacgctttgctttcaccaaacccaaggaggtgacaggaggagcccccgcacaggacctaagaatgctgtgaccagaagatgggatcgcggaacagcagcagtgcaggatccgggtccggagacccctccgagggcttgccccgaagaggggctggcctgcgtcggagtgaggaagaggaagaagaggatgaagatgtggatctggcccagaggccaagtgaggttggtgcagggaggaggtgcagcaaatttacaattcattcaggccctcttggactcagaggaagagaatgacagagcttgggatggtcgtcttggggatcgatacaacccacctgtggatgctacccctgacacccgggagctggaattcaatgagatcaagacacaagtggaactggccacagggcagctggggcttaggcgggccgcccagaagcacagctttcctcgaatgttgcaccagagagaacggggcctctgccatcggggaagcttctcccttggagaacagtctcgagtgatatctcacttcttgcccaatgatctgggcttcactgatagctactctcagaaggctttctgtggcatctacagcaaagatggtcaaatattcatgtctgcttgccaagaccagacaatccgactctatgactgccgatatggccgtttccgtaaattcaagagcatcaaggcccgcgacgtaggctggagcgtcttggatgtggccttcacccctgatgggaaccacttcctctactctagctggtctgattacattcatatctgcaatatctatggtgagggagatacacacactgccctggatctcaggccagatgagcgtcgctttgctgtcttctccattgctgtctcctcagatggacgagaagtactaggaggggccaatgatggctgcctgtatgtctttgaccgagaacagaaccggcgcacccttcagattgagtcccatgaggatgatgtgaatgcagtggcctttgctgatataagctcccaaatcctgttctctgggggagatgatgccatctgcaaagtgtgggatcgacgcaccatgcgggaggatgaccccaagcctgtgggtgcactggctggacaccaggatggcatcaccttcattgacagcaagggtgatgcccggtatctgatctccaactctaaagaccagaccatcaaactctgggatatccgacgcttttccagccgggaaggcatggaagcttcacgccaggctgccacacagcaaaactgggactatcggtggcagcaagtgcccaaaaaagcctggcggaagctgaagctcccaggggacagctccttgatgacctaccggggccacggagtgctgcacaccctcatccgctgccggttctcccccattcatagcactggccagcagttcatctacagtggctgctccactggcaaagtggttgtgtacgaccttctaagtggccacattgtgaagaagctgaccaaccacaaggcctgtgtgcgtgacgtcagttggcacccctttgaagagaagattgtcagcagttcgtgggacgggaacctgcgtctgtggcagtaccgccaggctgagtacttccaggatgacatgccagaatctgaggaatgtgccagcgcccctgccccagtgccccaatcctctacacccttttcctcaccccagtagatccaacctccagccccatatagggtgaacctcttgataagctctctgcctcctcctccctttctcccttgtggggaatgtttggaggaatcactggcatttgatggggaataacataagcctgggctctgagcctcagctgagccctggaagattctccccatggggcagagtggtctccttacgtgctcacacccagtcagcttgggtccctatctctggccagagtttggcaggactgccattatctggggtgtggcctctgccagcaagagaagtgtcctgggtgtttttaatcatgtttgaatgttaggggttggatcctagagtagatgcctgaggccacatctgaacagacctgtcagccaggcctgccaggtcttcacgttgaggattcaactggccaatcacaggacaggtgtcctggcctttcttcctgaggtctctaggggaggggcatgggtaagggtgtttcctcagcaccctcctggggtggggattatgtctgctgtcatgtctgggtctttagggtaggacaggctgtggtatgagaggcaggagtctccacaaggcttcatgtggccccttatagggcaggccctgccctctgggaaggtcccttcatgctggaggcacacagctttaaggaagtaggttgaagtaggactccttcgtcctctcactggctttggctccctcaataaactgtgtgggaacctg

SEQ ID NO: 125034 - DNA, 2469 bp, Homo sapiens
  Payload ID: 4548
  Gene Symbol: DCAF11
  Gene Name: DDB1 and CUL4 associated factor 11
  Uniprot ID: Q8TEB1
  ENST ID: ENST00000396936
  CDS Start-End: 457-1797
cttcacaggattggagaaggtttgtgttcccgacgccttggtagttggcataggctaaagaaaagggatctcagccccgaggaagggtcaccctcctagagatagctactaccccgtctcaggagaccctggtatttctagagcacgctttgctttcaccaaacccaaggaggtgacaggaggagcccccgcacaggacctaagaatgctgtgaccagaagatgggatcgcggaacagcagcagtgcaggatccgggtccggagacccctccgagggcttgccccgaagaggggctggcctgcgtcggagtgaggaagaggaagaagaggatgaagatgtggatctggcccaggtactggcctatctcctccgcagaggccaagtgaggttggtgcagggaggaggtgcagcaaatttacaattcattcaggccctcttggactcagaggaagagaatgacagagcttgggatggtcgtcttggggatcgatacaacccacctgtggatgctacccctgacacccgggagctggaattcaatgagatcaagacacaagtggaactggccacagggcagctggggcttaggcgggccgcccagaagcacagctttcctcgaatgttgcaccagcttcttgcccaatgatctgggcttcactgatagctactctcagaaggctttctgtggcatctacagcaaagatggtcaaatattcatgtctgcttgccaagaccagacaatccgactctatgactgccgatatggccgtttccgtaaattcaagagcatcaaggcccgcgacgtaggctggagcgtcttggatgtggccttcacccctgatgggaaccacttcctctactctagctggtctgattacattcatatctgcaatatctatggtgagggagatacacacactgccctggatctcaggccagatgagcgtcgctttgctgtcttctccattgctgtctcctcagatggacgagaagtactaggaggggccaatgatggctgcctgtatgtctttgaccgagaacagaaccggcgcacccttcagattgagtcccatgaggatgatgtgaatgcagtggcctttgctgatataagctcccaaatcctgttctctgggggagatgatgccatctgcaaagtgtgggatcgacgcaccatgcgggaggatgaccccaagcctgtgggtgcactggctggacaccaggatggcatcaccttcattgacagcaagggtgatgcccggtatctgatctccaactctaaagaccagaccatcaaactctgggatatccgacgcttttccagccgggaaggcatggaagcttcacgccaggctgccacacagcaaaactgggactatcggtggcagcaagtgcccaaaaaagcctggcggaagctgaagctcccaggggacagctccttgatgacctaccggggccacggagtgctgcacaccctcatccgctgccggttctcccccattcatagcactggccagcagttcatctacagtggctgctccactggcaaagtggttgtgtacgaccttctaagtggccacattgtgaagaagctgaccaaccacaaggcctgtgtgcgtgacgtcagttggcacccctttgaagagaagattgtcagcagttcgtgggacgggaacctgcgtctgtggcagtaccgccaggctgagtacttccaggatgacatgccagaatctgaggaatgtgccagcgcccctgccccagtgccccaatcctctacacccttttcctcaccccagtagatccaacctccagccccatatagggtgaacctcttgataagctctctgcctcctcctccctttctcccttgtggggaatgtttggaggaatcactggcatttgatggggaataacataagcctgggctctgagcctcagctgagccctggaagattctccccatggggcagagtggtctccttacgtgctcacacccagtcagcttgggtccctatctctggccagagtttggcaggactgccattatctggggtgtggcctctgccagcaagagaagtgtcctgggtgtttttaatcatgtttgaatgttaggggttggatcctagagtagatgcctgaggccacatctgaacagacctgtcagccaggcctgccaggtcttcacgttgaggattcaactggccaatcacaggacaggtgtcctggcctttcttcctgaggtctctaggggaggggcatgggtaagggtgtttcctcagcaccctcctggggtggggattatgtctgctgtcatgtctgggtctttagggtaggacaggctgtggtatgagaggcaggagtctccacaaggcttcatgtggccccttatagggcaggccctgccctctgggaaggtcccttcatgctggaggcacacagctttaaggaagtaggttgaagtaggactcctt

SEQ ID NO: 125035 - DNA, 2402 bp, Homo sapiens
  Payload ID: 4548
  Gene Symbol: DCAF11
  Gene Name: DDB1 and CUL4 associated factor 11
  Uniprot ID: Q8TEB1
  ENST ID: ENST00000396941
  CDS Start-End: 120-1682
agttggtgagctagggtagcgcactacggttcactcttgctttctttgcttcacaggattggagaaggaggtgacaggaggagcccccgcacaggacctaagaatgctgtgaccagaagatgggatcgcggaacagcagcagtgcaggatccgggtccggagacccctccgagggcttgccccgaagaggggctggcctgcgtcggagtgaggaagaggaagaagaggatgaagatgtggatctggcccaggccctcttggactcagaggaagagaatgacagagcttgggatggtcgtcttggggatcgatacaacccacctgtggatgctacccctgacacccgggagctggaattcaatgagatcaagacacaagtggaactggccacagggcagctggggcttaggcgggccgcccagaagcacagctttcctcgaatgttgcaccagagagaacggggcctctgccatcggggaagcttctcccttggagaacagtctcgagtgatatctcacttcttgcccaatgatctgggcttcactgatagctactctcagaaggctttctgtggcatctacagcaaagatggtcaaatattcatgtctgcttgccaagaccagacaatccgactctatgactgccgatatggccgtttccgtaaattcaagagcatcaaggcccgcgacgtaggctggagcgtcttggatgtggccttcacccctgatgggaaccacttcctctactctagctggtctgattacattcatatctgcaatatctatggtgagggagatacacacactgccctggatctcaggccagatgagcgtcgctttgctgtcttctccattgctgtctcctcagatggacgagaagtactaggaggggccaatgatggctgcctgtatgtctttgaccgagaacagaaccggcgcacccttcagattgagtcccatgaggatgatgtgaatgcagtggcctttgctgatataagctcccaaatcctgttctctgggggagatgatgccatctgcaaagtgtgggatcgacgcaccatgcgggaggatgaccccaagcctgtgggtgcactggctggacaccaggatggcatcaccttcattgacagcaagggtgatgcccggtatctgatctccaactctaaagaccagaccatcaaactctgggatatccgacgcttttccagccgggaaggcatggaagcttcacgccaggctgccacacagcaaaactgggactatcggtggcagcaagtgcccaaaaaagcctggcggaagctgaagctcccaggggacagctccttgatgacctaccggggccacggagtgctgcacaccctcatccgctgccggttctcccccattcatagcactggccagcagttcatctacagtggctgctccactggcaaagtggttgtgtacgaccttctaagtggccacattgtgaagaagctgaccaaccacaaggcctgtgtgcgtgacgtcagttggcacccctttgaagagaagattgtcagcagttcgtgggacgggaacctgcgtctgtggcagtaccgccaggctgagtacttccaggatgacatgccagaatctgaggaatgtgccagcgcccctgccccagtgccccaatcctctacacccttttcctcaccccagtagatccaacctccagccccatatagggtgaacctcttgataagctctctgcctcctcctccctttctcccttgtggggaatgtttggaggaatcactggcatttgatggggaataacataagcctgggctctgagcctcagctgagccctggaagattctccccatggggcagagtggtctccttacgtgctcacacccagtcagcttgggtccctatctctggccagagtttggcaggactgccattatctggggtgtggcctctgccagcaagagaagtgtcctgggtgtttttaatcatgtttgaatgttaggggttggatcctagagtagatgcctgaggccacatctgaacagacctgtcagccaggcctgccaggtcttcacgttgaggattcaactggccaatcacaggacaggtgtcctggcctttcttcctgaggtctctaggggaggggcatgggtaagggtgtttcctcagcaccctcctggggtggggattatgtctgctgtcatgtctgggtctttagggtaggacaggctgtggtatgagaggcaggagtctccacaaggcttcatgtggccccttatagggcaggccctgccctctgggaaggtcccttcatgctggaggcacacagctttaaggaagtaggttgaagtaggactccttcgtcctctcactggctttggctccctcaataaactgtgtgggaacctg

SEQ ID NO: 125036 - DNA, 4299 bp, Homo sapiens
  Payload ID: 4548
  Gene Symbol: DCAF11
  Gene Name: DDB1 and CUL4 associated factor 11
  Uniprot ID: Q8TEB1
  ENST ID: ENST00000446197
  CDS Start-End: 728-2368
tgacgtttgcagcccgccggccaggaagccgcgagatgcgtgacgagcgaagcgcgtgacggaggagcggttggccaacgcagtggcggcagtcggtgtaaacaaggcctcgcgccgctgcgggtcctgcgaccgctcctggctggtgggtggtctcgcgtggggcggttaccgccggcttcagtgggaggtgcttctcggcttcctccccctcatggcgtacacacccccggcgcaccacgtgggcgtgaggcgaggaaggaggggtgttaggccaaattctattttcattggctgtcactgctgccggcctttgtaagggggcgctctgattggtcgataaggtgggggcgtcgagggtctttgagtcctaaggcttctaattggttagatgagataagctagtgaagcgctttcttccgagagggatttcgattggtcggtcagagaggttacctggaaatccaacaccgcccaacacccctcccgctccccagtccggggacttcgataggattggagaaggtttgtgttcccgacgccttggtagttggcataggctaaagaaaagggatctcagccccgaggaagggtcaccctcctagagatagctactaccccgtctcaggagaccctggtatttctagagcacgctttgctttcaccaaacccaaggaggtgacaggaggagcccccgcacaggacctaagaatgctgtgaccagaagatgggatcgcggaacagcagcagtgcaggatccgggtccggagacccctccgagggcttgccccgaagaggggctggcctgcgtcggagtgaggaagaggaagaagaggatgaagatgtggatctggcccaggtactggcctatctcctccgcagaggccaagtgaggttggtgcagggaggaggtgcagcaaatttacaattcattcaggccctcttggactcagaggaagagaatgacagagcttgggatggtcgtcttggggatcgatacaacccacctgtggatgctacccctgacacccgggagctggaattcaatgagatcaagacacaagtggaactggccacagggcagctggggcttaggcgggccgcccagaagcacagctttcctcgaatgttgcaccagagagaacggggcctctgccatcggggaagcttctcccttggagaacagtctcgagtgatatctcacttcttgcccaatgatctgggcttcactgatagctactctcagaaggctttctgtggcatctacagcaaagatggtcaaatattcatgtctgcttgccaagaccagacaatccgactctatgactgccgatatggccgtttccgtaaattcaagagcatcaaggcccgcgacgtaggctggagcgtcttggatgtggccttcacccctgatgggaaccacttcctctactctagctggtctgattacattcatatctgcaatatctatggtgagggagatacacacactgccctggatctcaggccagatgagcgtcgctttgctgtcttctccattgctgtctcctcagatggacgagaagtactaggaggggccaatgatggctgcctgtatgtctttgaccgagaacagaaccggcgcacccttcagattgagtcccatgaggatgatgtgaatgcagtggcctttgctgatataagctcccaaatcctgttctctgggggagatgatgccatctgcaaagtgtgggatcgacgcaccatgcgggaggatgaccccaagcctgtgggtgcactggctggacaccaggatggcatcaccttcattgacagcaagggtgatgcccggtatctgatctccaactctaaagaccagaccatcaaactctgggatatccgacgcttttccagccgggaaggcatggaagcttcacgccaggctgccacacagcaaaactgggactatcggtggcagcaagtgcccaaaaaagcctggcggaagctgaagctcccaggggacagctccttgatgacctaccggggccacggagtgctgcacaccctcatccgctgccggttctcccccattcatagcactggccagcagttcatctacagtggctgctccactggcaaagtggttgtgtacgaccttctaagtggccacattgtgaagaagctgaccaaccacaaggcctgtgtgcgtgacgtcagttggcacccctttgaagagaagattgtcagcagttcgtgggacgggaacctgcgtctgtggcagtaccgccaggctgagtacttccaggatgacatgccagaatctgaggaatgtgccagcgcccctgccccagtgccccaatcctctacacccttttcctcaccccagtagatccaacctccagccccatatagggtgaacctcttgataagctctctgcctcctcctccctttctcccttgtggggaatgtttggaggaatcactggcatttgatggggaataacataagcctgggctctgagcctcagctgagccctggaagattctccccatggggcagagtggtctccttacgtgctcacacccagtcagcttgggtccctatctctggccagagtttggcaggactgccattatctggggtgtggcctctgccagcaagagaagtgtcctgggtgtttttaatcatgtttgaatgttaggggttggatcctagagtagatgcctgaggccacatctgaacagacctgtcagccaggcctgccaggtcttcacgttgaggattcaactggccaatcacaggacaggtgtcctggcctttcttcctgaggtctctaggggaggggcatgggtaagggtgtttcctcagcaccctcctggggtggggattatgtctgctgtcatgtctgggtctttagggtaggacaggctgtggtatgagaggcaggagtctccacaaggcttcatgtggccccttatagggcaggccctgccctctgggaaggtcccttcatgctggaggcacacagctttaaggaagtaggttgaagtaggactccttcgtcctctcactggctttggctccctcaataaactgtgtgggaacctggctcagtgtctgtctctctctctcactctctgtttttcctatctgaggtctttcatctcctcacttcaggaaaacacagttcagcaaagtcttcagatgcgatcctgtgtaggagaaaatacccttctggtgccccatgaaaaagggaaataccaaaaccatttgttcactgagccttgcaataggtgctcccttaccaatttcagaagcttccctgcaagtagatatcgagagagcacactttccattagagcctggtaatacccatatcacctctgctctgaggctgggcctgcagctgtgtagtctttggaagaggtagcccctgaacgcagagcctaagagaagcaagtcggccctgacgccaggccccagtgggcgcctcacactcagaacctcataccccagagcaaaccgatggtcagggagagggctagagctcacacccagctcggaatagatcttccctgatgacatttcatgccctctaaggcagtttttaaatgaaggtacacacatccaggggtgttcacaggctttcacagcaagggtacctatttcatggcaaaataggcagttttaaaagaataaacaagctaggtgtggtggctcatgcctgtaatcctagcactttgggaagccaaagctgatggatcgcttgagcccaggagtttgagaccagcctgggcaacatggcaaaaccccatctctacaaaaaatacaaaaagtaggccgggcacggtggttcacacctgtaatcccggcattttgggaggccgagataggtggatcacctgaagtcaggtgtttgagaccagcctggccaacatggtggaacccaatctctactaaaaatacaaaaaaactagccggatatggtggcgggtgcctgtaatctcagctacttgagaggctgaggcaggagaatcgcttgaacttgggagcagaggtgagctgagtgcagtgagccaagaccatgccattacactcaagcttgggcaacgagagcaaaactctgtctcaaaaaaaaaattagccagatgtggtgacgcatgcctgtagtcctagctactcaggaggctgaggtgggaggatcacctaaggccaggaggtcaaggctgcggtgagccgtgattgtgccaatgtactccagcctaggtgacagagtgagaccctgtctcaaaaataaataataaataaataaatgttca

SEQ ID NO: 125037 - DNA, 2711 bp, Homo sapiens
  Payload ID: 4548
  Gene Symbol: DCAF11
  Gene Name: DDB1 and CUL4 associated factor 11
  Uniprot ID: Q8TEB1
  ENST ID: ENST00000559115
  CDS Start-End: 351-1991
agttcccacttactcctccccagcaagagctaacagccctccttgggtgtgcactttctcctcccctcaggcacctcgcgcattctcccgcctacctatcaatcatcgtgctccgctgtccagttggctggccaagggggcggggccgtcgtgtgacgtttgcagcccgccggccaggaagccgcgagatgcgtgacgagcgaagcgcgtgacggaggagcggttggccaacgcagtggcggcagtcggtgtaaacaaggcctcgcgccgctgcgggtcctgcgaccgctcctggctggaggtgacaggaggagcccccgcacaggacctaagaatgctgtgaccagaagatgggatcgcggaacagcagcagtgcaggatccgggtccggagacccctccgagggcttgccccgaagaggggctggcctgcgtcggagtgaggaagaggaagaagaggatgaagatgtggatctggcccaggtactggcctatctcctccgcagaggccaagtgaggttggtgcagggaggaggtgcagcaaatttacaattcattcaggccctcttggactcagaggaagagaatgacagagcttgggatggtcgtcttggggatcgatacaacccacctgtggatgctacccctgacacccgggagctggaattcaatgagatcaagacacaagtggaactggccacagggcagctggggcttaggcgggccgcccagaagcacagctttcctcgaatgttgcaccagagagaacggggcctctgccatcggggaagcttctcccttggagaacagtctcgagtgatatctcacttcttgcccaatgatctgggcttcactgatagctactctcagaaggctttctgtggcatctacagcaaagatggtcaaatattcatgtctgcttgccaagaccagacaatccgactctatgactgccgatatggccgtttccgtaaattcaagagcatcaaggcccgcgacgtaggctggagcgtcttggatgtggccttcacccctgatgggaaccacttcctctactctagctggtctgattacattcatatctgcaatatctatggtgagggagatacacacactgccctggatctcaggccagatgagcgtcgctttgctgtcttctccattgctgtctcctcagatggacgagaagtactaggaggggccaatgatggctgcctgtatgtctttgaccgagaacagaaccggcgcacccttcagattgagtcccatgaggatgatgtgaatgcagtggcctttgctgatataagctcccaaatcctgttctctgggggagatgatgccatctgcaaagtgtgggatcgacgcaccatgcgggaggatgaccccaagcctgtgggtgcactggctggacaccaggatggcatcaccttcattgacagcaagggtgatgcccggtatctgatctccaactctaaagaccagaccatcaaactctgggatatccgacgcttttccagccgggaaggcatggaagcttcacgccaggctgccacacagcaaaactgggactatcggtggcagcaagtgcccaaaaaagcctggcggaagctgaagctcccaggggacagctccttgatgacctaccggggccacggagtgctgcacaccctcatccgctgccggttctcccccattcatagcactggccagcagttcatctacagtggctgctccactggcaaagtggttgtgtacgaccttctaagtggccacattgtgaagaagctgaccaaccacaaggcctgtgtgcgtgacgtcagttggcacccctttgaagagaagattgtcagcagttcgtgggacgggaacctgcgtctgtggcagtaccgccaggctgagtacttccaggatgacatgccagaatctgaggaatgtgccagcgcccctgccccagtgccccaatcctctacacccttttcctcaccccagtagatccaacctccagccccatatagggtgaacctcttgataagctctctgcctcctcctccctttctcccttgtggggaatgtttggaggaatcactggcatttgatggggaataacataagcctgggctctgagcctcagctgagccctggaagattctccccatggggcagagtggtctccttacgtgctcacacccagtcagcttgggtccctatctctggccagagtttggcaggactgccattatctggggtgtggcctctgccagcaagagaagtgtcctgggtgtttttaatcatgtttgaatgttaggggttggatcctagagtagatgcctgaggccacatctgaacagacctgtcagccaggcctgccaggtcttcacgttgaggattcaactggccaatcacaggacaggtgtcctggcctttcttcctgaggtctctaggggaggggcatgggtaagggtgtttcctcagcaccctcctggggtggggattatgtctgctgtcatgtctgggtctttagggtaggacaggctgtggtatgagaggcaggagtctccacaaggcttcatgtggccccttatagggcaggccctgccctctgggaaggtcccttcatgctggaggcacacagctttaaggaagtaggttgaagtaggactccttcgtcctctcactggctttggctccctcaataaactgtgtgggaacctg

SEQ ID NO: 125038 - DNA, 575 bp, Homo sapiens
  Payload ID: 4548
  Gene Symbol: DCAF11
  Gene Name: DDB1 and CUL4 associated factor 11
  ENST ID: ENST00000559593
  CDS Start-End: 148-575
agttggtgagctagggtagcgcactacggttcactcttgctttctttgcttcacaggattggagaagagcacgctttgctttcaccaaacccaaggaggtgacaggaggagcccccgcacaggacctaagaatgctgtgaccagaagatgggatcgcggaacagcagcagtgcaggatccgggtccggagacccctccgagggcttgccccgaagaggggctggcctgcgtcggagtgaggaagaggaagaagaggatgaagatgtggatctggcccaggtactggcctatctcctccgcagaggccaagtgaggttggtgcagggaggaggtgcagcaaatttacaattcattcaggccctcttggactcagaggaagagaatgacagagcttgggatggtcgtcttggggatcgatacaacccacctgtggatgctacccctgacacccgggagctggaattcaatgagatcaagacacaagtggaactggccacagggcagctggggcttaggcgggccgcccagaagcacagctttcctcgaatgttgcaccagagagaacggggcctctg

SEQ ID NO: 125039 - DNA, 2342 bp, Homo sapiens
  Payload ID: 4548
  Gene Symbol: DCAF11
  Gene Name: DDB1 and CUL4 associated factor 11
  ENST ID: ENST00000558914
  CDS Start-End: 270-683
agttggtgagctagggtagcgcactacggttcactcttgctttctttgcttcacaggattggagaaggtttgtgttcccgacgccttggtagttggcataggctaaagaaaagggatctcagccccgaggaagggtcaccctcctagagatagctactaccccgtctcaggagaccctggtatttctagagcacgctttgctttcaccaaacccaaggaggtgacaggaggagcccccgcacaggacctaagaatgctgtgaccagaagatgggatcgcggaacagcagcagtgcaggatccgggtccggagacccctccgagggcttgccccgaagaggggctggcctgcgtcggagtgaggaagaggaagaagaggatgaagatgtggatctggcccaggtactggcctatctcctccgcaggccctcttggactcagaggaagagaatgacagagcttgggatggtcgtcttggggatcgatacaacccacctgtggatgctacccctgacacccgggagctggaattcaatgagatcaagacacaagtggaactggccacagggcagctggggcttaggcgggccgcccagaagcacagctttcctcgaatgttgcaccagagagaacggggcctctgccatcggggaagcttctcccttggagaacagtctcgagtgatatctcacttcttgcccaatgatctgggcttcactgatagctactctcagaaggctttctgtggcatctacagcaaagatggtcaaatattcatgtctgcttgccaagaccagacaatccgactctatgactgccgatatggccgtttccgtaaattcaagagcatcaaggcccgcgacgtaggctggagcgtcttggatgtggccttcacccctgatgggaaccacttcctctactctagctggtctgattacattcatatctgcaatatctatggtgagggagatacacacactgccctggatctcaggccagatgagcgtcgctttgctgtcttctccattgctgtctcctcagatggacgagaagtactaggaggggccaatgatggctgcctgtatgtctttgaccgagaacagaaccggcgcacccttcagattgagtcccatgaggatgatgtgaatgcagtggcctttgctgatataagctcccaaatcctgttctctgggggagatgatgccatctgcaaagtgtgggatcgacgcaccatgcgggaggatgaccccaagcctgtgggtgcactggctggacaccaggatggcatcaccttcattgacagcaagggtgatgcccggtatctgatctccaactctaaagaccagaccatcaaactctgggatatccgacgcttttccagccgggaaggcatggaagcttcacgccaggctgccacacagcaaaactgggactatcggtggcagcaagtgcccaaaaaagcctggcggaagctgaagctcccaggggacagctccttgatgacctaccggggccacggagtgctgcacaccctcatccgctgccggttctcccccattcatagcactggccagcagttcatctacagtggctgctccactggcaaagtggttgtgtacgaccttctaagtggccacattgtgaagaagctgaccaaccacaaggcctgtgtgcgtgacgtcagttggcacccctttgaagagaagattgtcagcagttcgtgggacgggaacctgcgtctgtggcagtaccgccaggctgagtacttccaggatgacatgccagaatctgaggaatgtgccagcgcccctgccccagtgccccaatcctctacacccttttcctcaccccagtagatccaacctccagccccatatagggtgaacctcttgataagctctctgcctcctcctccctttctcccttgtggggaatgtttggaggaatcactggcatttgatggggaataacataagcctgggctctgagcctcagctgagccctggaagattctccccatggggcagagtggtctccttacgtgctcacacccagtcagcttgggtccctatctctggccagagtttggcaggactgccattatctggggtgtggcctctgccagcaagagaagtgtcctgggtgtttttaatcatgtttgaatgttaggggttggatcctagagtagatgcctgaggccacatctgaacagacctgtcagccaggcctgccaggtcttcacgttgaggattcaactggccaatcacaggacaggtgtcctggcctttcttcctgaggtctctaggggaggggcatgggtaagggtgtttcctcagcaccctc

SEQ ID NO: 125040 - DNA, 947 bp, Homo sapiens
  Payload ID: 4548
  Gene Symbol: DCAF11
  Gene Name: DDB1 and CUL4 associated factor 11
  ENST ID: ENST00000557810
  CDS Start-End: 581-947
gtgtgacgtttgcagcccgccggccaggaagccgcgagatgcgtgacgagcgaagcgcgtgacggaggagcggttggccaacgcagtggcggcagtcggtgtaaacaaggcctcgcgccgctgcgggtcctgcgaccgctcctggctggtgggtggtctcgcgtggggcggttaccgccggcttcagtgggaggtgcttctcggcttcctccccctcatggcgtacacacccccggcgcaccacgtgggcgtgaggcgaggaaggaggggtgttaggccaaattctattttcattggctgtcactgctgccggcctttgtaagggggcgctctgattggtcgataaggtgggggcgtcgagggtctttgagtcctaaggcttctaattggttagatgagataagctagtgaagcgctttcttccgagagggatttcgattggtcggtcagagaggttacctggaaatccaacaccgcccaacacccctcccgctccccagtccggggacttcgataggattggagaaggaggtgacaggaggagcccccgcacaggacctaagaatgctgtgaccagaagatgggatcgcggaacagcagcagtgcaggatccgggtccggagacccctccgagggcttgccccgaagaggggctggcctgcgtcggagtgaggaagaggaagaagaggatgaagatgtggatctggcccaggtactggcctatctcctccgcagaggccaagtgaggttggtgcagggaggaggtgcagcaaatttacaattcattcaggccctcttggactcagaggaagagaatgacagagcttgggatggtcgtcttggggatcgatacaacccacctgtggatgctacccctgacacccgggagctggaattcaatgagatcaagacacaagtggaactggccacagggcagctggggctta

SEQ ID NO: 125041 - DNA, 1011 bp, Homo sapiens
  Payload ID: 4548
  Gene Symbol: DCAF11
  Gene Name: DDB1 and CUL4 associated factor 11
  ENST ID: ENST00000559144
  CDS Start-End: 1-798
ccagatgagcgtcgctttgctgtcttctccattgctgtctcctcagatggacgagaagtactaggaggggccaatgatggctgcctgtatgtctttgaccgagaacagaaccggcgcacccttcagattgagtcccatgaggatgatgtgaatgcagtggcctttgctgatataagctcccaaatcctgttctctgggggagatgatgccatctgcaaagtgtgggatcgacgcaccatgcgggaggatgaccccaagcctgtgggtgcactggctggacaccaggatggcatcaccttcattgacagcaagggtgatgcccggtatctgatctccaactctaaagaccagaccatcaaactctgggatatccgacgcttttccagccgggaaggcatggaagcttcacgccaggctgccacacagcaaaactgggactatcggtggcagcaagtgcccaaaaaagcctggcggaagctgaagctcccaggggacagctccttgatgacctaccggggccacggagtgctgcacaccctcatccgctgccggttctcccccattcatagcactggccagcagttcatctacagtggctgctccactggcaaagtggttgtgtacgaccttctaagtggccacattgtgaagaagctgaccaaccacaaggcctgtgtgcgtgacgtcagttggcacccctttgaagagaagattgtcagcagttcggtgaggttgcaagggttgagggtgctggcacatgtctggggcttggacttgggtgggggcagcacatcctgactgcttgccaccctctgccctgcagtgggacgggaacctgcgtctgtggcagtaccgccaggctgagtacttccaggatgacatgccagaatctgaggaatgtgccagcgcccctgccccagtgccccaatcctctacacccttttcctcaccccagtagatccaacctccagccccatatagggtgaacctcttgataagctctctgcctcc

SEQ ID NO: 125042 - DNA, 603 bp, Homo sapiens
  Payload ID: 4548
  Gene Symbol: DCAF11
  Gene Name: DDB1 and CUL4 associated factor 11
  ENST ID: ENST00000560901
  CDS Start-End: 168-603
gcgagatgcgtgacgagcgaagcgcgtgacggaggagcggttggccaacgcagtggcggcagtcggtgtaaacaaggcctcgcgccgctgcgggtcctgcgaccgctcctggctggaggtgacaggaggagcccccgcacaggacctaagaatgctgtgaccagaagatgggatcgcggaacagcagcagtgcaggatccgggtccggagacccctccgagggcttgccccgaagaggggctggcctgcgtcggagtgaggaagaggaagaagaggatgaagatgtggatctggcccaggtactggcctatctcctccgcaggccctcttggactcagaggaagagaatgacagagcttgggatggtcgtcttggggatcgatacaacccacctgtggatgctacccctgacacccgggagctggaattcaatgagatcaagacacaagtggaactggccacagggcagctggggcttaggcgggccgcccagaagcacagctttcctcgaatgttgcaccagcttcttgcccaatgatctgggcttcactgatagctactctcagaaggctttctgtggcatctacagcaaagatggtcaaa

SEQ ID NO: 125043 - DNA, 659 bp, Homo sapiens
  Payload ID: 4548
  Gene Symbol: DCAF11
  Gene Name: DDB1 and CUL4 associated factor 11
  ENST ID: ENST00000559451
  CDS Start-End: 268-438
ttggtgagctagggtagcgcactacggttcactcttgctttctttgcttcacaggattggagaaggtttgtgttcccgacgccttggtagttggcataggctaaagaaaagggatctcagccccgaggaagggtcaccctcctagagatagctactaccccgtctcaggagaccctggtatttctagagcacgctttgctttcaccaaacccaaggaggtgacaggaggagcccccgcacaggacctaagaatgctgtgaccagaagatgggatcgcggaacagcagcagtgcaggatccgggtccggagacccctccgagggcttgccccgaagaggggctggcctgcgtcggagtgaggaagaggaagaagaggatgaagatgtggatctggcccaggtactggcctatctcctccgcagtggatgctacccctgacacccgggagctggaattcaatgagatcaagacacaagtggaactggccacagggcagctggggcttaggcgggccgcccagaagcacagctttcctcgaatgttgcaccagagagaacggggcctctgccatcggggaagcttctcccttggagaacagtctcgagtgatatctcacttcttgcccaatgatctgggcttcactgatagctactctcaga

SEQ ID NO: 125044 - DNA, 543 bp, Homo sapiens
  Payload ID: 4548
  Gene Symbol: DCAF11
  Gene Name: DDB1 and CUL4 associated factor 11
  ENST ID: ENST00000560713
  CDS Start-End: 196-543
gcgagatgcgtgacgagcgaagcgcgtgacggaggagcggttggccaacgcagtggcggcagtcggtgtaaacaaggcctcgcgccgctgcgggtcctgcgaccgctcctggctgagcacgctttgctttcaccaaacccaaggaggtgacaggaggagcccccgcacaggacctaagaatgctgtgaccagaagatgggatcgcggaacagcagcagtgcaggatccgggtccggagacccctccgagggcttgccccgaagaggggctggcctgcgtcggagtgaggaagaggaagaagaggatgaagatgtggatctggcccaggccctcttggactcagaggaagagaatgacagagcttgggatggtcgtcttggggatcgatacaacccacctgtggatgctacccctgacacccgggagctggaattcaatgagatcaagacacaagtggaactggccacagggcagctggggcttaggcgggccgcccagaagcacagctttcctcgaatgttgcaccagagagaacggggcctc

SEQ ID NO: 125045 - DNA, 300 bp, Homo sapiens
  Payload ID: 4548
  Gene Symbol: DCAF11
  Gene Name: DDB1 and CUL4 associated factor 11
  ENST ID: ENST00000559396
  CDS Start-End: 210-300
ataagctagtgaagcgctttcttccgagagggatttcgattggtcggtcagagaggttacctggaaatccaacaccgcccaacacccctcccgctccccagtccggggacttcgataggattggagaagagcacgctttgctttcaccaaacccaaggaggtgacaggaggagcccccgcacaggacctaagaatgctgtgaccagaagatgggatcgcggaacagcagcagtgcaggatccgggtccggagacccctccgagggcttgccccgaagaggggctggcctgcgtcggagtg

SEQ ID NO: 125046 - DNA, 476 bp, Homo sapiens
  Payload ID: 4548
  Gene Symbol: DCAF11
  Gene Name: DDB1 and CUL4 associated factor 11
  ENST ID: ENST00000559796
  CDS Start-End: 275-476
aggaagccgcgagatgcgtgacgagcgaagcgcgtgacggaggagcggttggccaacgcagtggcggcagtcggtgtaaacaaggcctcgcgccgctgcgggtcctgcgaccgctcctggctgggatttcgattggtcggtcagagaggttacctggaaatccaacaccgcccaacacccctcccgctccccagtccggggacttcgataggattggagaaggaggtgacaggaggagcccccgcacaggacctaagaatgctgtgaccagaagatgggatcgcggaacagcagcagtgcaggatccgggtccggagacccctccgagggcttgccccgaagaggggctggcctgcgtcggagtgaggaagaggaagaagaggatgaagatgtggatctggcccagaggccaagtgaggttggtgcagggaggaggtgcagcaaatttacaattcattcaggccctcttggactca

SEQ ID NO: 125047 - DNA, 4202 bp, Homo sapiens
  Payload ID: 4548
  Gene Symbol: DCAF11
  Gene Name: DDB1 and CUL4 associated factor 11
  ENST ID: ENST00000557802
  CDS Start-End: 717-932
gcccgccggccaggaagccgcgagatgcgtgacgagcgaagcgcgtgacggaggagcggttggccaacgcagtggcggcagtcggtgtaaacaaggcctcgcgccgctgcgggtcctgcgaccgctcctggctggtgggtggtctcgcgtggggcggttaccgccggcttcagtgggaggtgcttctcggcttcctccccctcatggcgtacacacccccggcgcaccacgtgggcgtgaggcgaggaaggaggggtgttaggccaaattctattttcattggctgtcactgctgccggcctttgtaagggggcgctctgattggtcgataaggtgggggcgtcgagggtctttgagtcctaaggcttctaattggttagatgagataagctagtgaagcgctttcttccgagagggatttcgattggtcggtcagagaggttacctggaaatccaacaccgcccaacacccctcccgctccccagtccggggacttcgataggattggagaaggtttgtgttcccgacgccttggtagttggcataggctaaagaaaagggatctcagccccgaggaagggtcaccctcctagagatagctactaccccgtctcaggagaccctggtatttctagagcacgctttgctttcaccaaacccaaggaggtgacaggaggagcccccgcacaggacctaagaatgctgtgaccagaagatgggatcgcggaacagcagcagtgcaggatccgggtccggagacccctccgagggcttgccccgaagaggggctggcctgcgtcggagtgaggaagaggaagaagaggatgaagatgtggatctggcccagaggccaagtgaggttggtgcagggaggaggtgcagcaaatttacaattcattcaggccctcttggactcagaggaagagaatgacagagcttgggatggtcgtcttggggatcgatacaacccacctgtggatgctacccctgacacccgggagctggaattcaatgagatcaagacacaagtggaactggccacagggcagctggggcttaggcgggccgcccagaagcacagctttcctcgaatgttgcaccagcttcttgcccaatgatctgggcttcactgatagctactctcagaaggctttctgtggcatctacagcaaagatggtcaaatattcatgtctgcttgccaagaccagacaatccgactctatgactgccgatatggccgtttccgtaaattcaagagcatcaaggcccgcgacgtaggctggagcgtcttggatgtggccttcacccctgatgggaaccacttcctctactctagctggtctgattacattcatatctgcaatatctatggtgagggagatacacacactgccctggatctcaggccagatgagcgtcgctttgctgtcttctccattgctgtctcctcagatggacgagaagtactaggaggggccaatgatggctgcctgtatgtctttgaccgagaacagaaccggcgcacccttcagattgagtcccatgaggatgatgtgaatgcagtggcctttgctgatataagctcccaaatcctgttctctgggggagatgatgccatctgcaaagtgtgggatcgacgcaccatgcgggaggatgaccccaagcctgtgggtgcactggctggacaccaggatggcatcaccttcattgacagcaagggtgatgcccggtatctgatctccaactctaaagaccagaccatcaaactctgggatatccgacgcttttccagccgggaaggcatggaagcttcacgccaggctgccacacagcaaaactgggactatcggtggcagcaagtgcccaaaaaagcctggcggaagctgaagctcccaggggacagctccttgatgacctaccggggccacggagtgctgcacaccctcatccgctgccggttctcccccattcatagcactggccagcagttcatctacagtggctgctccactggcaaagtggttgtgtacgaccttctaagtggccacattgtgaagaagctgaccaaccacaaggcctgtgtgcgtgacgtcagttggcacccctttgaagagaagattgtcagcagttcgtgggacgggaacctgcgtctgtggcagtaccgccaggctgagtacttccaggatgacatgccagaatctgaggaatgtgccagcgcccctgccccagtgccccaatcctctacacccttttcctcaccccagtagatccaacctccagccccatatagggtgaacctcttgataagctctctgcctcctcctccctttctcccttgtggggaatgtttggaggaatcactggcatttgatggggaataacataagcctgggctctgagcctcagctgagccctggaagattctccccatggggcagagtggtctccttacgtgctcacacccagtcagcttgggtccctatctctggccagagtttggcaggactgccattatctggggtgtggcctctgccagcaagagaagtgtcctgggtgtttttaatcatgtttgaatgttaggggttggatcctagagtagatgcctgaggccacatctgaacagacctgtcagccaggcctgccaggtcttcacgttgaggattcaactggccaatcacaggacaggtgtcctggcctttcttcctgaggtctctaggggaggggcatgggtaagggtgtttcctcagcaccctcctggggtggggattatgtctgctgtcatgtctgggtctttagggtaggacaggctgtggtatgagaggcaggagtctccacaaggcttcatgtggccccttatagggcaggccctgccctctgggaaggtcccttcatgctggaggcacacagctttaaggaagtaggttgaagtaggactccttcgtcctctcactggctttggctccctcaataaactgtgtgggaacctggctcagtgtctgtctctctctctcactctctgtttttcctatctgaggtctttcatctcctcacttcaggaaaacacagttcagcaaagtcttcagatgcgatcctgtgtaggagaaaatacccttctggtgccccatgaaaaagggaaataccaaaaccatttgttcactgagccttgcaataggtgctcccttaccaatttcagaagcttccctgcaagtagatatcgagagagcacactttccattagagcctggtaatacccatatcacctctgctctgaggctgggcctgcagctgtgtagtctttggaagaggtagcccctgaacgcagagcctaagagaagcaagtcggccctgacgccaggccccagtgggcgcctcacactcagaacctcataccccagagcaaaccgatggtcagggagagggctagagctcacacccagctcggaatagatcttccctgatgacatttcatgccctctaaggcagtttttaaatgaaggtacacacatccaggggtgttcacaggctttcacagcaagggtacctatttcatggcaaaataggcagttttaaaagaataaacaagctaggtgtggtggctcatgcctgtaatcctagcactttgggaagccaaagctgatggatcgcttgagcccaggagtttgagaccagcctgggcaacatggcaaaaccccatctctacaaaaaatacaaaaagtaggccgggcacggtggttcacacctgtaatcccggcattttgggaggccgagataggtggatcacctgaagtcaggtgtttgagaccagcctggccaacatggtggaacccaatctctactaaaaatacaaaaaaactagccggatatggtggcgggtgcctgtaatctcagctacttgagaggctgaggcaggagaatcgcttgaacttgggagcagaggtgagctgagtgcagtgagccaagaccatgccattacactcaagcttgggcaacgagagcaaaactctgtctcaaaaaaaaaattagccagatgtggtgacgcatgcctgtagtcctagctactcaggaggctgaggtgggaggatcacctaaggccaggaggtcaaggctgcggtgagccgtgattgtgccaatgtactccagcctaggtgacagagtgagaccctgtctcaaaaataaataataaataaataaatgttcaga

SEQ ID NO: 125048 - DNA, 849 bp, Homo sapiens
  Payload ID: 4548
  Gene Symbol: DCAF11
  Gene Name: DDB1 and CUL4 associated factor 11
  ENST ID: ENST00000559017
  CDS Start-End: 526-849
gaaagacgcgtgtattagggaacgtctgcaaagaccgcggcggaaagccagggattgtcttaaaaaattgtcagaccggataaagggaggtctaaaaggggaccgtcccaagagcaaggcttccaaaagctaagcccggaaggacggcacctcgcgcattctcccgcctacctatcaatcatcgtgctccgctgtccagttggctggccaagggggcggggccgtcgtgtgacgtttgcagcccgccggccaggaagccgcgagatgcgtgacgagcgaagcgcgtgacggaggagcggttggccaacgcagtggcggcagtcggtgtaaacaaggcctcgcgccgctgcgggtcctgcgaccgctcctggctgggatttcgattggtcggtcagagaggttacctggaaatccaacaccgcccaacacccctcccgctccccagtccggggacttcgataggattggagaaggaggtgacaggaggagcccccgcacaggacctaagaatgctgtgaccagaagatgggatcgcggaacagcagcagtgcaggatccgggtccggagacccctccgagggcttgccccgaagaggggctggcctgcgtcggagtgaggaagaggaagaagaggatgaagatgtggatctggcccaggtactggcctatctcctccgcagaggccaagtgaggttggtgcagggaggaggtgcagcaaatttacaattcattcaggccctcttggactcagaggaagagaatgacagagcttgggatggtcgtcttggggatcgatacaacccacctgtggatgctacccctgacacccgggagctggaattcaatgag

SEQ ID NO: 125049 - DNA, 581 bp, Homo sapiens
  Payload ID: 4548
  Gene Symbol: DCAF11
  Gene Name: DDB1 and CUL4 associated factor 11
  ENST ID: ENST00000558638
  CDS Start-End: 133-581
agagaggttacctggaaatccaacaccgcccaacacccctcccgctccccagtccggggacttcgataggattggagaaggaggtgacaggaggagcccccgcacaggacctaagaatgctgtgaccagaagatgggatcgcggaacagcagcagtgcaggatccgggtccggagacccctccgagggcttgccccgaagaggggctggcctgcgtcggagtgaggaagaggaagaagaggatgaagatgtggatctggcccaggccctcttggactcagaggaagagaatgacagagcttgggatggtcgtcttggggatcgatacaacccacctgtggatgctacccctgacacccgggagctggaattcaatgagatcaagacacaagtggaactggccacagggcagctggggcttaggcgggccgcccagaagcacagctttcctcgaatgttgcaccagagagaacggggcctctgccatcggggaagcttctcccttggagaacagtctcgagtgatatctcacttcttgcccaatgatctgggcttcactgatagctactctcagaaggcttt

SEQ ID NO: 125050 - DNA, 552 bp, Homo sapiens
  Payload ID: 4548
  Gene Symbol: DCAF11
  Gene Name: DDB1 and CUL4 associated factor 11
  ENST ID: ENST00000557888
  CDS Start-End: 131-346
aatctttcttcagttggtgagctagggtagcgcactacggttcactcttgctttctttgcttcacaggattggagaaggaggtgacaggaggagcccccgcacaggacctaagaatgctgtgaccagaagatgggatcgcggaacagcagcagtgcaggatccgggtccggagacccctccgagggcttgccccgaagaggggctggcctgcgtcggagtgaggaagaggaagaagaggatgaagatgtggatctggcccagaggccaagtgaggttggtgcagggaggaggtgcagcaaatttacaattcattcaggccctcttggactcagaggaagagaatgacagagcttgggatggtcgtcttggggatcgatacaacccacctgtggatgctacccctgacacccgggagctggaattcaatgagatcaagacacaagtggaactggccacagggcagctggggcttaggcgggccgcccagaagcacagctttcctcgaatgttgcaccagagagaacggggcctctgccatcggggaagcttct

SEQ ID NO: 125051 - DNA, 549 bp, Homo sapiens
  Payload ID: 4548
  Gene Symbol: DCAF11
  Gene Name: DDB1 and CUL4 associated factor 11
  ENST ID: ENST00000559382
  CDS Start-End: 194-549
gagatgcgtgacgagcgaagcgcgtgacggaggagcggttggccaacgcagtggcggcagtcggtgtaaacaaggcctcgcgccgctgcgggtcctgcgaccgctcctggctgagcacgctttgctttcaccaaacccaaggaggtgacaggaggagcccccgcacaggacctaagaatgctgtgaccagaagatgggatcgcggaacagcagcagtgcaggatccgggtccggagacccctccgagggcttgccccgaagaggggctggcctgcgtcggagtgaggaagaggaagaagaggatgaagatgtggatctggcccaggtactggcctatctcctccgcaggccctcttggactcagaggaagagaatgacagagcttgggatggtcgtcttggggatcgatacaacccacctgtggatgctacccctgacacccgggagctggaattcaatgagatcaagacacaagtggaactggccacagggcagctggggcttaggcgggccgcccagaagcacagctttcctcgaatgttgcaccag

SEQ ID NO: 125052 - DNA, 547 bp, Homo sapiens
  Payload ID: 4548
  Gene Symbol: DCAF11
  Gene Name: DDB1 and CUL4 associated factor 11
  ENST ID: ENST00000560614
  CDS Start-End: 138-308
tttcgattggtcggtcagagaggttacctggaaatccaacaccgcccaacacccctcccgctccccagtccggggacttcgataggaggtgacaggaggagcccccgcacaggacctaagaatgctgtgaccagaagatgggatcgcggaacagcagcagtgcaggatccgggtccggagacccctccgagggcttgccccgaagaggggctggcctgcgtcggagtgaggaagaggaagaagaggatgaagatgtggatctggcccaggtactggcctatctcctccgcagtggatgctacccctgacacccgggagctggaattcaatgagatcaagacacaagtggaactggccacagggcagctggggcttaggcgggccgcccagaagcacagctttcctcgaatgttgcaccagagagaacggggcctctgccatcggggaagcttctcccttggagaacagtctcgagtgatatctcacttcttgcccaatgatctgggcttcactgatagctactctcagaaggctttctgtggcatct

SEQ ID NO: 125053 - DNA, 545 bp, Homo sapiens
  Payload ID: 4548
  Gene Symbol: DCAF11
  Gene Name: DDB1 and CUL4 associated factor 11
  ENST ID: ENST00000561001
  CDS Start-End: 162-545
agtggcggcagtcggtgtaaacaaggcctcgcgccgctgcgggtcctgcgaccgctcctggctggtgggtggtctcgcgtggggcggttaccgccggcttcagtgggaggaggtgacaggaggagcccccgcacaggacctaagaatgctgtgaccagaagatgggatcgcggaacagcagcagtgcaggatccgggtccggagacccctccgagggcttgccccgaagaggggctggcctgcgtcggagtgaggaagaggaagaagaggatgaagatgtggatctggcccaggccctcttggactcagaggaagagaatgacagagcttgggatggtcgtcttggggatcgatacaacccacctgtggatgctacccctgacacccgggagctggaattcaatgagatcaagacacaagtggaactggccacagggcagctggggcttaggcgggccgcccagaagcacagctttcctcgaatgttgcaccagagagaacggggcctctgccatcggggaagcttctcccttggagaacagtct

SEQ ID NO: 125054 - DNA, 641 bp, Homo sapiens
  Payload ID: 4548
  Gene Symbol: DCAF11
  Gene Name: DDB1 and CUL4 associated factor 11
  ENST ID: ENST00000558706
  CDS Start-End: 320-490
agcgctttcttccgagagggatttcgattggtcggtcagagaggttacctggaaatccaacaccgcccaacacccctcccgctccccagtccggggacttcgataggattggagaaggtttgtgttcccgacgccttggtagttggcataggctaaagaaaagggatctcagccccgaggaagggtcaccctcctagagatagctactaccccgtctcaggagaccctggtatttctagagcacgctttgctttcaccaaacccaaggaggtgacaggaggagcccccgcacaggacctaagaatgctgtgaccagaagatgggatcgcggaacagcagcagtgcaggatccgggtccggagacccctccgagggcttgccccgaagaggggctggcctgcgtcggagtgaggaagaggaagaagaggatgaagatgtggatctggcccaggtactggcctatctcctccgcagtggatgctacccctgacacccgggagctggaattcaatgagatcaagacacaagtggaactggccacagggcagctggggcttaggcgggccgcccagaagcacagctttcctcgaatgttgcaccagagagaacggggcctctgccatcggggaagcttctccctt

SEQ ID NO: 125055 - DNA, 592 bp, Homo sapiens
  Payload ID: 4548
  Gene Symbol: DCAF11
  Gene Name: DDB1 and CUL4 associated factor 11
  ENST ID: ENST00000558408
  CDS Start-End: 313-592
gacttcgataggtgagtttggtgtagaaaacaaatctttcttcagttggtgagctagggtagcgcactacggttcactcttgctttctttgcttcacaggattggagaaggtttgtgttcccgacgccttggtagttggcataggctaaagaaaagggatctcagccccgaggaagggtcaccctcctagagatagctactaccccgtctcaggagaccctggtatttctagagcacgctttgctttcaccaaacccaaggaggtgacaggaggagcccccgcacaggacctaagaatgctgtgaccagaagatgggatcgcggaacagcagcagtgcaggatccgggtccggagacccctccgagggcttgccccgaagaggggctggcctgcgtcggagtgaggaagaggaagaagaggatgaagatgtggatctggcccaggtactggcctatctcctccgcagaggccaagtgaggttggtgcagggaggaggtgcagcaaatttacaattcattcaggccctcttggactcagaggaagagaatgacagagcttgggatggtcgtcttggggatcgatacaacccac

SEQ ID NO: 125056 - DNA, 578 bp, Homo sapiens
  Payload ID: 4548
  Gene Symbol: DCAF11
  Gene Name: DDB1 and CUL4 associated factor 11
  ENST ID: ENST00000560457
  CDS Start-End: 172-387
gaagcgctttcttccgagagggatttcgattggtcggtcagagaggttacctggaaatccaacaccgcccaacacccctcccgctccccagtccggggacttcgataggattggagaaggaggtgacaggaggagcccccgcacaggacctaagaatgctgtgaccagaagatgggatcgcggaacagcagcagtgcaggatccgggtccggagacccctccgagggcttgccccgaagaggggctggcctgcgtcggagtgaggaagaggaagaagaggatgaagatgtggatctggcccagaggccaagtgaggttggtgcagggaggaggtgcagcaaatttacaattcattcaggccctcttggactcagaggaagagaatgacagagcttgggatggtcgtcttggggatcgatacaacccacctgtggatgctacccctgacacccgggagctggaattcaatgagatcaagacacaagtggaactggccacagggcagctggggcttaggcgggccgcccagaagcacagctttcctcgaatgttgcaccagagagaacggggcctctgcc

SEQ ID NO: 125057 - DNA, 587 bp, Homo sapiens
  Payload ID: 4548
  Gene Symbol: DCAF11
  Gene Name: DDB1 and CUL4 associated factor 11
  ENST ID: ENST00000560459
  CDS Start-End: 270-587
agttggtgagctagggtagcgcactacggttcactcttgctttctttgcttcacaggattggagaaggtttgtgttcccgacgccttggtagttggcataggctaaagaaaagggatctcagccccgaggaagggtcaccctcctagagatagctactaccccgtctcaggagaccctggtatttctagagcacgctttgctttcaccaaacccaaggaggtgacaggaggagcccccgcacaggacctaagaatgctgtgaccagaagatgggatcgcggaacagcagcagtgcaggatccgggtccggagacccctccgagggcttgccccgaagaggggctggcctgcgtcggagtgaggaagaggaagaagaggatgaagatgtggatctggcccaggtactggcctatctcctccgcaggccctcttggactcagaggaagagaatgacagagcttgggatggtcgtcttggggatcgatacaacccacctgtggatgctacccctgacacccgggagctggaattcaatgagatcaagacacaagtggaactggccacagggcagctggggcttaggcggg

SEQ ID NO: 125058 - DNA, 547 bp, Homo sapiens
  Payload ID: 4548
  Gene Symbol: DCAF11
  Gene Name: DDB1 and CUL4 associated factor 11
  ENST ID: ENST00000559354
  CDS Start-End: 278-547
ctttcttcagttggtgagctagggtagcgcactacggttcactcttgctttctttgcttcacaggattggagaaggtttgtgttcccgacgccttggtagttggcataggctaaagaaaagggatctcagccccgaggaagggtcaccctcctagagatagctactaccccgtctcaggagaccctggtatttctagagcacgctttgctttcaccaaacccaaggaggtgacaggaggagcccccgcacaggacctaagaatgctgtgaccagaagatgggatcgcggaacagcagcagtgcaggatccgggtccggagacccctccgagggcttgccccgaagaggggctggcctgcgtcggagtgaggaagaggaagaagaggatgaagatgtggatctggcccaggccctcttggactcagaggaagagaatgacagagcttgggatggtcgtcttggggatcgatacaacccacctgtggatgctacccctgacacccgggagctggaattcaatgagatcaagacacaagtggaactggcc

SEQ ID NO: 125059 - DNA, 748 bp, Homo sapiens
  Payload ID: 4548
  Gene Symbol: DCAF11
  Gene Name: DDB1 and CUL4 associated factor 11
  ENST ID: ENST00000561375
  CDS Start-End: 201-748
gtgtgacgtttgcagcccgccggccaggaagccgcgagatgcgtgacgagcgaagcgcgtgacggaggagcggttggccaacgcagtggcggcagtcggtgtaaacaaggcctcgcgccgctgcgggtcctgcgaccgctcctggctggaggtgacaggaggagcccccgcacaggacctaagaatgctgtgaccagaagatgggatcgcggaacagcagcagtgcaggatccgggtccggagacccctccgagggcttgccccgaagaggggctggcctgcgtcggagtgaggaagaggaagaagaggatgaagatgtggatctggcccaggccctcttggactcagaggaagagaatgacagagcttgggatggtcgtcttggggatcgatacaacccacctgtggatgctacccctgacacccgggagctggaattcaatgagatcaagacacaagtggaactggccacagggcagctggggcttaggcgggccgcccagaagcacagctttcctcgaatgttgcaccagagagaacggggcctctgccatcggggaagcttctcccttggagaacagtctcgagtgatatctcacttcttgcccaatgatctgggcttcactgatagctactctcagaaggctttctgtggcatctacagcaaagatggtcaaatattcatgtctgcttgccaagaccagacaatccgactctatgactgccgatatggccgtttccgtaaatt

SEQ ID NO: 125060 - DNA, 581 bp, Homo sapiens
  Payload ID: 4548
  Gene Symbol: DCAF11
  Gene Name: DDB1 and CUL4 associated factor 11
  ENST ID: ENST00000558215
  CDS Start-End: 362-581
gtgtgacgtttgcagcccgccggccaggaagccgcgagatgcgtgacgagcgaagcgcgtgacggaggagcggttggccaacgcagtggcggcagtcggtgtaaacaaggcctcgcgccgctgcgggtcctgcgaccgctcctggctggattggagaaggtttgtgttcccgacgccttggtagttggcataggctaaagaaaagggatctcagccccgaggaagggtcaccctcctagagatagctactaccccgtctcaggagaccctggtatttctagagcacgctttgctttcaccaaacccaaggaggtgacaggaggagcccccgcacaggacctaagaatgctgtgaccagaagatgggatcgcggaacagcagcagtgcaggatccgggtccggagacccctccgagggcttgccccgaagaggggctggcctgcgtcggagtgaggaagaggaagaagaggatgaagatgtggatctggcccaggtactggcctatctcctccgcagaggccaagtgaggttggtgcagggaggaggtgcagcaaatttacaattcattcaggccctcttgg

SEQ ID NO: 125061 - DNA, 570 bp, Homo sapiens
  Payload ID: 4548
  Gene Symbol: DCAF11
  Gene Name: DDB1 and CUL4 associated factor 11
  ENST ID: ENST00000561041
  CDS Start-End: 109-570
ggaaatccaacaccgcccaacacccctcccgctccccagtccggggacttcgataggaggtgacaggaggagcccccgcacaggacctaagaatgctgtgaccagaagatgggatcgcggaacagcagcagtgcaggatccgggtccggagacccctccgagggcttgccccgaagaggggctggcctgcgtcggagtgaggaagaggaagaagaggatgaagatgtggatctggcccaggtactggcctatctcctccgcagaggccaagtgaggttggtgcagggaggaggtgcagcaaatttacaattcattcaggccctcttggactcagaggaagagaatgacagagcttgggatggtcgtcttggggatcgatacaacccacctgtggatgctacccctgacacccgggagctggaattcaatgagatcaagacacaagtggaactggccacagggcagctggggcttaggcgggccgcccagaagcacagctttcctcgaatgttgcaccagagagaacggggcctctgccatcggggaagcttctcccttggagaacagtct

SEQ ID NO: 125062 - DNA, 575 bp, Homo sapiens
  Payload ID: 4548
  Gene Symbol: DCAF11
  Gene Name: DDB1 and CUL4 associated factor 11
  ENST ID: ENST00000559288
  CDS Start-End: 262-575
aacaccgcccaacacccctcccgctccccagtccggggacttcgataggattggagaaggtttgtgttcccgacgccttggtagttggcataggctaaagaaaagggatctcagccccgaggaagggtcaccctcctagagatagctactaccccgtctcaggagaccctggtatttctagagcacgctttgctttcaccaaacccaaggaggtgacaggaggagcccccgcacaggacctaagaatgctgtgaccagaagatgggatcgcggaacagcagcagtgcaggatccgggtccggagacccctccgagggcttgccccgaagaggggctggcctgcgtcggagtgaggaagaggaagaagaggatgaagatgtggatctggcccaggtactggcctatctcctccgcaggccctcttggactcagaggaagagaatgacagagcttgggatggtcgtcttggggatcgatacaacccacctgtggatgctacccctgacacccgggagctggaattcaatgagatcaagacacaagtggaactggccacagggcagctggggcttagg

SEQ ID NO: 125063 - DNA, 3667 bp, Homo sapiens
  Payload ID: 4549
  Gene Symbol: DCAF12
  Gene Name: DDB1 and CUL4 associated factor 12
  Uniprot ID: Q5T6F0
  ENST ID: ENST00000361264
  CDS Start-End: 343-1704
tttccgtggcgacgctatccgaagtgcggctgcgcaagggtgacggcgcgcgagcaagggggagggggtgttttggttctagccgctcgccgtccttgcaggctctgccgtcggaaagccgctcattctcgcttccccttccctttcccggctcaagtccttcctctctctttcctttctttccgcctatcttttttctgctgccgctccgggtccgggccattttccgggccgggcgcactaaggtgcgcggccccggggcccagtatatgacccgccgtcctgctatccttcgcttcccccgccccatgtggctgcggggccgcggcggcgctgcccactatggcccggaaagtagttagcaggaagcggaaagcgcccgcctcgccgggagctgggagcgacgctcagggcccgcagtttggctgggatcactcgcttcacaaaaggaaaagacttcctcctgtgaagagatccttagtatactacttgaagaaccgggaagtcaggctacagaatgaaaccagctactctcgagtgttgcatggttatgcagcacagcaacttcccagtctcctgaaggagagagagtttcaccttgggacccttaataaagtgtttgcatctcagtggttgaatcataggcaagtggtgtgtggcacaaaatgcaacacgctatttgtcgtagatgtccagacaagccagatcaccaagatccccattctgaaagaccgggagcctggaggtgtgacccagcagggctgtggtatccatgccatcgagctgaatccttctagaacactgctagccactggaggagacaaccccaacagtcttgccatctatcgactacctacgctggatcctgtgtgtgtaggagatgatggacacaaggactggatcttttccatcgcatggatcagcgacactatggcagtgtctggctcacgtgatggttctatgggactctgggaggtgacagatgatgttttgaccaaaagtgatgcgagacacaatgtgtcacgggtccctgtgtatgcacacatcactcacaaggccttaaaggacatccccaaagaagacacaaaccctgacaactgcaaggttcgggctctggccttcaacaacaagaacaaggaactgggagcagtgtctctggatggctactttcatctctggaaggctgaaaatacactatctaagctcctctccaccaaactgccatattgccgtgagaatgtgtgtctggcttatggtagtgaatggtcagtttatgcagtgggctcccaagctcatgtctccttcttggatccacggcagccatcatacaacgtcaagtctgtctgttccagggagcgaggcagtggaatccggtcagtgagtttctacgagcacatcatcactgtgggaacagggcagggctccctgctgttctatgacatccgagctcagagatttctggaagagaggctctcagcttgttatgggtccaagcccagactagcaggggagaatctgaaactaaccactggcaaaggctggctgaatcatgatgaaacctggaggaattacttttcagacattgacttcttccccaatgctgtttacacccactgctacgactcgtctggaacgaaactctttgtggcaggaggtcccctcccttcagggctccatggaaactatgctgggctctggagttaatgacaactccccaaatgcagagatttacactaacttccattctcagtttccttgtttcttttgattttttttttcctaattgtgtgaggctcttgtgttttagtgggaacaccaaagtttgcctatagtttaggcacttaataggaagaagctctgtacagaaatctgaaagttgttttgctttttgttttcccctttggtaatcaaaattttactatcttttattatttctggcttttcaaccaaacattgttgctaatccctatttttctttaagtgacacacattctcctgtctctggcttcttcaggctgaaatgacatagctcacccttacttcactcttgagaggtagggctcctttataattacatggttgctctcagactttctgtgaaagtttgggagctgtgtgtgtctgtgtgtgtgtgagagagagatcttgtctgcgtgtgtgtgtgtgatcttgtgtgcctgtaggtactgtgtgtcactgaaattacctggagtgaggattacttgtaattaaaatatttataaaagaaacaactttattcacagagtccagctttgggactagtctgtatcttgttttttaagtctaacaacactgataataggaagtaaaaacagaaaggaaaagaaattaccactgggaaaatctttttagttagattgtaggcttcctggggcctcccatgccaggactgcaaagtgatccagccctacctgtcttcccacctgtgtgtcccccgtgtgggaagttggtgtcacttccccttcccaccctcacatctgcttagccagtagccacacccctaaaacatcagactcaccatccaggtgcagctccagaggctacaaaaggcttcatgggacttgaatccccatcctagcttctctctccttcccctcaagacctgatctggttttaaggggcctggagctgggagtctcaagtctgctaagattcacatccatagcccccatggctttgaggagaatcctctctgccattcttccaatctccccagtgggttttgctattattttctaaattgggttaagtctaagaaggtgggggtgagcagggggtttatctgtgtgtagtgagtgcttcatgtgtggaatattcattttcttactgcagtgggacttggggttgaagccacccctcctactctgttggcttagccctgagatggtgacaggctggcctgcagtcagcatcattgtgcatgtgacagcatcaatgtgattagtaatttgtctgttcctcccttgaactgtctgtttagtctgaggtttttaaacttgcaggcagctgactgtgatgtccacttgttccctgatttttacacatcatgtcaaagataacagctgttcccacccaccagttcctctaagcacatactctgcttttctgtcaacatcccattttggggaaaggaaaagtcatatttattcctgcaccccagttttttaacttgttctcccagttgtccccctcttctctgggtgtaagaagggaaattggaaaaaaaattatatatatattctccttttaatggtggggggctactggagaggagagacagcaagtccaccctaacttgttacacagcacataccacaggttctggaattctcatcttcgaacctagagaaataggtgctataaacagggaattaagcaaaatgctggatgctatagatcttttaattgtcttaattttttttctattattaaactacaggctgtagatttcttagttctcacagaacttctatcattttaaactgacttgtatatttaaaaaaaaaatcttcagtaggatgttttgtactattgctagaccctcttctgtaatgggtaatgcgtttgattgtttgagattttctgtttttaaaaatgtagcacttgactttttgccaaggaaaaaaataaaaattattccagtgca

SEQ ID NO: 125064 - DNA, 803 bp, Homo sapiens
  Payload ID: 4549
  Gene Symbol: DCAF12
  Gene Name: DDB1 and CUL4 associated factor 12
  ENST ID: ENST00000396990
  CDS Start-End: 123-803
tggaaatctaaagggaatggtgaagttgcaccgtaaggggaaggtgactgaggagctgaaactgactgaggggctgaagcatttcggacaggagaaaggatcaggaggagacagagcggagaatggagcctcagggctacccagcgtttggctgggatcactcgcttcacaaaaggaaaagacttcctcctgtgaagagatccttagtatactacttgaagaaccgggaagtcaggctacagaatgaaaccagctactctcgagtgttgcatggttatgcagcacagcaacttcccagtctcctgaaggagagagagtttcaccttgggacccttaataaagtgtttgcatctcagtggttgaatcataggcaagtggtgtgtggcacaaaatgcaacacgctatttgtcgtagatgtccagacaagccagatcaccaagatccccattctgaaagaccgggagcctggaggtgtgacccagcagggctgtggtatccatgccatcgagctgaatccttctagaacactgctagccactggaggagacaaccccaacagtcttgccatctatcgactacctacgctggatcctgtgtgtgtaggagatgatggacacaaggactggatcttttccatcgcatggatcagcgacactatggcagtgtctggctcacgtgatggttctatgggactctgggaggtgacagatgatgttttgaccaaaagtgatgcgagacacaatgtgtcacgggtccctgtgtatgcacacatcactcacaaggccttaaaggacatccccaaa

SEQ ID NO: 125065 - DNA, 676 bp, Homo sapiens
  Payload ID: 4549
  Gene Symbol: DCAF12
  Gene Name: DDB1 and CUL4 associated factor 12
  ENST ID: ENST00000450964
  CDS Start-End: 109-676
tgatgatgcatccctggaagacctgggagccaggtctggctccttggactgtatcttccgtgctccagtgggagtacagactgagagggagaagggggctgggtagagatgcagcccatgtcgtttggctgggatcactcgcttcacaaaaggaaaagacttcctcctgtgaagagatccttagtatactacttgaagaaccgggaagtcaggctacagaatgaaaccagctactctcgagtgttgcatggttatgcagcacagcaacttcccagtctcctgaaggagagagagtttcaccttgggacccttaataaagtgtttgcatctcagtggttgaatcataggcaagtggtgtgtggcacaaaatgcaacacgctatttgtcgtagatgtccagacaagccagatcaccaagatccccattctgaaagaccgggagcctggaggtgtgacccagcagggctgtggtatccatgccatcgagctgaatccttctagaacactgctagccactggaggagacaaccccaacagtcttgccatctatcgactacctacgctggatcctgtgtgtgtaggagatgatggacacaaggactggatcttttccatcgcatggatcagcgacactatggcagtgtctggctcacgtgatggttctatgggactctggg

SEQ ID NO: 125066 - DNA, 3382 bp, Homo sapiens
  Payload ID: 4550
  Gene Symbol: DCAF12L1
  Gene Name: DDB1 and CUL4 associated factor 12-like 1
  Uniprot ID: Q5VU92
  ENST ID: ENST00000371126
  CDS Start-End: 244-1635
tctcgccgcacgctgactttgctctcactgcccggccagacgcacttcccgccttcgcctaggtctgcaccgccaccgccgccctctcccgcgcgtccctcacccggtccgccactgccgcgcctcagaatccgaaggctcggttccagcgcagccatccacgccgccgccacgaccgactccggagccacgcgctgcaaccgccaccaacgccttgccgccgccgctcgcccgccgcccaccatggcccagcagcaaacaggtagcaggaaacggaaagcgcccgcggtcgaggcggacgccgagagctcgccgtcgcagggcttggcggcagcggacggtgaggggccgctgctactcaagaggcagaggcggccggcgacgtatcgctcgatggcgcactatctgaaggttcgggaggtaggcgggtggggccccgccaggctccagggcttcgatggcgagctgcggggctacgcggtacagaggctgcccgagctgctgacggagcgccaactggagctgggcacggtcaacaaggtgttcgcgtcacagtggctgaactccaggcaggtggtgtgcggcaccaagtgtaacacgcttttcgtggtggacgtggagtcaggccacatcgcgcgcattcccctcttgcgggacagtgaggccaggctggcccaggaccaacagggctgcggcatccatgccatcgagctgaatccctccaagacgcttctggccaccggcggcgaaaaccccaacagcctggccatctaccagctgccctccctggatcccctgtgcctgggcgaccgccatggccacaaggactggatcttcgccgtcgcctggctgagtgacaccgtagccgtgagcggctcccgcgacggcactgtggcgctgtggcggatggacccggacaagttcgatgacactgttgcctggcatagcgaggtgggtctccccgtatatgcccacatccgtccgagggatgtggaggccatccccagggccatcatcaaccccagtaaccgcaaggtgcgggccctggcctgcggcggcaagaaccaggaactgggagcggtgtccttggacggctacttccacctgtggaaagccgggagcgcactatccaggctgctgtccatcaggctgccctacttccgggataatgtgtgcctgacctactgtgatgatatgtctgtgtacgccgtgggctcccattcccacgtctctttcctggatctgcgccaggaccagcagaacatccggcccctgtgttctcgagagggtggcacaggcgtgcggtcgctgagcttctaccgccacatcatcactgtgggcaccggtcagggctccctgctcttctatgacgtccgggcccagaaattcctggaggaaagagcctccgccaccctggagtcctcttcgggacctgcaaggaggaagctcaggcttgcctgtggcagaggctggctcaaccacaatgatttctgggtgaattactttggtggcatggaagtgtttcccaatgcgctctacacccactgctacaactggcctgagatgaagctctttgtggctggggggcctctccctgcaggcctccatgggaactatgcaggcctctggagctaaggatgaccgccttgtactccaggtggaaccagcccagcttaatttgtactcctccaagcagagagagtgagtggtcctttggtcaatgaaaacttggctttaagactttttgactcctttccaacaccatcttttggaattttcatacaaagaaatttggttaatcgttaatctttagttgcattctctctttgagtgattcatacattctgtttctttaagaagatgcagtcatggtctttcagttatgtatatttgttttccttgtttttcctcgttaccaatattacaacagcattgttttcagttatttttcattgcagatacgaagagaaaattttctagtaagcaaggtgttcctacatcttttctggagagcttaccatagttttatagcattgttcaattggaaaagtacattccaagttctagattacctacgtttggaaacacttaatttacaaattgtgatcttagtgtatatagtttttacgttgttggtgctaaagtgcttttttgaagtttattctctttcaaaataagttatcatagaatcttgtgcttgtatcaaactcctaattggtcggaacactttaggagtgcaggggttctgcttcattgcattttcagaattaacctgaaagttgaaacaaccatttttttttatttcaaaacttatttaagttgttatcacctgtccttaaatagataaaagaatgtgtattttttcacttgttgccttagtactatcaagacttgtgaatatatttgaatgtatgttgtttgaaaaacttgcacagggcattggagccatcatgaaaagcaggaaatgtaaacgtggaatgtatggcaggctgggcagaatgtatactgatccagggtatagactagatatttttgctgttgctgtttttattataaaatgttatatttgaggatatttaacattttccaattctgcttaagaggtaattcacaataaaaaaaacaaagaccaaaaatagcacattctgaaaaaaagattcttaataagattttattttgtgaagttcaaagattctttcctaaagtataacgtgttgttaaaaagtagtggtgttataactctcaatgtaatagtatgcaatatcaagaacacaggaagttcgtttcaagataggtgagatttaaaataaataggatgaggttgaagaaaagtatattggagcgcagataaatataaattgtggactgctatgaaaacaggttgtacttctccatatgtgagactactggaagtgagaagcaatatttgtcatttctaaaactggccaggctgtgctgacccaggattagtaatttgttatgtctgttttcccttagatgtttgggcactcagatgctatcttggtgcacacacacaacattgctgttcagtcacaaatccgaacaacttaatataataaattgtactaaaagtcatttaagaaataccaaaaagtaagcttttgtttctaaccattgttataaaggctaatataattgttgttatatagcagtaagatatatttgtgtgcatgcgtctccaagtcagttgtaaatgtcttgagaacagagaatacaattgtcatctttatattgcctcatttctccactaatacttagcaaataaaaggcaataagtaaatatgtactggttgaatgcctctggagacctagagtttaaagttttaagtcaataaataaataaatatttactcttaaataa

SEQ ID NO: 125067 - DNA, 1421 bp, Homo sapiens
  Payload ID: 4551
  Gene Symbol: DCAF12L2
  Gene Name: DDB1 and CUL4 associated factor 12-like 2
  Uniprot ID: Q5VW00
  ENST ID: ENST00000360028
  CDS Start-End: 28-1419
gctgctgcagatcgcccgccgcccaccatggcccagcagcaaacaggtagcaggaaacggaaagcgcccgcggtcgaggcgggagccgggagctcgtcgtcgcagggtttagcggcggcggacggagaggggcctctgctacccaagaagcagaagcggccggcgacgcgtcgcaggctggtgcactatctgaagggccgggaggtaggagcgcggggcccagccgggctccagggcttcgagggcgagctgcggggctacgccgtccagaggctgcccgagctgctgacggagcgccagctggacctgggcaccctcaacaaggtgttcgcgtcacagtggctgaacgccaggcaggtggtgtgcggcaccaagtgtaatacgctgtttgtggtggacgtgcagtcaggccacatcacgcgcatccccctcatgcgggacaaggaggccgggctggcccaggcccaccagggctgcggcatccatgccatcgagctgaatccctccaagacgcttctggccaccggcggcgaaaaccccaacagcctggccatctaccagctgcccaccctggaccccctgtgcctgggcgaccgccatggccacaaggactggatcttcgcagtcgcctggctgagtgacaccgtagctgtgagcggctcccgcgacggcaccgtggctctgtggcggatggacccagacatgtttaatggcagcattgcctggcacagcgaggtgggtctcccagtatatgcccacatccgtccgagggatgtggaggccatccccagggccagcaccaaccccagcaaccgcaaggtacgggccctggccttcagcggcaagaaccaggagctgggagcggtgtccttggacggctacttccacctgtggaaagcccggagcacactatccaggctcctgtccatcaggctgccctactgccgagagaatgtgtgcctgacctactgtgatgagttgtccctgtacgctgtgggctctcagtcccacgtctccttcctggatccgcgccagcgccagcagaacatccggcccctgtgctctcgagagggtggcacaggcgtgcggtcgctgagcttctaccagcacatcatcactgtgggcaccggccatggttccctgctcttctatgacatccgcgcccagaagttcctggaggagagggcctcttccagcctggactccatgccggggcccgcagggaggaagctcaagcttgcctgcggcagaggctggctcaaccaagatgacgtctgggtgaactactttggtggcatgggagagttccccaatgcgctctacacccactgctacaactggccggagatgaagctctttgtggctggggggcctctcccttcaggcctccatgggaactacgcaggcctctggagttaagg

SEQ ID NO: 125068 - DNA, 2642 bp, Homo sapiens
  Payload ID: 4552
  Gene Symbol: DCAF13
  Gene Name: DDB1 and CUL4 associated factor 13
  ENST ID: ENST00000297579
  CDS Start-End: 278-2071
aaaagacggaggagatccagttcgggctgacagtgagaggatgcagcccggtgtctgggcgggctcttaccggcgaagcggatcttcacgaggtcgagcggatgcagcgcaaggttggataagacgccgccgctcacgcccgctatcaggttctcataccggacgtggcggaataccgtgctccacgccgacgacccggacgccgactggccctggcccgtcataggctcggggcccgtcgacaccacggcgcccagggccgcggaggtgggacgcgatgcagtggccgccaccgtggcgacggtcgccccttgtgagcgcaaccccacctccgggaccaacgagaggactcttatgcccaaggcgcgtgagcgaagccggagactctagtactgagggggcaagaacggggcacagacactacgtcacgccggcggaaagcgcgatggaggggaggtcccagcctctcccgagtctccgccctgcctcgcccacaaatgctccagcccacggacgcggaagcgactgcacagctaaagaaccgccccttgctaacgtttgccggcaaaactacggagcggcgcaggatccagttgagccagcaggccgccgctccgcgagtcacgtgactggaagtagtctgggaaaagcggaagtcgcctgtgggaggaggtggcggtgggcggaactcctagcggacacctcgtggagtccggccggaagagcaaccgagatgaaggtgaagatgctgagccggaatccggacaattatgtccgcgaaaccaagttggacttacagagagttccaagaaactatgatcctgctttacatccttttgaggtcccacgagaatatataagagctttaaatgctaccaaactggaacgagtatttgcaaaaccattccttgcttcgctggatggtcaccgtgatggagtcaattgcttggcaaagcatccagagaagctggctactgtcctttctggggcgtgtgatggagaggttagaatttggaatctaactcagcggaattgtatccgtacaatacaagcacatgaaggctttgtacgaggaatatgtactcgcttttgtgggacttcttttttcactgttggtgatgacaaaactgtgaagcagtggaaaatggatgggccaggctatggagacgaggaagagccattacatacaatattaggaaagacagtgtatactgggattgatcatcactggaaagaagctgtttttgccacatgtggacagcaagtagacatttgggatgaacaaagaactaatcctatatgttcaatgacctggggatttgacagtataagtagtgttaaatttaacccaattgagacatttctcttgggaagttgtgcatctgacaggaatatagtactgtacgatatgaggcaagctactcctttgaaaaaggttatcttagatatgagaacaaatacaatctgttggaaccctatggaagctttcatttttacagcagcaaatgaagattataacttatatacttttgatatgcgtgcactggacactcctgtaatggtccatatggatcatgtatctgcagtgcttgatgtggattactctcccactgggaaggagtttgtgtctgctagtttcgataaatctattcgaatctttcctgtagacaaaagtcgaagcagggaggtatatcatacaaagagaatgcaacatgttatctgtgtaaaatggacttctgacagcaagtatattatgtgtggatctgatgaaatgaacattcgcctgtggaaagctaatgcttctgaaaaattgggtgtgcttacatcacgagaaaaagcagccaaggattataaccagaaattgaaggagaaatttcagcattatcctcatataaaacgtatagctcgtcatcgacatctaccaaaatctatctatagccagattcaggaacagcgcatcatgaaagaagctcgtcgacgaaaggaagtgaatcgtattaaacacagcaagcctggatctgtgccacttgtgtcagagaagaagaaacacgtagtggcagttgtaaaataattggtattcctaacaatcctgatgtataattatttgttacttttgatttgagaactctacaaataaaagtgctgggactagattaattgcaaacattttagttatatgtgtagagctttattgttactccttttagctaccctgaaaaatgatccttaaaggtggcctagttggtaagactgttttatccttaatctgcattcttctttcattgtagaatacagtatttgcaactcattttttcttgtttttattacagatatacttactttctctttgatctattattgtagacactatacattcaaattgacatttaagaccaaacatctcttatgttatctttaatattactttgaataatgattgcaatgatgtttcttcctgtgattccacataacatttagaataatgatgtcaattttttacaactgaatttatttctagtgctttacttatatttggctttttgactcttttaaaacaatcagcctgcatttatataacttttataaataataatataatttgggtcaagttaagatattaaaagttcctttcagcattgaaa

SEQ ID NO: 125069 - DNA, 837 bp, Homo sapiens
  Payload ID: 4552
  Gene Symbol: DCAF13
  Gene Name: DDB1 and CUL4 associated factor 13
  ENST ID: ENST00000519682
  CDS Start-End: 36-701
acacctcgtggagtccggccggaagagcaaccgagatgaaggtgaagatgctgagccggaatccggacaattatgtccgcgaaaccaagttggacttacagagagttccaagaaactatgatcctgctttacatccttttgaggtcccacgagaatatataagagctttaaatgctaccaaactggaacgagtatttgcaaaaccattccttgcttcgctggatggtcaccgtgatggagtcaattgcttggcaaagcatccagagaagctggctactgtcctttctggggcgtgtgatggagaggttagaatttggaatctaactcagcggaattgtatccgtacaatacaagcacatgaaggctttgtacgaggaatatgtactcgcttttgtgggacttcttttttcactgttggtgatgacaaaactgtgaagcagtggaaaatggatgggccaggctatggagacgaggaagagccattacatacaatattaggaaagacagtgtatactgggattgatcatcactggaaagaagctgtttttgccacatgtggacagcaagtagacatttgggatgaacaaagaactaatcctatatgttcaatgacctggggatttgacagtataagtagtgttaaatttaacccaattgaggtaatgtttttttttaagtatgttttacttattatggcttaataatttcagttctgtttagaaaacttttgaatgtatgatagaaacttctgaattttaatggtgttttggcattttgtcagttttcccgattgtaaatgagttctgatacctttgctcaaatcccaacatgtttccc

SEQ ID NO: 125070 - DNA, 2049 bp, Homo sapiens
  Payload ID: 4552
  Gene Symbol: DCAF13
  Gene Name: DDB1 and CUL4 associated factor 13
  ENST ID: ENST00000521971
  CDS Start-End: 69-626
ggaggaggtggcggtgggcggaactcctagcggacacctcgtggagtccggccggaagagcaaccgagatgaaggtgaagatgctgagccggaatccggacaattatgtccgcgaaaccaagttggacttacagagagttccaagaaactatgatcctgctttacatccttttgaggtcccacgagaatatataagagctttaaatgctaccaaactggaacgagtatttgcaaaaccattccttgcttcgctggatggtcaccgtgatggagtcaattgcttggcaaagcatccagagaagctggctactgtcctttctggggcgtgtgatggagaggttggtgatgacaaaactgtgaagcagtggaaaatggatgggccaggctatggagacgaggaagagccattacatacaatattaggaaagacagtgtatactgggattgatcatcactggaaagaagctgtttttgccacatgtggacagcaagtagacatttgggatgaacaaagaactaatcctatatgttcaatgacctggggatttgacagtataagtagtgttaaatttaacccaattgaggtaatgtttttttttaagtatgttttacttattatggcttaataatttcagttctgtttagaaaacttttgaatgtatgatagaaacttctgaattttaatggtgttttggcattttgtcagttttcccgattgtaaatgagttctgatacctttgctcaaatcccaacatgtttcccagcagtttagtcccagatactagagttaagcattgttagaggagtggtgtgtgcatttgcccattggggtaaaatccaagtaaatatagtcttgttttaactttagttttactcatgccttcaacttcatgttccatagattatgtcattgtacatttaggaaaatgttaatttttctacctgccttggaggtcagaagaaggagcattggacatcattttgtctatttgtaattggtaaggtaccaatgcttcataaaaacatttgtgattattgttgaactgcatggtaattagttatagttatatttttctttgctcagaagtctgaattgtgattcccagttcctccaggcctaagggaagagttggagattggccactacatgtcgtctgtttaggtctgaatttaggaatggaggctgtcctgaaggctaagctagcccttggactccagatctttctctgaactttttcttaatgcataacaatagatgaactgattgtccagaagactcagtagggatatgtttttcctgttgaaagaaaaggcaatcatagcatatataagccaattttagcagttattgcgaggctaccattttaggtagtatgagagaaaaatcctaatatgcaagtgttatgctcttaaagacccaacctgataaaagataggaagtaaggttgagtcaaaatagtaaggtataaaaatagtttgtatgatatactggaaaatgagatgctgcagtgcgatgtgagcttggccttgaggaattactgagaagtcagaggacactcttcctgcaactaccacatgctcacacacacactttctagagacgctacaggtctagaataggttggcaaactagtctgtgagccacatgtggcccactgcctgtttttgtaaatagagctctgctagaagacagccatgttctcttgcgtacatattgtctgtagctgctttcgtgctatgatggcagagttaagtaattgccacagagaccatatggcccacaaaacctaaaatacttactctctggccctttacagaaaaagttttctgattcctggtctggagtgtctgtctctattatatctttctcactccatcctccatcttccttccttatgtttcccttggttgtagaagagagaagtggcatggaaaggcagctacctttgcagagcaggaccaagtgtaaaagttgataacatatgtgaacattttttaaaagtgctatccaaattcaagatggtgacggtattacgtactaaaaaaaaa

SEQ ID NO: 125071 - DNA, 2639 bp, Homo sapiens
  Payload ID: 4552
  Gene Symbol: DCAF13
  Gene Name: DDB1 and CUL4 associated factor 13
  ENST ID: ENST00000616836
  CDS Start-End: 278-2071
aaaagacggaggagatccagttcgggctgacagtgagaggatgcagcccggtgtctgggcgggctcttaccggcgaagcggatcttcacgaggtcgagcggatgcagcgcaaggttggataagacgccgccgctcacgcccgctatcaggttctcataccggacgtggcggaataccgtgctccacgccgacgacccggacgccgactggccctggcccgtcataggctcggggcccgtcgacaccacggcgcccagggccgcggaggtgggacgcgatgcagtggccgccaccgtggcgacggtcgccccttgtgagcgcaaccccacctccgggaccaacgagaggactcttatgcccaaggcgcgtgagcgaagccggagactctagtactgagggggcaagaacggggcacagacactacgtcacgccggcggaaagcgcgatggaggggaggtcccagcctctcccgagtctccgccctgcctcgcccacaaatgctccagcccacggacgcggaagcgactgcacagctaaagaaccgccccttgctaacgtttgccggcaaaactacggagcggcgcaggatccagttgagccagcaggccgccgctccgcgagtcacgtgactggaagtagtctgggaaaagcggaagtcgcctgtgggaggaggtggcggtgggcggaactcctagcggacacctcgtggagtccggccggaagagcaaccgagatgaaggtgaagatgctgagccggaatccggacaattatgtccgcgaaaccaagttggacttacagagagttccaagaaactatgatcctgctttacatccttttgaggtcccacgagaatatataagagctttaaatgctaccaaactggaacgagtatttgcaaaaccattccttgcttcgctggatggtcaccgtgatggagtcaattgcttggcaaagcatccagagaagctggctactgtcctttctggggcgtgtgatggagaggttagaatttggaatctaactcagcggaattgtatccgtacaatacaagcacatgaaggctttgtacgaggaatatgtactcgcttttgtgggacttcttttttcactgttggtgatgacaaaactgtgaagcagtggaaaatggatgggccaggctatggagacgaggaagagccattacatacaatattaggaaagacagtgtatactgggattgatcatcactggaaagaagctgtttttgccacatgtggacagcaagtagacatttgggatgaacaaagaactaatcctatatgttcaatgacctggggatttgacagtataagtagtgttaaatttaacccaattgagacatttctcttgggaagttgtgcatctgacaggaatatagtactgtacgatatgaggcaagctactcctttgaaaaaggttatcttagatatgagaacaaatacaatctgttggaaccctatggaagctttcatttttacagcagcaaatgaagattataacttatatacttttgatatgcgtgcactggacactcctgtaatggtccatatggatcatgtatctgcagtgcttgatgtggattactctcccactgggaaggagtttgtgtctgctagtttcgataaatctattcgaatctttcctgtagacaaaagtcgaagcagggaggtatatcatacaaagagaatgcaacatgttatctgtgtaaaatggacttctgacagcaagtatattatgtgtggatctgatgaaatgaacattcgcctgtggaaagctaatgcttctgaaaaattgggtgtgcttacatcacgagaaaaagcagccaaggattataaccagaaattgaaggagaaatttcagcattatcctcatataaaacgtatagctcgtcatcgacatctaccaaaatctatctatagccagattcaggaacagcgcatcatgaaagaagctcgtcgacgaaaggaagtgaatcgtattaaacacagcaagcctggatctgtgccacttgtgtcagagaagaagaaacacgtagtggcagttgtaaaataattggtattcctaacaatcctgatgtataattatttgttacttttgatttgagaactctacaaataaaagtgctgggactagattaattgcaaacattttagttatatgtgtagagctttattgttactccttttagctaccctgaaaaatgatccttaaaggtggcctagttggtaagactgttttatccttaatctgcattcttctttcattgtagaatacagtatttgcaactcattttttcttgtttttattacagatatacttactttctctttgatctattattgtagacactatacattcaaattgacatttaagaccaaacatctcttatgttatctttaatattactttgaataatgattgcaatgatgtttcttcctgtgattccacataacatttagaataatgatgtcaattttttacaactgaatttatttctagtgctttacttatatttggctttttgactcttttaaaacaatcagcctgcatttatataacttttataaataataatataatttgggtcaagttaagatattaaaagttcctttcagcattg

SEQ ID NO: 125072 - DNA, 2038 bp, Homo sapiens
  Payload ID: 4552
  Gene Symbol: DCAF13
  Gene Name: DDB1 and CUL4 associated factor 13
  Uniprot ID: Q9NV06
  ENST ID: ENST00000618975
  CDS Start-End: 69-359
ggaggaggtggcggtgggcggaactcctagcggacacctcgtggagtccggccggaagagcaaccgagatgaaggtgaagatgctgagccggaatccggacaattatgtccgcgaaaccaagttggacttacagagagttccaagaaactatgatcctgctttacatccttttgaggtcccacgagaatatataagagctttaaatgctaccaaactggaacgagtatttgcaaaaccattccttgcttcgctggatggtcaccgtgatggagtcaattgcttggcaaagcatccagagaagctggctactgtcctttctggggcgtgtgatggagagttggtgatgacaaaactgtgaagcagtggaaaatggatgggccaggctatggagacgaggaagagccattacatacaatattaggaaagacagtgtatactgggattgatcatcactggaaagaagctgtttttgccacatgtggacagcaagtagacatttgggatgaacaaagaactaatcctatatgttcaatgacctggggatttgacagtataagtagtgttaaatttaacccaattgaggtaatgtttttttttaagtatgttttacttattatggcttaataatttcagttctgtttagaaaacttttgaatgtatgatagaaacttctgaattttaatggtgttttggcattttgtcagttttcccgattgtaaatgagttctgatacctttgctcaaatcccaacatgtttcccagcagtttagtcccagatactagagttaagcattgttagaggagtggtgtgtgcatttgcccattggggtaaaatccaagtaaatatagtcttgttttaactttagttttactcatgccttcaacttcatgttccatagattatgtcattgtacatttaggaaaatgttaatttttctacctgccttggaggtcagaagaaggagcattggacatcattttgtctatttgtaattggtaaggtaccaatgcttcataaaaacatttgtgattattgttgaactgcatggtaattagttatagttatatttttctttgctcagaagtctgaattgtgattcccagttcctccaggcctaagggaagagttggagattggccactacatgtcgtctgtttaggtctgaatttaggaatggaggctgtcctgaaggctaagctagcccttggactccagatctttctctgaactttttcttaatgcataacaatagatgaactgattgtccagaagactcagtagggatatgtttttcctgttgaaagaaaaggcaatcatagcatatataagccaattttagcagttattgcgaggctaccattttaggtagtatgagagaaaaatcctaatatgcaagtgttatgctcttaaagacccaacctgataaaagataggaagtaaggttgagtcaaaatagtaaggtataaaaatagtttgtatgatatactggaaaatgagatgctgcagtgcgatgtgagcttggccttgaggaattactgagaagtcagaggacactcttcctgcaactaccacatgctcacacacacactttctagagacgctacaggtctagaataggttggcaaactagtctgtgagccacatgtggcccactgcctgtttttgtaaatagagctctgctagaagacagccatgttctcttgcgtacatattgtctgtagctgctttcgtgctatgatggcagagttaagtaattgccacagagaccatatggcccacaaaacctaaaatacttactctctggccctttacagaaaaagttttctgattcctggtctggagtgtctgtctctattatatctttctcactccatcctccatcttccttccttatgtttcccttggttgtagaagagagaagtggcatggaaaggcagctacctttgcagagcaggaccaagtgtaaaagttgataacatatgtgaacattttttaaaagtgctatccaaattcaagatggtgacggtattacgtac

SEQ ID NO: 125073 - DNA, 779 bp, Homo sapiens
  Payload ID: 4552
  Gene Symbol: DCAF13
  Gene Name: DDB1 and CUL4 associated factor 13
  ENST ID: ENST00000521999
  CDS Start-End: 166-779
ggtggcggtgggcggaactcctagcggacacctcgtggagtccggccggaagagcaaccgagatgaaggtgaagatgctgagccggaatccggacaattatgtccgcgaaaccaagttggacttacagagaggttggtgatgacaaaactgtgaagcagtggaaaatggatgggccaggctatggagacgaggaagagccattacatacaatattaggaaagacagtgtatactgggattgatcatcactggaaagaagctgtttttgccacatgtggacagcaagtagacatttgggatgaacaaagaactaatcctatatgttcaatgacctggggatttgacagtataagtagtgttaaatttaacccaattgagacatttctcttgggaagttgtgcatctgacaggaatatagtactgtacgatatgaggcaagctactcctttgaaaaaggttatcttagatatgagaacaaatacaatctgttggaaccctatggaagctttcatttttacagcagcaaatgaagattataacttatatacttttgatatgcgtgcactggacactcctgtaatggtccatatggatcatgtatctgcagtgcttgatgtggattactctcccactgggaaggagtttgtgtctgctagtttcgataaatctattcgaatctttcctgtagacaaaagtcgaagcagggaggtatatcatacaaagagaatgcaacatgttatctgtgtaaaatggacttctgacagcaagtatattatgtg

SEQ ID NO: 125074 - DNA, 1967 bp, Homo sapiens
  Payload ID: 4552
  Gene Symbol: DCAF13
  Gene Name: DDB1 and CUL4 associated factor 13
  Uniprot ID: Q9NV06
  ENST ID: ENST00000612750
  CDS Start-End: 59-1396
gcggtgggcggaactcctagcggacacctcgtggagtccggccggaagagcaaccgagatgaaggtgaagatgctgagccggaatccggacaattatgtccgcgaaaccaagttggacttacagagagttccaagaaactatgatcctgctttacatccttttgaggtcccacgagaatatataagagctttaaatgctaccaaactggaacgagtatttgcaaaaccattccttgcttcgctggatggtcaccgtgatggagtcaattgcttggcaaagcatccagagaagctggctactgtcctttctggggcgtgtgatggagaggttagaatttggaatctaactcagcggaattgtatccgtacaatacaagcacatgaaggctttgtacgaggaatatgtactcgcttttgtgggacttcttttttcactgttggtgatgacaaaactgtgaagcagtggaaaatggatgggccaggctatggagacgaggaagagccattacatacaatattaggaaagacagtgtatactgggattgatcatcactggaaagaagctgtttttgccacatgtggacagcaagtagacatttgggatgaacaaagaactaatcctatatgttcaatgacctggggatttgacagtataagtagtgttaaatttaacccaattgagacatttctcttgggaagttgtgcatctgacaggaatatagtactgtacgatatgaggcaagctactcctttgaaaaaggttatcttagatatgagaacaaatacaatctgttggaaccctatggaagctttcatttttacagcagcaaatgaagattataacttatatacttttgatatgcgtgcactggacactcctgtaatggtccatatggatcatgtatctgcagtgcttgatgtggattactctcccactgggaaggagtttgtgtctgctagtttcgataaatctattcgaatctttcctgtagacaaaagtcgaagcagggaggtatatcatacaaagagaatgcaacatgttatctgtgtaaaatggacttctgacagcaagtatattatgtgtggatctgatgaaatgaacattcgcctgtggaaagctaatgcttctgaaaaattgggtgtgcttacatcacgagaaaaagcagccaaggattataaccagaaattgaaggagaaatttcagcattatcctcatataaaacgtatagctcgtcatcgacatctaccaaaatctatctatagccagattcaggaacagcgcatcatgaaagaagctcgtcgacgaaaggaagtgaatcgtattaaacacagcaagcctggatctgtgccacttgtgtcagagaagaagaaacacgtagtggcagttgtaaaataattggtattcctaacaatcctgatgtataattatttgttacttttgatttgagaactctacaaataaaagtgctgggactagattaattgcaaacattttagttatatgtgtagagctttattgttactccttttagctaccctgaaaaatgatccttaaaggtggcctagttggtaagactgttttatccttaatctgcattcttctttcattgtagaatacagtatttgcaactcattttttcttgtttttattacagatatacttactttctctttgatctattattgtagacactatacattcaaattgacatttaagaccaaacatctcttatgttatctttaatattactttgaataatgattgcaatgatgtttcttcctgtgattccacataacatttagaataatgatgtcaattttttacaactgaatttatttctagtgctttacttatatttggctttttgactcttttaaaacaatcagcctgcatttatataacttttataaataataatataatttgggtcaagttaagatattaaaagttcctttcagcattgaaa

SEQ ID NO: 125075 - DNA, 2278 bp, Homo sapiens
  Payload ID: 4553
  Gene Symbol: DCAF15
  Gene Name: DDB1 and CUL4 associated factor 15
  Uniprot ID: Q66K64
  ENST ID: ENST00000254337
  CDS Start-End: 22-1824
aagtggagggagggggtgaaaatggcgcccagctcgaaatcggagcggaacagcggggctgggagcggcggcggcggccccgggggagccggagggaagcgggcagcagggcggcggcgggagcacgtcctcaagcagctggagcgggtcaagatcagcggacagctctcccctcgcctcttccggaagctgcctccccgggtgtgcgtgtccctcaagaacattgtggatgaggacttcctctatgcaggacatatcttcctgggcttttccaaatgcggccgctacgtcctctcctacaccagcagcagtggggatgacgacttctccttctacatctaccatctgtactggtgggagttcaacgttcacagcaagctcaagctggtccggcaggttcggctattccaggacgaggagatctacagcgacctgtacctgaccgtatgcgagtggcccagcgacgcctccaaggtcatcgtcttcggcttcaacacccgctcggccaacgggatgctcatgaacatgatgatgatgagtgacgagaaccaccgtgacatctacgtcagcaccgtggccgtgccaccgccaggccgctgtgctgcttgccaggatgccagccgagcccacccaggagacccgaatgcacagtgcctacggcatggcttcatgctgcacaccaagtaccaggtggtctaccccttccccaccttccagcccgccttccagctcaagaaggaccaggtggtgctgctcaacaccagctactccctggtggcctgcgccgtctccgtccactcggcaggtgacaggagtttctgccaaatcctgtatgaccacagcacctgccccctggcgcctgccagcccccctgagccccagagcccagagctgccccctgccctccccagcttctgccctgaggcggccccagcccgttcttctgggtctcctgagccctcgcccgccattgccaaagccaaggagtttgtggctgacatcttccgccgggccaaagaggccaagggcggggtccctgaggaagcccggcctgccctgtgcccaggaccctctggcagccgctgccgtgcgcactctgagcccctagccctgtgtggagagacggcaccccgggacagcccccctgcctcggaggcacctgcctccgagcctggctatgtcaactacaccaagctgtactatgtgctggagtccggagaggggacggagccggaggatgagttggaggacgacaagatctccctgcccttcgtggtgactgatcttcgtggccgcaacctgcggcccatgcgggagcggactgctgtccagggccagtacctgacagtggagcagctcacactagacttcgaatatgttatcaatgaggtcatccgccacgacgctacctggggccatcagttctgttctttcagcgactatgacatcgtcattctggaggtctgcccagaaaccaaccaggtcctcatcaacattggcctgctgctcctggccttcccgtcccccactgaggagggccagctccgaccaaagacctatcacaccagcctcaaggtggcatgggacctcaacacagggatcttcgagacagtcagtgtaggcgacctgactgaggtcaaagggcagaccagcggcagtgtctggagctcctaccgcaagagctgcgtggacatggtcatgaagtggctggtgccggagagcagcggccgctacgtcaacaggatgaccaatgaggcgctgcacaaagggtgctccctgaaggttctggcggacagcgagcgatatacgtggatcgtgctgtgagggccaggccgccccggacactgactccaactacctccgtggcctgggaccggcccccttcctggggtggcctcttcctggccggctggcccaccgactgatgaccggcactagtgttagcctgcggaacggggctgggcagggcagcctctgttggcctgagggtctggacgctttttatttatgcctatttaagttgggaaggggcagagagagggcgccccctgccccaccagcctgagtgccccgccttcaccccgagctgggcatgggcctggcccctcgtgcatttgcccttttctcggctacagctgtggacgttgccctcggggaggtcgaatggaccccattccccctgccctgcccgcccccagcctccccacccaggccggcaacctggccatccccattccgttcttcttcatgtaataaatgttttaatttctgaacctca

SEQ ID NO: 125076 - DNA, 815 bp, Homo sapiens
  Payload ID: 4553
  Gene Symbol: DCAF15
  Gene Name: DDB1 and CUL4 associated factor 15
  ENST ID: ENST00000585468
  CDS Start-End: 1-815
tggtctaccccttccccaccttccagcccgccttccagctcaagaaggaccaggtggtgctgctcaacaccagctactccctggtggcctgcgccgtctccgtccactcggcaggtgacaggagtttctgccaaatcctgtatgaccacagcacctgccccctggcgcctgccagcccccctgagccccagagcccagagctgccccctgccctccccagcttctgccctgaggcggccccagcccgttcttctgggtctcctgagccctcgcccgccattgccaaagccaaggagtttgtggctgacatcttccgccgggccaaagaggccaagggcggggtccctgaggaagcccggcctgccctgtgcccaggaccctctggcagccgctgccgtgcgcactctgagcccctagccctgtgtggagagacggcaccccgggacagcccccctgcctcggaggcacctgcctccgagcctggctatgtcaactacaccaagctgtactatgtgctggagtccggagaggggacggagccggaggatgagttggaggacgacaagatctccctgcccttcgtggtgactgatcttcgtggccgcaacctgcggcccatgcgggagcggactgctgtccaggtgggtgtgggcagtgggcgggccaaggacagtcccggggagctgccggggggcagttggcaccgtcccctgcgcctacccactcacccgcagggccagtacctgacagtggagcagctcacactagacttcgaatatgttatcaatgaggtcatccgccacgacgctacctgg

SEQ ID NO: 125077 - DNA, 506 bp, Homo sapiens
  Payload ID: 4553
  Gene Symbol: DCAF15
  Gene Name: DDB1 and CUL4 associated factor 15
  ENST ID: ENST00000591802
  CDS Start-End: 1-165
gcgcccagctcgaaatcggagcggaacagcggggctgggagcggcggcggcggccccgggggagccggagggaagcgggcagcagggcggcggcgggagcacgtcctcaagcagctggagcgggtcaagagcccctgccgctggctttgggcttcctccgcctgatgttcctctccctgcccaagccccgaccacacatgagctgggagttccagtacctgggtgggcctccccattgaaagtgtgggagctccctggatagggctgagtcttcccccgcagagtgagagttaccgaagcaggctctgtctcctccatcagactggaaactcccagagctgggggatgatgtctctctcccccatcagtttgggagctctggagggcagaaatgtggatctcttgcagatcagcggacagctctcccctcgcctcttccggaagctgcctccccgggtgtgcgtgtccctcaagaacattgtggatgaggacttcctctatgcagg

SEQ ID NO: 125078 - DNA, 711 bp, Homo sapiens
  Payload ID: 4553
  Gene Symbol: DCAF15
  Gene Name: DDB1 and CUL4 associated factor 15
  ENST ID: ENST00000587307
  CDS Start-End: 1-605
ccccacttcctgcctccccagagttggaggacgacaagatctccctgcccttcgtggtgactgatcttcgtggccgcaacctgcggcccatgcgggagcggactgctgtccagggccagtacctgacagtggagcagctcacactagacttcgaatatgttatcaatgaggtcatccgccacgacgctacctggggccatcagttctgttctttcagcgactatgacatcgtcattctggaggtctgcccagaaaccaaccaggtcctcatcaacattggcctgctgctcctggccttcccgtcccccactgaggagggccagctccgaccaaagacctatcacaccagcctcaaggtggcatgggacctcaacacagggatcttcgagacagtcagtgtaggcgacctgactgaggtcaaagggcagaccagcggcagtgtctggagctcctaccgcaagagctgcgtggacatggtcatgaagtggctggtgccggagagcagcggccgctacgtcaacaggatgaccaatgaggcgctgcacaaagggtgctccctgaaggttctggcggacagcgagcgatatacgtggatcgtgctgtgagggccaggccgccccggacactgactccaactacctccgtggcctgggaccggcccccttcctggggtggcctcttcctggccggctggcccaccgactgatgacc

SEQ ID NO: 125079 - DNA, 4548 bp, Homo sapiens
  Payload ID: 4554
  Gene Symbol: DCAF16
  Gene Name: DDB1 and CUL4 associated factor 16
  Uniprot ID: Q9NXF7
  ENST ID: ENST00000382247
  CDS Start-End: 1062-1712
cggaagtagcgtcggcgcgggagctgagcggagtggccttgccaccggaggggaagggctgctggcgttaggcctggctgggtcgtgcggctgagcgtgaggctagaaagaaaaagcgatcctccaagagtgagaacgggagatctgccgaggataacaacctcccttgtggccgaagggcgggggatccccacacgagggctccgcttcgagagacggcgacaaaggaaagttcgtagcgcgttccggaggcccggccacctctgagaagggagacgacgctgctgggtccgctgagcggggcgacccgagcttatatagaattggtgataggatcacaacttctgaggtcccagcaagagtcctaacatctagcagctctaccaccaggacaggccccctaaaactaattccaacaagcacctctgaagtcttctcattcacaggttaaggctacctttccagataatccaacagctaaatcaccagtttccaagggcatttgcatcacctatggaaagcatcggatccttatacaccagatgttcttgacagctcatcccgtcattcccccctgcacaaaagttgctataccagcggacaagcaagacaactactgagcttcttttgattgtcaagtagatataatatcactgccagcaaaacagcacaaaaagtgtctcttcacagtatcactaccagttgggactatgctaagtaaatcagcttgcctagatgaggaccccttctattcttgggtagccaggatttgaaggagatactctgacctgtgccagtggtaagtgactaatacttttacacactgaactggtcctggaaactgagatgtcttctttgtaagtgaagaatatacaacataatcttgaagaacggcacagtggtatgggccacaagcatactttatgtgtgtaacggactgaaagacaaattaatcttggtgaaaggatttttcatctcttatttctatttgccagtgttagtcagtgttctgctggcttagattattacctttttctggttccttactgtgttttattctgatgggtcctagaaatccctctcctgaccacttgtcagaatcagaaagtgaggaagaagaaaatattagttacctaaatgagagttctggggaagagtgggattcctctgaagaagaggactctatggtgcccaacttatcgcctcttgagagtcttgcctggcaggttaagtgccttttaaaatattccacaacttggaaacctttaaatcctaattcctggttgtatcatgctaaactgttggatccaagcacaccagtccatatacttcgagagataggtctaagactctcccattgttcccattgtgtccccaaactggaaccaattcctgaatggccccctctggcctcttgtggagtcccaccttttcaaaagcctcttacaagtcccagccggctctctagagatcatgccactctaaatggagcactgcaatttgccaccaaacagctaagccgaacattgagtagagccactcccatacctgaatacctaaaacagatccctaattcatgtgtttctgggtgttgctgtggctggctgactaaaacagttaaggaaacaactcgtactgaacccatcaacactacttattcttacactgacttccaaaaggcagttaacaaactcctaactgcatcactgtaaagatctaccatttgctctgatatctctgatgttgctaattgagaaagtggtacaaagttagtcattacacagcccactaatgccttctcagtcaaactctcttatgccctggcaagccaatgaggataccctttgacaaaccctgtggataaaatgataatatcaaggtcaggcatggtggctcacacctgtaatcccagcactttgggaggctgaggcgggtggatctgctgaagtcagaagtttgagaccagccttgccaacacagtgaaaccctgtctctactaaaaataaaaaaattagccgggcgcagcagtgcacgcctgtaatccctgctactcgggaggctgaaacaggagaatcacttgaacccaggagacggaggttgcggtgagttgagattatgccactgtactccagcctgggtgacagagcgagactcagtctcaaaaaaaaaaaaggagaattagttaaggggaccatattacaaaagatagttgaatattcttcacactcacttctcaccctccccaccccaatttactctgcctttctgaatggctttaatgagatacctgattattaatgaagaaaagtagaccaccaccccttttgttatccagactttagaacagccattgttgaaagcaagaagttagctacccacaataatacctttctgagcatactcttctctaacatacatttctgtggaagtagttgaattaaattgagtaactacacaaaggaaaatggcagggctatgaatttctttcccagcttttatatagatgtgcctacatatgacactctttagggttccttttattttttctttttttttttttttgaggtagttgaattaaactgggtaactacacaaaggaaaatggcagggatatgaatttctttcccagcttttatatagatgtgcctgcatatgacactctttagagttcctttcactttttcttttttttggaagggggcggggaggcaggaggagtgcagttttaagcctagcctatactactacaaacttattatggtacttaaaattacagcatgaacgttctatatcggagtctcccaccaggctgtctctgactaaatcagcctataagatcatcccttgggattaaacaaacacctgttctgtagggaatgtgtttcctgaatcttggtactcagacttttgtcaagagtaaataacatttcaaaagatgaatggaaaaatgattaagagagcatttctgctttcagcattaactgctaatggattaaaattttaatctgtatagcatttcctggagtaaaagctcaagtactttccacatccattgcaaacttttcaggaacccttctaattttttttttttttttttttttgagacggagtcttgctctgtcgcccaggctggagtgtagtggcatgatctcagctcactgcaagctctgcctcccgggttcgtgccattctcctgccctgcctcccgaatagctgggactacaggcgtccaccaccactcctggctatttttttgtatttttagtagagacagggtttcaccgtgttagccaggatggtcttgatctcctgacctcgtgatccacctgcctcggcctcccaaagtgctgggattgaacccttctaattttaaagaaccttgttattagaaaatctcagcctaatacaatctgaagttaagagttttagcagcattgtttttctaagtagatttagctatagattttcttctggccaaacaaggaagagtatatgcccttgtaaatgagtcttgttttgtttatttaaatagtcagtcaaaacgtagaaatcagtatacgtaaaataaaatgcatgagactattaaatcttttcatatactctacaaataaaatgaaatctgtgtgtggtcctggttgactgggcatctaaagggaatcagaaaagagattgtgaaaagttatatatatatcctcttccttattttagttttgctttttcctattttccataattaagtgccgtttacaaagtggcatcaaaaaattgaagcaggccaggcatggtggctcatgcctgtaatcccaacagtttgggaggctgagggcaggtggatcacttgagatcaggagttcgtgaccagcctggccaacatggtgaaagcccatctctactaaaaatataaaaattagccgggcgtggtggcatgtgcctgtaatcgcagctacttgggaggctaagacaggagaattgcttgaacctgggaggtggaggttgcaatgagctgagatcgcgccactgcactccagcctgggcaacagtgagacaccgtctcaaaaaaaaaaaaggttaggaatcacaaattgtgtaaatatatagcaactttaagaagagagaagaatgcttataacctagtgaatatttctgctgagccttagttgtcttgtctaaaggaaaaaagagggaattgtagaataaaagtatttgttagtggaaattattgacctgaaaccatatcatattgttagtgtaactgaatgtatcagaaattgttcctatgtaggtattctgtgaaactggtttctaaaatgttacaggaaactgtttcctttttttttgtttgtttgtttaagtggaggtgggaggaggtagggaagaggtctgaatattaaaatatgtttatgttcatgtgttcataatacgttcctttttctctctgtgtgtgtataaaagtgccttgctcatgaatgcatttttgctattcacttcgaaaggaagcctttccccagcttggcagctgaataaaccaatagctttgtacatgctgaa

SEQ ID NO: 125080 - DNA, 868 bp, Homo sapiens
  Payload ID: 4555
  Gene Symbol: DCAF17
  Gene Name: DDB1 and CUL4 associated factor 17
  ENST ID: ENST00000339506
  CDS Start-End: 1-815
gcaggcattcaacaacatgttttgctgtaccttgcagtgttccgagttctacctttttcacttgtagggattctagagatcaacaaaaagacatgccaccactgctctttgaggtgtcatccctggagaatgcttttcagattggaggccatccttggcactacatcgtcacacctaataagaagaaacagaaaggagttttccatatttgtgccctaaaagacaattccctggcaaaaaatgggatccaagaaatggattgttgttctctagaatctgactggatctatttccatcctgatgcttctggtagaataatacatgttggtccaaatcaagtcaaagttttgaagctaactgaaatagaaaataatagttctcagcatcagatctctgaagattttgtcattttggccaacagggagaaccataaaaatgaaaatgtactcactgttacagcttctggacgggtggtaaaaaaaagttttaaccttctggatgatgacccagaacaagagactttcaaaattgtggactatgaagatgagttagatttgctttctgtggtagctgttactcaaatagatgctgaaggaaaagctcacctggatttccactgtaatgaatatggaactttacttaaaagcattccactagtggagtcatgggatgtgacatatagccatgaagtctactttgacagagacttggtgctacacatagagcagaaacccaacagagtcttcagctgctatgtttaccagatgatatgtgacactggggaagaagaagaaaccataaacagaagctgttaaaaagagtgagataattgtaacctaagagacttttagccaaacaccccagcagc

SEQ ID NO: 125081 - DNA, 5828 bp, Homo sapiens
  Payload ID: 4555
  Gene Symbol: DCAF17
  Gene Name: DDB1 and CUL4 associated factor 17
  Uniprot ID: Q5H9S7
  ENST ID: ENST00000375255
  CDS Start-End: 328-1890
actaggaactacatttcccggtgagagagcggctccggccggccgcgcggtaccggagcgtcgcactgtcagcggccagagagcctggggcagatcgaaaagggagtgcttcttcccttctctccgcgctctggcggtgcaagcggctctgctttccctcgccccgccgtcgggtgctccctgcccgcctccccgtgtcagctttccctgggccccgccgggaaagtctgggcctcgaaattcgaaggcagcggcggctgcccagcacgggagtgtggggcgcgccactcggcggcccagcctacccagggcccggcccgcgcctccatgggcccgacccggaagcccaacgtgtgcagccggctgagtcgccgggcgctgggctgcttctcgcgcgacgcaggcgtggtgcagaggaccaacctgggcatcctgcgggcgctggtgtgccaggaaagtactaaatttaagaatgtctggacaactcattccaggtcacctatagcctatgagagaggaagaatatattttgacaattatcggcgctgtgtcagcagtgttgcatctgagccaagaaaactttatgaaatgccaaaatgttccaaatcagaaaaaatagaggatgctttattatgggaatgcccagtgggagatatacttcccaattcatcagattataagtcctcactcatagcactgactgctcataattggctacttcgtatatcagcaactacgggaaaaatccttgagaaaatatatcttgcaccttattgcaaattcagatacttgagctgggacactcctcaagaagtcattgcagttaagtcagctcagaacagaggctcagcagtggcccggcaggcaggcattcaacaacatgttttgctgtaccttgcagtgttccgagttctacctttttcacttgtagggattctagagatcaacaaaaagatttttgggaacgttacagatgctaccttgtctcatggaatactgattgtgatgtacagctcaggactggtcagactctatagcttccaaaccatcgctgaacagttcatgcaacagaaacttgacttagggtgtgcatgcagatggggtgggactactggaactgtaggagaggctccttttggcattccttgtaatattaaaatcacagacatgccaccactgctctttgaggtgtcatccctggagaatgcttttcagattggaggccatccttggcactacatcgtcacacctaataagaagaaacagaaaggagttttccatatttgtgccctaaaagacaattccctggcaaaaaatgggatccaagaaatggattgttgttctctagaatctgactggatctatttccatcctgatgcttctggtagaataatacatgttggtccaaatcaagtcaaagttttgaagctaactgaaatagaaaataatagttctcagcatcagatctctgaagattttgtcattttggccaacagggagaaccataaaaatgaaaatgtactcactgttacagcttctggacgggtggtaaaaaaaagttttaaccttctggatgatgacccagaacaagagactttcaaaattgtggactatgaagatgagttagatttgctttctgtggtagctgttactcaaatagatgctgaaggaaaagctcacctggatttccactgtaatgaatatggaactttacttaaaagcattccactagtggagtcatgggatgtgacatatagccatgaagtctactttgacagagacttggtgctacacatagagcagaaacccaacagagtcttcagctgctatgtttaccagatgatatgtgacactggggaagaagaagaaaccataaacagaagctgttaaaaagagtgagataattgtaacctaagagacttttagccaaacaccccagcagctgcgtccaatccattttattatctgcatggcacattctccagtattttccaaaaaagtcttgtgttgacttcagatgactatgacttcttttttaaactcttgctgtaaaagatggtgaggacttcattttttttaaaggttttttagaatactgttccaagaagtttagtgttttgcagctttgagctaggtggtaatgcaaatataaaatgctgggaacagaaaaggacaggttaattccaattgttgaggagttaagtcattgatggggtgggtcattgatgagttcttaaaggatggtatggaattttgtttgttaaggctaggaaagacagggagagacaaaagtaaacatgcagaaagaaatcttatatcctctataccaaactttgcttaaggatgagaaatgagatgtgttatgtgagaacattattttgagcccaaaatgtgtcatcacagtttttaaaaatcttatatatgtatttatatgtgtttcgtatttgtatatagtatcaggaattggttctagttcccaaattatcttttcttccttggttttgttctcttggcttgatgttcacattgaatatttgtgtttctatataggctaatgtaaaagattccaagcaaaccttaagtgaaattgttttctgatttgcatcctgtttagctcttaatgtatctaaggatgttctcatctcaccattctactcatttagtgagttttctgatcttgtttaggcaatatttgcatacttatgcaataagataaaggtacccttgcctgcagtagttctgtttcctgtagaaaagtggataaagagtcccagaagaagttcttactagcttgggagttacctgattaaccagagaaaatttttggcttacttatggaacaagcattatttcttctttgttaggaaagatctaaatatggtccttgacttttaataatcattctttagaatgttaaataaaggcaacccaagtaaagggagaaaatgtttctttgtgcttcctgtttgagaaattcagttgcttccatttcgcatgttctgcacatttatccgatgtaacctcaaaagaataactggtaataagggaaggaaacagcagcaacaatcattgctgattcaagtttaaggttaaaatatggaatttttagcttggatgatttatattaaaatctttccattttttttttcagttttggcttgatgccatgttaagaatgatgtgaattcttcccagttctgccctggtgctagacattgccccatactttcaattagacactagctgtatctaaatagtcccactcagtaaacttacatcttgaaaaacaagaccagtaagaggccagtgaaagtactaaagaaagaaaccaatgttgtgtgagtttcaaagcagctgcaatgctgtgtaaaagtagagtgttcattctccatttccaagagtgtttcagaataggatgtcttaagacttcagtcatgtcagagatttttttttttaggtgattattgagtttctccttctcctttaagtcatcaccttccttttatgaaatgatagtaaggaactcgtctattctgaaaggcatttgagaaatagctgaattcctggctgcttttttgctgggggtagatggtggaatacttctggtctagatataacttaccactaagaaacccccagtatgtcaccactgcctaaatctaactagaccagggtccaaatgccatccaggccaggcaggaaatatacctcatgtgaaagacagtaaggagttgtgggcagtgtaacaaacaggagagctatgccccaactaaaaggagcagctgctactgcttagtttcagccagttgcaacagtatgtgggaatgtaggctgcatggttgttaacaagatagatggtaaaaagatgccagaagatacagaagatagcaaagaatgtggggaatttggataccacacatagcgagagacaatgaagcatgcttcccagctcgccagagtgtcacacagctgctcattctgccacctgccagacattaatgtcttcctgccctacctaaaccccctctttacctgatattttaattcgagactctagctacatgcccacctacttaacaggtactagtgacaggtacaaaacattatgggtaacaattctgagtgtttaatgcaagcccaggtgaagcagggtagcttccatcagcaggtacagacgttacgctgaaaagaggtgcattctgcattgcactcctggatctaagtttctgcattctcagagcatcaatgcagcaagcttattgttcctcaattttttacaatatttatcacaactctgggagaaaacaaaacaaatcctatcctatttactatttgtgctacctagtgaggagataccgctctgtttagacaaattaaggcacttcacattcttccaccaattgaaagttttgtatcttacagttctttttttaaataatatatttattgagcactttctatctactagtcactgtgatacagtataagtaaagtgggttgtctcatttaatattcagaataaccacatgaagtatgaactgccattatctttcccctttgtacaaatgaggaaagtgaggctcacagaagttaattggcccagggtcccacaactagtcagtgcagaggtgggaaacataaccagatttgttcggcatgaacttgtgccaaatttcctccaaagttctcaaaaggcaaggcatgttattttatcccaatttagcataccaacaactataatactagatatgtaggaaagtgcttaataatcgttttttactgatgattcagtgtctaaattttgaacaaatttgggtaagatacaagtcacacataaattgacagaaaatgtagttcttcattcaatggttagcagtcattaaaaggtactttccctttgtttgtggtgataatcagtattagtagttttcatattatttggcttccatattaatcatttttatattttcttctccttcttaccatgtttacttatatcatccatcttttagaatcccagggagctaatttctggtccctgtgttgctatcaaatctgtatcttgcagaaagaataatttatttcaaacaagggacatacaatagaaagataagacctactgaggtctttttcccatcattttattatgaaaaatgttcaaacatacagtaaaattgaaagaattttatagtaaatactgaccacggggattctacatcttactctacttgttttattattttcctatccagcgtactttttgatggatttcaaaataaattgcagttgctgatatacttccccctagtacttcaactgcagattattaactagagtttagtatttatttagtttttaaatttttttgatttaagatttacctgcaataaaatgtacaaatcttaagtataaatttactgagttcttgcagacatatacacctgtgtaacccaaaccctttccaaaatttagaccattgcaatcatcttcagaaagtttcctaaatccctctcccagtctatcccctccccacccctcaggtataactactgttctcattcttttatatcaaaggttaaatttacctgttctaaacttcatatgagtgaaattatacaaaatgtaatgcttctttcacttagcataatgtttttgagatttattcatgttgttgcatgtgtcagtgattcatttctttttattgctgagtattctttcgtatgaatatatcacagtttgtttttttatctttctgttgatggacactgggctctttctgcttgttttttactgttatgaataaagctgctatgaacattcttagacaa

SEQ ID NO: 125082 - DNA, 758 bp, Homo sapiens
  Payload ID: 4555
  Gene Symbol: DCAF17
  Gene Name: DDB1 and CUL4 associated factor 17
  ENST ID: ENST00000436317
  CDS Start-End: 1-385
gaggaccaacctgggcatcctgcgggcgctggtgtgccaggaaagtactaaatttaagaatgtctggacaactcattccaggtcacctatagcctatgagagaggaagaatatattttgacaattatcggcgctgtgtcagcagtgttgcatctgagccaagaaaactttatgaaatgccaaaatgttccaaatcagaaaaaatagaggatgctttattatgggaatgcccagtgatggagtcttctgtcgccaggctggagtgcagtggcacgatctcagctcaccgcaacctccacctcccgggttcaagtgattctcctgcctcagcctcccaagtagctgggattatagggagatatacttcccaattcatcagattataagtcctcactcatagcactgactgctcataattggctacttcgtatatcagcaactacgggaaaaatccttgagaaaatatatcttgcaccttattgcaaattcagatacttgagctgggacactcctcaagaagtcattgcagttaagtcagctcagaacagaggctcagcagtggcccggcaggcaggcattcaacaacatgttttgctgtaccttgcagtgttccgagttctacctttttcacttgtagggattctagagatcaacaaaaagatttttgggaacgttacagatgctaccttgtctcatggaatactgattgtgatgtacagctcaggactggtcagactctatagcttccaaaccatcgct

SEQ ID NO: 125083 - DNA, 833 bp, Homo sapiens
  Payload ID: 4555
  Gene Symbol: DCAF17
  Gene Name: DDB1 and CUL4 associated factor 17
  ENST ID: ENST00000431110
  CDS Start-End: 1-668
gagaaattaaattaaatgacttctgtaaagccagtgaagttaatatatccaagttgatgttcgttcccagtgcttctggatataaggcaaaaaatgggatccaagaaatggattgttgttctctagaatctgactggatctatttccatcctgatgcttctggtagaataatacatgttggtccaaatcaagtcaaagttttgaagctaactgaaatagaaaataatagttctcagcatcagatctctgaagattttgtcattttggccaacagggagaaccataaaaatgaaaatgtactcactgttacagcttctggacgggtggtaaaaaaaagttttaaccttctggatgatgacccagaacaagagactttcaaaattgtggactatgaagatgagttagatttgctttctgtggtagctgttactcaaatagatgctgaaggaaaagctcacctggatttccactgtaatgaatatggaactttacttaaaagcattccactagtggagtcatgggatgtgacatatagccatgaagtctactttgacagagacttggtgctacacatagagcagaaacccaacagagtcttcagctgctatgtttaccagatgatatgtgacactggggaagaagaagaaaccataaacagaagctgttaaaaagagtgagataattgtaacctaagagacttttagccaaacaccccagcagctgcgtccaatccattttattatctgcatggcacattctccagtattttccaaaaaagtcttgtgttgacttcagatgactatgacttcttttttaaactcttgctgtaaaag

SEQ ID NO: 125084 - DNA, 5623 bp, Homo sapiens
  Payload ID: 4555
  Gene Symbol: DCAF17
  Gene Name: DDB1 and CUL4 associated factor 17
  ENST ID: ENST00000539783
  CDS Start-End: 328-1689
actaggaactacatttcccggtgagagagcggctccggccggccgcgcggtaccggagcgtcgcactgtcagcggccagagagcctggggcagatcgaaaagggagtgcttcttcccttctctccgcgctctggcggtgcaagcggctctgctttccctcgccccgccgtcgggtgctccctgcccgcctccccgtgtcagctttccctgggccccgccgggaaagtctgggcctcgaaattcgaaggcagcggcggctgcccagcacgggagtgtggggcgcgccactcggcggcccagcctacccagggcccggcccgcgcctccatgggcccgacccggaagcccaacgtgtgcagccggctgagtcgccgggcgctgggctgcttctcgcgcgacgcaggcgtggtgcagaggaccaacctgggcatcctgcgggcgctggtgtgccaggaaagtactaaatttaagaatgtctggacaactcattccaggtcacctatagcctatgagagaggaagaatatattttgacaattatcggcgctgtgtcagcagtgttgcatctgagccaagaaaactttatgaaatgccaaaatgttccaaatcagaaaaaatagaggatgctttattatgggaatgcccagtgggagatatacttcccaattcatcagattataagtcctcactcatagcactgactgctcataattggctacttcgtatatcagcaactacgggaaaaatccttgagaaaatatatcttgcaccttattgcaaattcagatacttgagctgggacactcctcaagaagtcattgcagttaagtcagctcagaacagaggctcagcagtggcccggcaggcaggcattcaacaacatgttttgctgtaccttgcagtgttccgagttctacctttttcacttgtagggattctagagatcaacaaaaagatttttgggaacgttacagatgctaccttgtctcatggaatactgattgtgatgtacagctcaggactggtcagactctatagcttccaaaccatcgctgaacagttcatgcaacagaaacttgacttagggtgtgcatgcagatggggtgggactactggaactgtaggagaggctccttttggcattccttgtaatattaaaatcacagacatgccaccactgctctttgaggtgtcatccctggagaatgcttttcagattggaggccatccttggcactacatcgtcacacctaataagaagaaacagaaaggagttttccatatttgtgccctaaaagacaattccctgaatgaaaatgtactcactgttacagcttctggacgggtggtaaaaaaaagttttaaccttctggatgatgacccagaacaagagactttcaaaattgtggactatgaagatgagttagatttgctttctgtggtagctgttactcaaatagatgctgaaggaaaagctcacctggatttccactgtaatgaatatggaactttacttaaaagcattccactagtggagtcatgggatgtgacatatagccatgaagtctactttgacagagacttggtgctacacatagagcagaaacccaacagagtcttcagctgctatgtttaccagatgatatgtgacactggggaagaagaagaaaccataaacagaagctgttaaaaagagtgagataattgtaacctaagagacttttagccaaacaccccagcagctgcgtccaatccattttattatctgcatggcacattctccagtattttccaaaaaagtcttgtgttgacttcagatgactatgacttcttttttaaactcttgctgtaaaagatggtgaggacttcattttttttaaaggttttttagaatactgttccaagaagtttagtgttttgcagctttgagctaggtggtaatgcaaatataaaatgctgggaacagaaaaggacaggttaattccaattgttgaggagttaagtcattgatggggtgggtcattgatgagttcttaaaggatggtatggaattttgtttgttaaggctaggaaagacagggagagacaaaagtaaacatgcagaaagaaatcttatatcctctataccaaactttgcttaaggatgagaaatgagatgtgttatgtgagaacattattttgagcccaaaatgtgtcatcacagtttttaaaaatcttatatatgtatttatatgtgtttcgtatttgtatatagtatcaggaattggttctagttcccaaattatcttttcttccttggttttgttctcttggcttgatgttcacattgaatatttgtgtttctatataggctaatgtaaaagattccaagcaaaccttaagtgaaattgttttctgatttgcatcctgtttagctcttaatgtatctaaggatgttctcatctcaccattctactcatttagtgagttttctgatcttgtttaggcaatatttgcatacttatgcaataagataaaggtacccttgcctgcagtagttctgtttcctgtagaaaagtggataaagagtcccagaagaagttcttactagcttgggagttacctgattaaccagagaaaatttttggcttacttatggaacaagcattatttcttctttgttaggaaagatctaaatatggtccttgacttttaataatcattctttagaatgttaaataaaggcaacccaagtaaagggagaaaatgtttctttgtgcttcctgtttgagaaattcagttgcttccatttcgcatgttctgcacatttatccgatgtaacctcaaaagaataactggtaataagggaaggaaacagcagcaacaatcattgctgattcaagtttaaggttaaaatatggaatttttagcttggatgatttatattaaaatctttccattttttttttcagttttggcttgatgccatgttaagaatgatgtgaattcttcccagttctgccctggtgctagacattgccccatactttcaattagacactagctgtatctaaatagtcccactcagtaaacttacatcttgaaaaacaagaccagtaagaggccagtgaaagtactaaagaaagaaaccaatgttgtgtgagtttcaaagcagctgcaatgctgtgtaaaagtagagtgttcattctccatttccaagagtgtttcagaataggatgtcttaagacttcagtcatgtcagagatttttttttttaggtgattattgagtttctccttctcctttaagtcatcaccttccttttatgaaatgatagtaaggaactcgtctattctgaaaggcatttgagaaatagctgaattcctggctgcttttttgctgggggtagatggtggaatacttctggtctagatataacttaccactaagaaacccccagtatgtcaccactgcctaaatctaactagaccagggtccaaatgccatccaggccaggcaggaaatatacctcatgtgaaagacagtaaggagttgtgggcagtgtaacaaacaggagagctatgccccaactaaaaggagcagctgctactgcttagtttcagccagttgcaacagtatgtgggaatgtaggctgcatggttgttaacaagatagatggtaaaaagatgccagaagatacagaagatagcaaagaatgtggggaatttggataccacacatagcgagagacaatgaagcatgcttcccagctcgccagagtgtcacacagctgctcattctgccacctgccagacattaatgtcttcctgccctacctaaaccccctctttacctgatattttaattcgagactctagctacatgcccacctacttaacaggtactagtgacaggtacaaaacattatgggtaacaattctgagtgtttaatgcaagcccaggtgaagcagggtagcttccatcagcaggtacagacgttacgctgaaaagaggtgcattctgcattgcactcctggatctaagtttctgcattctcagagcatcaatgcagcaagcttattgttcctcaattttttacaatatttatcacaactctgggagaaaacaaaacaaatcctatcctatttactatttgtgctacctagtgaggagataccgctctgtttagacaaattaaggcacttcacattcttccaccaattgaaagttttgtatcttacagttctttttttaaataatatatttattgagcactttctatctactagtcactgtgatacagtataagtaaagtgggttgtctcatttaatattcagaataaccacatgaagtatgaactgccattatctttcccctttgtacaaatgaggaaagtgaggctcacagaagttaattggcccagggtcccacaactagtcagtgcagaggtgggaaacataaccagatttgttcggcatgaacttgtgccaaatttcctccaaagttctcaaaaggcaaggcatgttattttatcccaatttagcataccaacaactataatactagatatgtaggaaagtgcttaataatcgttttttactgatgattcagtgtctaaattttgaacaaatttgggtaagatacaagtcacacataaattgacagaaaatgtagttcttcattcaatggttagcagtcattaaaaggtactttccctttgtttgtggtgataatcagtattagtagttttcatattatttggcttccatattaatcatttttatattttcttctccttcttaccatgtttacttatatcatccatcttttagaatcccagggagctaatttctggtccctgtgttgctatcaaatctgtatcttgcagaaagaataatttatttcaaacaagggacatacaatagaaagataagacctactgaggtctttttcccatcattttattatgaaaaatgttcaaacatacagtaaaattgaaagaattttatagtaaatactgaccacggggattctacatcttactctacttgttttattattttcctatccagcgtactttttgatggatttcaaaataaattgcagttgctgatatacttccccctagtacttcaactgcagattattaactagagtttagtatttatttagtttttaaatttttttgatttaagatttacctgcaataaaatgtacaaatcttaagtataaatttactgagttcttgcagacatatacacctgtgtaacccaaaccctttccaaaatttagaccattgcaatcatcttcagaaagtttcctaaatccctctcccagtctatcccctccccacccctcaggtataactactgttctcattcttttatatcaaaggttaaatttacctgttctaaacttcatatgagtgaaattatacaaaatgtaatgcttctttcacttagcataatgtttttgagatttattcatgttgttgcatgtgtcagtgattcatttctttttattgctgagtattctttcgtatgaatatatcacagtttgtttttttatctttctgttgatggacactgggctctttctgcttgttttttactgttatgaataaagctgctatgaacattcttag

SEQ ID NO: 125085 - DNA, 975 bp, Homo sapiens
  Payload ID: 4555
  Gene Symbol: DCAF17
  Gene Name: DDB1 and CUL4 associated factor 17
  Uniprot ID: Q5H9S7
  ENST ID: ENST00000611110
  CDS Start-End: 200-922
aggcaggcattcaacaacatgttttgctgtaccttgcagtgttccgagttctacctttttcacttgtagggattctagagatcaacaaaaagatttttgggaacgttacagatgctaccttgtctcatggaatactgattgtgatgtacagctcaggactggtcagactctatagcttccaaaccatcgctgaacagacatgccaccactgctctttgaggtgtcatccctggagaatgcttttcagattggaggccatccttggcactacatcgtcacacctaataagaagaaacagaaaggagttttccatatttgtgccctaaaagacaattccctggcaaaaaatgggatccaagaaatggattgttgttctctagaatctgactggatctatttccatcctgatgcttctggtagaataatacatgttggtccaaatcaagtcaaagttttgaagctaactgaaatagaaaataatagttctcagcatcagatctctgaagattttgtcattttggccaacagggagaaccataaaaatgaaaatgtactcactgttacagcttctggacgggtggtaaaaaaaagttttaaccttctggatgatgacccagaacaagagactttcaaaattgtggactatgaagatgagttagatttgctttctgtggtagctgttactcaaatagatgctgaaggaaaagctcacctggatttccactgtaatgaatatggaactttacttaaaagcattccactagtggagtcatgggatgtgacatatagccatgaagtctactttgacagagacttggtgctacacatagagcagaaacccaacagagtcttcagctgctatgtttaccagatgatatgtgacactggggaagaagaagaaaccataaacagaagctgttaaaaagagtgagataattgtaacctaagagacttttagccaaacaccccagcagc

SEQ ID NO: 125086 - DNA, 1940 bp, Homo sapiens
  Payload ID: 4556
  Gene Symbol: DCAF4
  Gene Name: DDB1 and CUL4 associated factor 4
  ENST ID: ENST00000353777
  CDS Start-End: 176-1153
tgagaaggaaagaacggccgctatagccctatcggctgctacaacaccaaaacgcatccacctaactggctgacgctacaccttggtctttccgggtccttgcacgcttcgctccaactcctgcagagctgagccggaggggaatccggaagggacacgctgaacaggaacagaaatgaataaaagtcgctggcagagtagaagacgacatgggagaagaagccaccagcagaacccttggttcagactccgtgattctgaagacaggtctgactcccgggcagcacagcccgctcacgattccggccacggtgatgacgagtctccgtcaacctcgtctggcacagctgggacctcctctgtgccagagctacctgggttttactttgaccctgaaaagaaacgctacttccgcttgctccctggacataacaactgcaaccccctgacgaaagagagcatccggcagaaggagatggagagcaagagactgcggctgctccaggaagaagacagacggaaaaaggcagataccaacagtgaccggctcttcacagtgaacgatgttaaagttggaggctccaagtatggtatcatcaacctgcaaagtctgaagacccctacgctcaaggtgttcatgcacgaaaacctctacttcaccaaccggaaggctcctctgctgtttaatggctgccgctctggggaaatctttgccattgatctgcgttgtggaaatcaaggcaagggatggaaggccacccgcctgtttcatgattcagcagtgacctctgtgcggatcctccaagatgagcaatacctgatggcttcagacatggctggaaagatcaagctgtgggacctgaggaccacgaagtgcgtaaggcagtacgaaggccacgtgaatgagtacgcctacctgcccctgcatgtgcacgaggaagaaggaatcctggtggcagtgggccaggactgctacacgagaatctggagcctccacgatgcccgcctactgagaaccataccctccccgtaccctgcctccaaggccgacattcccagtgtggccttctcgtcgcggctggggggctcccggggcgcgccggggctgctcatggctgtcgggcaggacctttactgttactcctacagctaattctgcagggcacagcccagagccatgtggatttgacttacgggagtaaagcgtaactttttactgcatctaatgagggtgttttaagtgacactcagtgtacacagatcccatcctctggctgctaggagagaagtgctgaatgttccgtgtggagatgctcaggaaagttatttgagttaaattgctggctgagagagcttggaagtccttttcataaaaggtacctctttccttttcttattgaattcttagaacttagttaaccctccctgccttttcttaacaaaaaggacttttctaaggactgaagattggcaaaaacgaaaagcttcttcctccaagagcccattgaagaagcccagtgatgagacggtgagatggtttgagtcctcggtgcctgggtagcaggaagaaagacctgcatcctgcatctgtacttggggaagccagcggagaggacggggaggttacttctctaagtttctgcagaaatattgaaggctggagtttggaatccttaaacttggccttctcaaactcagcagcagatctccgggattctgctgttattatccaaaggcgttggaaggaaagatggatcttcttacatgctagaagttttaaacggtccttaacatgcctttgttcaagcaccttccagaatgtaaggttcagcagctctggtttctattacggtgacttgaatgtcagattcaagggcccggcgtcaaaggaaattggttttgactttttgtaatctaggagcgacagttcgtgagatgtt

SEQ ID NO: 125087 - DNA, 2024 bp, Homo sapiens
  Payload ID: 4556
  Gene Symbol: DCAF4
  Gene Name: DDB1 and CUL4 associated factor 4
  Uniprot ID: Q8WV16
  ENST ID: ENST00000358377
  CDS Start-End: 221-1708
atgagatcgtccctattgacgtcgacagacagaagccgcgtccagtgagaaggaaagaacggccgctatagccctatcggctgctacaacaccaaaacgcatccacctaactggctgacgctacaccttggtctttccgggtccttgcacgcttcgctccaactcctgcagagctgagccggaggggaatccggaagggacacgctgaacaggaacagaaatgaataaaagtcgctggcagagtagaagacgacatgggagaagaagccaccagcagaacccttggttcagactccgtgattctgaagacaggtctgactcccgggcagcacagcccgctcacgattccggccacggtgatgacgagtctccgtcaacctcgtctggcacagctgggacctcctctgtgccagagctacctgggttttactttgaccctgaaaagaaacgctacttccgcttgctccctggacataacaactgcaaccccctgacgaaagagagcatccggcagaaggagatggagagcaagagactgcggctgctccaggaagaagacagacggaaaaagattgccaggatgggatttaatgcatcttccatgctacgaaaaagccagctgggttttctcaacgtcaccaattactgccatttagcccacgagctgcgtctcagctgcatggagaggaaaaaggtccagattcgaagcatggatccctccgccttggcaagcgaccgatttaacctcatactggcagataccaacagtgaccggctcttcacagtgaacgatgttaaagttggaggctccaagtatggtatcatcaacctgcaaagtctgaagacccctacgctcaaggtgttcatgcacgaaaacctctacttcaccaaccggaaggtgaattcggtgtgctgggcctcgctgaatcacttggattcccacattctgctatgcctcatgggactcgcagagactccaggctgtgccaccctgctcccagcatcactgttcgtcaatagtcacccaggaatagaccggcctggcatgctctgcagtttccggatccctggtgcctggtcctgtgcctggtccctgaatatccaagcaaataactgcttcagtacaggcttgtctcggcgggtcctgttgaccaacgtggtgacgggacaccggcagtcctttgggaccaacagtgatgtcttggcccagcagtttgctctcatggctcctctgctgtttaatggctgccgctctggggaaatctttgccattgatctgcgttgtggaaatcaaggcaagggatggaaggccacccgcctgtttcatgattcagcagtgacctctgtgcggatcctccaagatgagcaatacctgatggcttcagacatggctggaaagatcaagctgtgggacctgaggaccacgaagtgcgtaaggcagtacgaaggccacgtgaatgagtacgcctacctgcccctgcatgtgcacgaggaagaaggaatcctggtggcagtgggccaggactgctacacgagaatctggagcctccacgatgcccgcctactgagaaccataccctccccgtaccctgcctccaaggccgacattcccagtgtggccttctcgtcgcggctggggggctcccggggcgcgccggggctgctcatggctgtcgggcaggacctttactgttactcctacagctaattctgcagggcacagcccagagccatgtggatttgacttacgggagtaaagcgtaactttttactgcatctaatgagggtgttttaagtgacactcagtgtacacagatcccatcctctggctgctaggagagaagtgctgaatgttccgtgtggagatgctcaggaaagttatttgagttaaattgctggctgagagagcttggaagtccttttcataaaaggtacctctttccttttcttattgaattcttagaacttagttaaccctccctgccttttcttaacaaaaaggacttttctaaggactgaagatt

SEQ ID NO: 125088 - DNA, 2360 bp, Homo sapiens
  Payload ID: 4556
  Gene Symbol: DCAF4
  Gene Name: DDB1 and CUL4 associated factor 4
  Uniprot ID: Q8WV16
  ENST ID: ENST00000394234
  CDS Start-End: 275-1462
gcacgcttcgctccaactcctgcagagctgagccggaggggaatccggaagggacacgctgaacaggtctgactcccgggcagcacagcccgctcacgattccggccacggtgatgacgagtctccgtcaacctcgtctggcacagctgggacctcctctgtgccagagctacctgggttttactttgaccctgaaaagaaacgctacttccgcttgctccctggacataacaactgcaaccccctgacgaaagagagcatccggcagaaggagatggagagcaagagactgcggctgctccaggaagaagacagacggaaaaagattgccaggatgggatttaatgcatcttccatgctacgaaaaagccagctgggttttctcaacgtcaccaattactgccatttagcccacgagctgcgtctcagctgcatggagaggaaaaaggtccagattcgaagcatggatccctccgccttggcaagcgaccgatttaacctcatactggcagataccaacagtgaccggctcttcacagtgaacgatgttaaagttggaggctccaagtatggtatcatcaacctgcaaagtctgaagacccctacgctcaaggtgttcatgcacgaaaacctctacttcaccaaccggaaggtgaattcggtgtgctgggcctcgctgaatcacttggattcccacattctgctatgcctcatgggactcgcagagactccaggctgtgccaccctgctcccagcatcactgttcgtcaatagtcacccaggaatagaccggcctggcatgctctgcagtttccggatccctggtgcctggtcctgtgcctggtccctgaatatccaagcaaataactgcttcagtacaggcttgtctcggcgggtcctgttgaccaacgtggtgacgggacaccggcagtcctttgggaccaacagtgatgtcttggcccagcagtttgctctcatggctcctctgctgtttaatggctgccgctctggggaaatctttgccattgatctgcgttgtggaaatcaaggcaagggatggaaggccacccgcctgtttcatgattcagcagtgacctctgtgcggatcctccaagatgagcaatacctgatggcttcagacatggctggaaagatcaagctgtgggacctgaggaccacgaagtgcgtaaggcagtacgaaggccacgtgaatgagtacgcctacctgcccctgcatgtgcacgaggaagaaggaatcctggtggcagtgggccaggactgctacacgagaatctggagcctccacgatgcccgcctactgagaaccataccctccccgtaccctgcctccaaggccgacattcccagtgtggccttctcgtcgcggctggggggctcccggggcgcgccggggctgctcatggctgtcgggcaggacctttactgttactcctacagctaattctgcagggcacagcccagagccatgtggatttgacttacgggagtaaagcgtaactttttactgcatctaatgagggtgttttaagtgacactcagtgtacacagatcccatcctctggctgctaggagagaagtgctgaatgttccgtgtggagatgctcaggaaagttatttgagttaaattgctggctgagagagcttggaagtccttttcataaaaggtacctctttccttttcttattgaattcttagaacttagttaaccctccctgccttttcttaacaaaaaggacttttctaaggactgaagattggcaaaaacgaaaagcttcttcctccaagagcccattgaagaagcccagtgatgagacggtgagatggtttgagtcctcggtgcctgggtagcaggaagaaagacctgcatcctgcatctgtacttggggaagccagcggagaggacggggaggttacttctctaagtttctgcagaaatattgaaggctggagtttggaatccttaaacttggccttctcaaactcagcagcagatctccgggattctgctgttattatccaaaggcgttggaaggaaagatggatcttcttacatgctagaagttttaaacggtccttaacatgcctttgttcaagcaccttccagaatgtaaggttcagcagctctggtttctattacggtgacttgaatgtcagattcaagggcccggcgtcaaaggaaattggttttgactttttgtaatctaggagcgacagttcgtgagatgtttattcagtgttaaagagcctgtttttctaccaaacaataaaaccaagagaagaatcatggtgtgacatgcacttctgtgaatgacttaggagatcatgagcttgggctgct

SEQ ID NO: 125089 - DNA, 1872 bp, Homo sapiens
  Payload ID: 4556
  Gene Symbol: DCAF4
  Gene Name: DDB1 and CUL4 associated factor 4
  ENST ID: ENST00000509320
  CDS Start-End: 102-326
gctacaccttggtctttccgggtccttgcacgcttcgctccaactcctgcagagctgagccggaggggaatccggaagggacacgctgaacaggaacagaaatgaataaaagtcgctggcagagtagaagacgacatgggagaagaagccaccagcagaacccttggttcagactccgtgattctgaagacaggtctgactcccgggcagcacagcccgctcacgattccggccacggtgatgacgagtctccgtcaacctcgtctggcacagctgggacctcctctgtgccagaaacgctacttccgcttgctccctggacataacaactgcaaccccctgacgaaagagagcatccggcagaaggagatggagagcaagagactgcggctgctccaggaagaagacagacggaaaaagattgccaggatgggatttaatgcatcttccatgctacgaaaaagccagctgggttttctcaacgtcaccaattactgccatttagcccacgagctgcgtctcagctgcatggagaggaaaaaggtccagattcgaagcatggatccctccgccttggcaagcgaccgatttaacctcatactgataccaacagtgaccggctcttcacagtgaacgatgttaaagttggaggctccaagtatggtatcatcaacctgcaaagtctgaagacccctacgctcaaggtgttcatgcacgaaaacctctacttcaccaaccggaaggtgaattcggtgtgctgggcctcgctgaatcacttggattcccacattctgctatgcctcatgggactcgcagagactccaggctgtgccaccctgctcccagcatcactgttcgtcaatagtcacccagcaggaatagaccggcctggcatgctctgcagtttccggatccctggtgcctggtcctgtgcctggtccctgaatatccaagcaaataactgcttcagtacaggcttgtctcggcgggtcctgttgaccaacgtggtgacgggacaccggcagtcctttgggaccaacagtgatgtcttggcccagcagtttgctctcatggctcctctgctgtttaatggctgccgctctggggaaatctttgccattgatctgcgttgtggaaatcaaggcaagggatggaaggccacccgcctgtttcatgattcagcagtgacctctgtgcggatcctccaagatgagcaatacctgatggcttcagacatggctggaaagatcaagctgtgggacctgaggaccacgaagtgcgtaaggcagtacgaaggccacgtgaatgagtacgcctacctgcccctgcatgtgcacgaggaagaaggaatcctggtggcagtgggccaggactgctacacgagaatctggagcctccacgatgcccgcctactgagaaccataccctccccgtaccctgcctccaaggccgacattcccagtgtggccttctcgtcgcggctggggggctcccggggcgcgccggggctgctcatggctgtcgggcaggacctttactgttactcctacagctaattctgcagggcacagcccagagccatgtggatttgacttacgggagtaaagcgtaactttttactgcatctaatgagggtgttttaagtgacactcagtgtacacagatcccatcctctggctgctaggagagaagtgctgaatgttccgtgtggagatgctcaggaaagttatttgagttaaattgctggctgagagagcttggaagtccttttcataaaaggtacctctttccttttcttattgaattcttagaacttagttaaccctccctgccttttcttaacaaaaaggacttttctaaggactgaagatt

SEQ ID NO: 125090 - DNA, 1521 bp, Homo sapiens
  Payload ID: 4556
  Gene Symbol: DCAF4
  Gene Name: DDB1 and CUL4 associated factor 4
  Uniprot ID: Q8WV16
  ENST ID: ENST00000509153
  CDS Start-End: 73-1380
acgcttcgctccaactcctgcagagctgagccggaggggaatccggaagggacacgctgaacaggaacagaaatgaataaaagtcgctggcagagtagaagacgacatgggagaagaagccaccagcagaacccttggttcagactccgtgattctgaagacaggtctgactcccgggcagcacagcccgctcacgattccggccacggtgatgacgagtctccgtcaacctcgtctggcacagctgggacctcctctgtgccagagctacctgggttttactttgaccctgaaaagaaacgctacttccgcttgctccctggacataacaactgcaaccccctgacgaaagagagcatccggcagaaggagatggagagcaagagactgcggctgctccaggaagaagacagacggaaaaaggcagataccaacagtgaccggctcttcacagtgaacgatgttaaagttggaggctccaagtatggtatcatcaacctgcaaagtctgaagacccctacgctcaaggtgttcatgcacgaaaacctctacttcaccaaccggaaggtgaattcggtgtgctgggcctcgctgaatcacttggattcccacattctgctatgcctcatgggactcgcagagactccaggctgtgccaccctgctcccagcatcactgttcgtcaatagtcacccagcaggaatagaccggcctggcatgctctgcagtttccggatccctggtgcctggtcctgtgcctggtccctgaatatccaagcaaataactgcttcagtacaggcttgtctcggcgggtcctgttgaccaacgtggtgacgggacaccggcagtcctttgggaccaacagtgatgtcttggcccagcagtttgctctcatggctcctctgctgtttaatggctgccgctctggggaaatctttgccattgatctgcgttgtggaaatcaaggcaagggatggaaggccacccgcctgtttcatgattcagcagtgacctctgtgcggatcctccaagatgagcaatacctgatggcttcagacatggctggaaagatcaagctgtgggacctgaggaccacgaagtgcgtaaggcagtacgaaggccacgtgaatgagtacgcctacctgcccctgcatgtgcacgaggaagaaggaatcctggtggcagtgggccaggactgctacacgagaatctggagcctccacgatgcccgcctactgagaaccataccctccccgtaccctgcctccaaggccgacattcccagtgtggccttctcgtcgcggctggggggctcccggggcgcgccggggctgctcatggctgtcgggcaggacctttactgttactcctacagctaattctgcagggcacagcccagagccatgtggatttgacttacgggagtaaagcgtaactttttactgcatctaatgagggtgttttaagtgacactcagtgtacacagatcccatcctctggctgctaggagagaagtgctg

SEQ ID NO: 125091 - DNA, 2896 bp, Homo sapiens
  Payload ID: 4556
  Gene Symbol: DCAF4
  Gene Name: DDB1 and CUL4 associated factor 4
  ENST ID: ENST00000553457
  CDS Start-End: 291-1292
gtcgctggcagagtagaagacgacatgggagaagaagccaccagcagaacccttggttcagactccgtgattctgaagacaggtctgactcccgggcagcacagcccgctcacgattccggccacggtgatgacgagtctccgtcaacctcgtctggcacagctgggacctcctctgtgccagagctacctgggttttactttgaccctgaaaagaaacgctacttccgcttgctccctggacataacaactgcaaccccctgacgaaagagagcatccggcagaaggagatggagagcaagagactgcggctgctccaggaagaagacagacggaaaaagattgccaggatgggatttaatgcatcttccatgctacgaaaaagccagctgggttttctcaacgtcaccaattactgccatttagcccacgagctgcgtctcagctgcatggagaggaaaaaggtccagattcgaagcatggatccctccgccttggcaagcgaccgatttaacctcatactggcagataccaacagtgaccggctcttcacagtgaacgatgttaaagttggaggctccaagtatggtatcatcaacctgcaaagtctgaagacccctacgctcaaggtgttcatgcacgaaaacctctacttcaccaaccggaaggtgaattcggtgtgctgggcctcgctgaatcacttggattcccacattctgctatgcctcatgggactcgcagagactccaggctgtgccaccctgctcccagcatcactgttcgtcaatagtcacccaggaatagaccggcctggcatgctctgcagtttccggatccctggtgcctggtcctgtgcctggtccctgaatatccaagcaaataactgcttcagtacaggcttgtctcggcgggtcctgttgaccaacgtggtgacgggacaccggcagtcctttgggaccaacagtgatgtcttggcccagcagtttgctctcatggctcctctgctgtttaatggctgccgctctggggaaatctttgccattgatctgcgttgtggaaatcaaggcaagggatggaaggccacccgcctgtttcatgattcagcagtgacctctgtgcggatcctccaagatgagcaatacctgatggcttcagacatggctggaaagatcaagctgtgggacctgaggaccacgaagtgcgtaaggcagtacgaaggccacgtgaatgagtacgcctacctgcccctgcatgtgcacgaggaagaaggaatcctggtggcaggtacttgaggaaggaaggggaagttccaccccatcaaatactgtctctcaggggcgatcccagcaacttcagcagcagagggaaaagttaccccaaaacagaactgaatcaaggggagtgtggacagctgggtggggagactaggagggaagtagaattagattatattagtaatcaggagtgtaaataaatgtccaccaggtggacagcctcatcccatgtcagtgggcaaacgtcacttcagaaacaggcaggtggggaggtcctggggagcctgggtttggagtttgagtggatttcatcaggccagcattattccaccacgcaactatcttatccaaaaacttgggctccctgttgtctctactcacatttccaccagaggatgctgagaaaagaagttatggtcattgtaaagattcttggccccggcccggcgcggtggctcacgcccgtaatcccaacactttgggaggccaaggagggtggatcacgaggtcaggagattgagaccatcctggccaacatggtgaaaccccatctctactaaaatacaaaaattaactgggcatggtggcacctgcctgtaatctctcagctactcggaagtcagaagcaggagaattgcttggaccaggaagtcggaggttgcagtgagccgatatcacgccactgcactccagcctggcaacagagcgagactccgtctcaaaataaataaataaataaaaaagatttgtggcccctttactaccatccctgtggctccatgatctgcagattaggagcagctatctggccactaagccccctggaagggagttaccagttgattacagatgatggtggctatagcgtaatcagacagtgtgcaggctcaatgctttcacactgaaatagtagctgctgacactgcagaatgtgttctcagtcttcaagaattgtcacctctactggtattcctatagaaagggcttataccccatggaacatttttgtggctaggaagcattactttgttaggacattcatagacttatttactattctcatcaacaccaggacttcgcctcctttttaagtcgatttttcacctgtttttatcacagaagagctcttgtgagctggatgatagagagagctcagccttgctgagaggcagatgcaggtagttaccagctgcagtaataaactgcagccgggattcagcttcagccaagatagcacttctggtcttagagccacacaagtgatcagaatcacaaatgtgaaatccatgactgcccaaggcctgtcctcttctcctgctgaaggtctccagtagtgtatatcatgtttctgggctgctgtaacccatgctgttgtgtgtcacagtcctcagaactggagccctgaagacttaaaccggtcctaggaactgaagcattaaaccagaaagagctgtggggagagttgtcaacctagcccatccccaggatgtaatgactttgacagatcttttactataacatgaaaagatcaggccaggtgtggtagctataattccagcacttagggagcttgaggccaggagtttaagaccagctggggcaacacagcaagaccctatctc

SEQ ID NO: 125092 - DNA, 2374 bp, Homo sapiens
  Payload ID: 4556
  Gene Symbol: DCAF4
  Gene Name: DDB1 and CUL4 associated factor 4
  Uniprot ID: Q8WV16
  ENST ID: ENST00000555042
  CDS Start-End: 66-1535
gctccaactcctgcagagctgagccggaggggaatccggaagggacacgctgaacaggaacagaaatgaataaaagtcgctggcagagtagaagacgacatgggagaagaagccaccagcagaacccttggttcagactccgtgattctgaagacaggtctgactcccgggcagcacagcccgctcacgattccggccacggtgatgacgagtctccgtcaacctcgtctggcacagctgggacctcctctgtgccagagctacctgggttttactttgaccctgaaaagaaacgctacttccgcttgctccctggacataacaactgcaaccccctgacgaaagagagcatccggcagaaggagatggagagcaagagactgcggctgctccaggaagaagacagacggaaaaagattgccaggatgggatttaatgcatcttccatgctacgaaaaagccagctgggttttctcaacgtcaccaattactgccatttagcccacgagctgcgtctcagctgcatggagaggaaaaaggtccagattcgaagcatggatccctccgccttggcaagcgaccgatttaacctcatactggcagataccaacagtgaccggctcttcacagtgaacgatgttaaagttggaggctccaagtatggtatcatcaacctgcaaagtctgaagacccctacgctcaaggtgttcatgcacgaaaacctctacttcaccaaccggaaggtgaattcggtgtgctgggcctcgctgaatcacttggattcccacattctgctatgcctcatgggactcgcagagactccaggctgtgccaccctgctcccagcatcactgttcgtcaatagtcacccagcaggaatagaccggcctggcatgctctgcagtttccggatccctggtgcctggtcctgtgcctggtccctgaatatccaagcaaataactgcttcagtacaggcttgtctcggcgggtcctgttgaccaacgtggtgacgggacaccggcagtcctttgggaccaacagtgatgtcttggctcctctgctgtttaatggctgccgctctggggaaatctttgccattgatctgcgttgtggaaatcaaggcaagggatggaaggccacccgcctgtttcatgattcagcagtgacctctgtgcggatcctccaagatgagcaatacctgatggcttcagacatggctggaaagatcaagctgtgggacctgaggaccacgaagtgcgtaaggcagtacgaaggccacgtgaatgagtacgcctacctgcccctgcatgtgcacgaggaagaaggaatcctggtggcagtgggccaggactgctacacgagaatctggagcctccacgatgcccgcctactgagaaccataccctccccgtaccctgcctccaaggccgacattcccagtgtggccttctcgtcgcggctggggggctcccggggcgcgccggggctgctcatggctgtcgggcaggacctttactgttactcctacagctaattctgcagggcacagcccagagccatgtggatttgacttacgggagtaaagcgtaactttttactgcatctaatgagggtgttttaagtgacactcagtgtacacagatcccatcctctggctgctaggagagaagtgctgaatgttccgtgtggagatgctcaggaaagttatttgagttaaattgctggctgagagagcttggaagtccttttcataaaaggtacctctttccttttcttattgaattcttagaacttagttaaccctccctgccttttcttaacaaaaaggacttttctaaggactgaagattggcaaaaacgaaaagcttcttcctccaagagcccattgaagaagcccagtgatgagacggtgagatggtttgagtcctcggtgcctgggtagcaggaagaaagacctgcatcctgcatctgtacttggggaagccagcggagaggacggggaggttacttctctaagtttctgcagaaatattgaaggctggagtttggaatccttaaacttggccttctcaaactcagcagcagatctccgggattctgctgttattatccaaaggcgttggaaggaaagatggatcttcttacatgctagaagttttaaacggtccttaacatgcctttgttcaagcaccttccagaatgtaaggttcagcagctctggtttctattacggtgacttgaatgtcagattcaagggcccggcgtcaaaggaaattggttttgactttttgtaatctaggagcgacagttcgtgagatgtttattcagtgttaaagagcctgtttttctaccaaacaataaaaccaagagaag

SEQ ID NO: 125093 - DNA, 4772 bp, Homo sapiens
  Payload ID: 4557
  Gene Symbol: DCAF4L1
  Gene Name: DDB1 and CUL4 associated factor 4-like 1
  Uniprot ID: Q3SXM0
  ENST ID: ENST00000333141
  CDS Start-End: 98-1288
acccggacggaacttcctgtcacggaaaagaacatcctgtcacggagaagaacatcctgcagaatttcctgtcacgaggaacattccgcaggaggaaatggaggctgaaaggctgcgactcctcgaggaagaggccaagctgaaaaaggtagccagaatgggatttaatgcatcttccatgctccgaaaaagccagctaggtttcctcaacgtcaccagttactcccgtttagccaacgagctgcgtgtgagctgcatggagcggaaaaaggtccaaattcggagcttggatccctcctctttggcgagcgaccgatttaacttcattctggcgagtaccaacagcgaccagctcttcgtagtgaaccaggtcgaagtcgaaggctccaagtacggcatcatcagcctgcgaactctgaagatcccttcgttccacgtgtacgtgctcagaaacctctacgtccccaaccggaaggtgaagtccctgtgctgggcctcgctgaaccagttggactctcacgttctgctgtgcttcgagggaatcacagatgctccaagctgtgcagtgctgctcccagcgtcgcggttcttaagtgttcacacaagagttaaccagcctggcatgctctgcagtttccagatcccagaggcctggtcctgtgcgtggtccctcaacacccgggcatatcactgctttagtgcaggcttgtctcagcaggtcctgttgaccagcgtggcgacgggacaccagcagtcatttgataccagcagtgatgtcttggcccagcagtttgctagtacggctcctttgctgtttaatggctgtcgctccggggagatctttgccattgatctgcgttgtagaaatcgaggcaaggggtggagggccactcgcctgttccatgactcagcagtgacctctgtgcaaatcctccaagaagagcaatgcctgatggcatcagacatgactggaaagatcaagctgtgggatctgagggccactaaatgtgtaaggcagtacgaaggtcacgtgaatgagtccgcctatctgcccctgcatgtgcacgaggaagagggaatcgtggtggcagtgggccaggactgctacacgagaatctggagcctccatgatgcccacctgctcagaaccatcccttccccgtactctgcctccgaggacgacattcccagcgtggccttcgcttctcggctcgggggcatccggggagcagcaccagggctgctcatggctgtccggcaggacctttattgtttccccttcagctaattctgcaggtggcagcgcggccgaatgtggatttgacttaaggaagttaagagtatcttattaccgtttctgtgagagcattttaagagacgtgttgtatatagatcgcatccatccggctgccaggggtaaggtgttaagagttttatgtggagacgttcttgtaaagttatttcagttaaactgtggacttaacttgaaagtccttttcataaaaggtacctgtttcctcttgttgaatgccttagaacagttaaccacctccccaaccctttttttttttaaataattaagacttttctaaggactgaagattggcaaaaactaaaataaattaaagcagcttctttcactagtagccctttagagaagcataatgatggtactggtaagactgtttgactaatcatacagggtcccaggcatctgcgcttgaggaagccagtgggagtggagacaagggagaggtaatttctcagagtctctacagaaatatttaaggctggagtttggaatcattaaatttggccttctcaaactcaatagcagatctcttaaggttctccttttattgttatcatccataggcattggaaggaaagatggatctttttaaatactagaagttttaaacagtccttgatgtgcttttgttgaggtacctttcagaatgtaaggtacagcagctccggtttctattatggtgacttgaagttcagattcaaggaattggctttgactttttgtaatctaggagcagcagtttgtgagagatttattaaaaatgttaaagagcctgtttttctactaagcaaggaagaaaaaaaacgtgtaataaggttagttgctacttcttaatagccaaagcctggaaatgatctgaatttcgaaaatgctaaaattcgtgatataatcatacaatcggatactgcataataatagaaaataaggcacacttgctatgtgaaacagtatggaccaatctcaacatgttgactgaaattaggtagaaatgagtacaaactgtatgattcaattctaaagttcaaaagcagtaaaaacttgtctatggtgattaaaggtagagtagtacgtacctctgtagaaagaaaggatttttttttctttttctttttaggatgtttgagaagtgacatggggaagctttaggaatgctgagttttctttatcttgacacttgatacatacgtaattcatatatctatatgcttcacgtttttatagtttactgtatatatgttattcctcaaaaaataaaaataagcaattaggacactattgtagttaggcaagggacaatgatgccttggacctgcatgtgtgagaagtagaaatgatcagaaatgattgcattggaagatcattcgaaggtagtattattgataaggcttgctgatgagagtaaactagaaagtgaaagaaaaaaggatggcagcttttttttttttttttttgagacggagtctccttctgtcgcccaggctggagtgcagtggcgcgatctcggctcactgcaagctctgaggatggcagcttttttgttaactttagaactggtagatgatggtgtcgtttactaacctggggaggatgaggagaaaaaactttaggtgaagggaatgatgctgagttttagacatctactaaacctccaattggagatacaaagtattctgcagatcaggggtcatgtcatggctggtaatacaaatttggtgacttcaatacatagaattaaaatagatgggatagatgtgctttatatgacatagatgaggttaatgtaattacatattgatagaagatgagtagatcaatagagaagatatgggagtatggttaggcacagatttttggaatcctttcagtcagttttttatactaacttgatatgtgacatgagaaattgtgtaagctttacttgctgttgtttcttcagtgtaaaatgtcttagataataaaactaaatgataaagtagatacagggttaaaggatatgtatcttgtcccttttacattgtaagcattcaaaataaaacaaaacaattaatgaagaaaagacattgcaatcattcagtaagaactagctgcagacatatatatgtatatatatatatgtctgatactgatatgtcatttatttggcaattgacaaaaaatgactacataacttgataaactgtttatcctcatttgcaaagaaaacaaatgcaaaaaaaaaatcagtaagaaaaacacacctaaaagaaagggaggcaatagtcttgaataggagaaaaagaggagatccaaatggctaatatacatttgaaaaggcatccaacttcttttattgtcaaggaaatgcaaattaaaaccacaatgccacaccactttcactataatggttaaaataaaatagatcaggtggagtgacgttgggaattaaaagagaagcaaatgttggtgcagttgtgagcaaatagaactttcatatactgttgagtgtatactggtacaagcacttggaaaagttagtaattgctaaagctagaagtttgcatactctatgacccagtcatttcagtcctaggaatatattaatcagaaatgcatacctgtgtccaccataatttgttaatagctccaactggaaactacccaaatgttcattaatagtagagtggataaattgtgggatattaacacaatggaatcctttttgcagtgagaatgagcatagcactatggacaaatcctgcaaacataatgttgaaataaagatgccaaacacaaaagagcacatattgtacaactaatgcacataaagtccctaaacaggcaaaatgaatctatgttcttagaagcaggattaatggtatacttgtagggcagaagagtagtgaccagaagaagattctaggaagctagcaatgctggtgtcatgccagacccctagtgactccaatagtaatggcactgtgtccgagagtccaaagaagatgcgtagacagcgaacaagacttgggtttattgggggaacttatatatagggatggtccagtggtagtaggctggacagaagaaccactactgtttgtaaaaagcatgcagtttatatagcattttcatttagcacactccacctagcaacctccatttaacccaaagcaaaggaccttgatcccctatattgcctgtgttgtaagggatgggctgggggttcagacgtccttcatagataaggagtgaaactcagggttagtcgctcctgtttccttagtttgggattctgagcacacattcgttttagatcacagggtcgttctcaggatatggttgttactgctgtcaggtgcatcctctctatagcggggtactggctacacagtttttgttcactagtgataattgttagagctatgcccttaatatatgtcttgtgtgtattatacttcaataaaaagttaaattttaaaaaacc

SEQ ID NO: 125094 - DNA, 3326 bp, Homo sapiens
  Payload ID: 4558
  Gene Symbol: DCAF4L2
  Gene Name: DDB1 and CUL4 associated factor 4-like 2
  Uniprot ID: Q8NA75
  ENST ID: ENST00000319675
  CDS Start-End: 98-1285
gttcttccgtgccaagtcgtgcttgtaaagaagcggtacttcctcttactcccgggacagaacttcccctcaggagggagaacatccgccgaacgaaatggagagcaaaagaccgcgactgctcgaggaagcagacaagcagaaaaagacagtcagagtgggactcaatgcaccttccatgctacgaaagaaccagctaggtttcctcagattcgccaactattgccgtatagctcgcgagctgcgtgtaagctgcatgcagaggaaaaaggtccagattcatagctgggatccctcctctttggcaagcgaccgatttaaccgcatactggcgaataccaacactgaccagctcttcacagtgaaccaagtcgaagctggaggctccaagtacggcatcatcaccatgcgaggcctgacgacccctgagctccgggtatacccgcacaaaaccctctacgtccctaatcggaaggtgaattctatgtgctgggcctcactgaatcacttggattcccaccttctgctgtgcttcgtgggacttgcagatactccaagctgtgccgtgctgctcccagcgtcgctgttcataggtagcttcccaggaatgcgtcggcctggcatgctttgcagtttccagatccctgatgcctggtcctgtgcctggtccctgagcatccacgcgtatcactctttcagtacaggcttgtctcagcaggtcctgttgaccaacgtggtgacgggacaccagcagtcatttgggactagcagtgatgtcttggcccagcagtttgcaatcatgactcctttgctgtttaatggctgtcgctctggggagatctttggcattgatctgcgctgtggaaatcaaggcagcgggtggaaggccatttgcctgtcccatgattcagcagtgacttctctgcaaatcctccaagatggccaattcctggtgtcatcagacatgactggaactatcaagctgtgggacttgagggccactaaatgtgtaacacagtacgaaggtcatgtgaataactccgcctacctacccgtgcatgtgaacgaagaagaaggagtcgtggcggccgtgggccaggactgctacacgagaatctggagcctccgtcatggccacctgctcacaaccataccctccccataccccgcctcggagaacgacattcccagtgtggccttctcttctcgcctcgggggcttccgaggagcaccagggctgctcatggctgtccgggaggacctttattgtttctcctacggttaattcttcaggatgcagcccggaggaacgtggatttgacttaaagaagtaaagagcatcgtattaccgtttctatgagcgcattttaagagatgttcggtgtttgtagatcccatccatccggctgctaggggtaaggtgctgttttatgtgaagatagttctgtaaagttgtttcagttaaactgggctgagagagcttgaaagtccttttcataaaagataactatttccttttcttgttgaataccttagaatagttatccccccctttttttttttttttaacaaaaaaacacttttctaaggactgaagattggcaaaaactaaaataaattaaaactgcttacaccagaagccttttagagaagcatgagactgtttgactagtcctacctgggttccggaaatacatgcatcatctgtacttgaagaggccagtgggagaggagaggagggggaggtcatttatctgagtctctccagaagtttttaaggctacattttggaatcattaaacttggccttctcaaactcaatagcagatctctgagattctccttttattattttccataggcaatgggaggaaaggtggatctttttaaataatagaagttttaaacagtccttaacgtgcttttgttgaggcatcttccagaatgtaaggtacagcagctccggtttctattattgtgacttgaatgtcaggattcaagggctcagtgtcaaagataattggctttgactttttgtaatctaggagcagcagtttgtgagatgtttattcaaagtgttagcctgtttttctaccaacaataagctagaaaagacaaaaaaaacaaaaaacaaaaaaacgtgtaataaagttagtggctacttcttaatagccaaagcctggaaatgatctcactttacaatatgctaaaattgataaataatttgtgctgtagtcatacaattggataaagcataatataaaataaggcacaattgctatatgaaactgtggattaatctcaacatgttgattgtaaatgtaggtagaaatgagtacaaactgattcagttctaaagttccaaagcactaaaaacttatctatggtgattacagtttgaatagtaggtatctctgtggaaggaagaaaggatattgtttgtttttttcccttttatttttaggatattgtttggaaagtaacacggggaaactttagaaatgctgttttctttttcttgatccttgatacatacatattttgtatgtctatacacttcacactttatataatacctcaaaaataaaaatatgaaaacagtacactgttgtaggttggtcaggaaagggaatgattgtggcttggacctgactatgagaagtagaaataatcagaaaaatcagaaatgattgcattggaagatcattcgaaggtagtattagtaagatttgctgatgagagtaatctagaaagtgaaagacagcataaagattgcagcttttttgttaactttaggactggtggatggttggtgtcatttactaaaatggggaggatttgaggtgaaaaaattttaggtgaagagaataatgctgagttttaggcaactattaaaatgtccattctgtagattagaggtgatgtcaggacataaatgaggttaatgtaatattacatattgatagaggaataggtcaatagagaagatacaaaagagtggttaggtgcatagatttttgaaatcagttaaattagtttttgatacttgatgtgtgacaggggaaactgtgtaagctgtacttgttatttctttgtaaaatgtcttagataataaaactaaatcataaagtagatattggtttaaaggatgtatacattgtcccttttacattgtaagcattcaataagaactagctgcggatgtaattttttttaaaaaagtccaaaagcagctatgggcagttgacaaaagaaaatgtaatgactacgtaacttgcgaatctgtttaccctcacttgcaaataaaataagtgcaaataaagcaa

SEQ ID NO: 125095 - DNA, 5953 bp, Homo sapiens
  Payload ID: 4559
  Gene Symbol: DCAF5
  Gene Name: DDB1 and CUL4 associated factor 5
  Uniprot ID: Q96JK2
  ENST ID: ENST00000341516
  CDS Start-End: 149-2977
tgtctgcacacctcgctctgcctgccatggctggttaaagaaccatccggatcgcagcgcggggggagggccgggtggggggagcagcggccgcgcgtgaggccgagggaggggcggcggcgcgagcggcggcggcggcggttccagcatgaagaggagagctggcctggggggcagcatgaggtcagtggtgggcttcttgtcccagcggggcttgcatggggaccccctgctcactcaggactttcagaggagacgcctgcggggctgcagaaacctctacaagaaggacctcctcggccacttcggctgtgtcaatgccattgaattctccaacaatggaggccagtggctggtctcaggaggagatgaccgccgggttctgctatggcacatggaacaagccatccactccagggtcaagcccatacagctgaaaggagagcaccattccaacattttttgcctggctttcaacagtgggaacactaaagtgttctctggaggcaatgatgagcaagttatcctccatgatgttgaaagcagtgagacattggacgtgtttgctcatgaagatgcagtatatggcttgtctgtgagcccagtgaatgacaacatttttgccagttcctcagatgatggccgggttctcatttgggacattcgggaatccccccatggagagcccttctgcctggcaaactatccatcagcctttcatagtgtcatgtttaaccctgtggagcccaggttgttggccacagccaattcaaaggaaggagtgggactctgggacattcgaaaacctcagagttctctcctgcgctatggtggaaacctgtccctccaaagtgccatgagtgtacgattcaacagcaacgggacccagctcctggccctgaggcgacgcctgccccctgtgctctatgacatccattcccgcctgcctgtgtttcagtttgacaatcagggttacttcaactcatgcaccatgaaaagctgctgttttgcaggagatcgtgaccagtatatcctttcgggctctgatgacttcaacctgtacatgtggagaattcctgcagatccagaagcaggtggcattggtagggtggtcaacggagccttcatggtgctgaaagggcatcgatctattgttaaccaagtccgatttaatccccacacctacatgatctgctcttctggtgtagaaaagattatcaagatctggagcccatacaagcagccaggatgtactggagacctcgacggtcggattgaggacgattcccgctgcctctatacccatgaagagtacatcagccttgtgctgaacagtgggagtggcctgtcgcatgactacgccaaccagtcggtccaggaagacccccggatgatggccttctttgactcactggtacgccgagagatcgagggctggagctctgactcagacagtgacctcagtgagagtactatcctccaactgcacgctggggtcagcgagcgctcaggctacactgactcagagtcttcggcctcattgcctcgctccccgcctcccacagtagatgagtctgccgacaacgccttccacctggggcccctgcgggtcaccaccacaaacacagtagcctcaactccaccaacacccacgtgtgaggatgcagcctctcgccagcagcgtctgtctgctctgcggcgctaccaagacaaacgcctcctggccctttccaatgagtccgattctgaggagaatgtctgtgaggtggaactagacacagatctctttccccggccacggtcacccagccccgaagatgaatccagcagttccagcagctctagcagctctgaggatgaggaggagctgaatgaacgccgagcctctacctggcagcggaatgccatgcggcgccgacagaagacaacccgagaagacaagcccagtgccccaatcaagcccaccaacacttacattggagaagacaactatgattacccccagatcaaagtggatgacctctcctcctccccaacctcgtcccctgagcggagcacttccacgctagagattcaaccaagccgggcatcaccaacttctgacatagaatcagttgagcgaaaaatttataaagcttacaagtggctccgctactcttatatctcctactcaaataacaaagatggagagacctccttggtgaccggggaggcagatgaagggagagcaggaaccagccacaaagacaacccagccccttcttccagtaaggaagcctgtctaaacatagcaatggcccagaggaaccaggacctgccacctgaaggctgcagcaaggacacttttaaagaagagactcctagaactcccagcaatggcccaggccatgagcacagcagccatgcttgggcagaggtgccagagggtacctctcaggacactggcaatagcggctctgtagagcacccttttgaaaccaagaagctcaatggaaaggccctgagcagtcgggctgaggagccgccttctcctcctgtccccaaggcatctggctccactctcaacagcgggtctggcaactgtcccaggacccagtctgatgacagtgaggagaggagcctcgaaaccatctgtgccaaccacaacaatggacgcttacaccctcgtccccctcaccctcacaataacgggcagaacttgggggagctggaggtggtggcctactcttccccaggacactcagacactgaccgtgataactcgtccctgacagggacactcctacacaaagattgttgcgggtctgaaatggcctgtgagacccccaatgctggaacaagagaggaccccactgacaccccagccacagatagtagcagggctgttcatggccacagtggcctcaaaaggcaacgaattgaattggaagatacagattcagagaattcctcctcagagaagaaattaaaaacatgataaatacaaagggaaaacaaaaagctacaaaagtagccttacaaaaaaaaaaaaattgtttagtgaatacagaggaaaggaaaaacaagtattaaaggcacatgaaaccagggcctgaaattttgtgtctgatgctgctcccttctatccaacattcaacaacgggtctgaatgtctagctggccattggcttgtgctgtgttaagaaaggggaaaaaaaaataacccaagtgactcctttctagtgagacgtgagcgtagtgtgccgcgcaaggctctgtggaagtaaatctttgttgagacgttcgacttgttcttgtgtacgcacaatggcacgtgtgcgcttattgtctcataagaccttccttttagttctccatcagaaaggacctatgaatttgtactttttgccatctcaccctgtttacatgccataggtgttctggtctggatgatgggtgcctgttaaatcaggttgtgctgccagtgagttgtagatttatgctggaagaatggagaatggaaacaggccttcagcccattggctgcgctggagaggaaagcatggttcctttcttaaagaaatcttccatgttttctctaagtaacacttctttattgagcatttaatgtggacatactataaaaaagaatttttaatgctaatgagaggtttagcacttaagatcagattcaagagaatatagattcctgataaatttcactgtttgcaaattgagcagtgctgcaacatgtactgtatgaaggccataaaatagagctagtcatggataacagactttaaccagttaggtgctagatcctaagaggcactcacaaggccagcaggtgcttccttggctcccatgatcgatcgaggcatagtgaaagaagggcaaagacagctttccagagctttgtgctcaggctactaaagtagttgttataggtgtgttaacgaagaagcttagtgaggagcagaatgtggtactatattcatttaactcaacccagaaccattggtcagaattggtgggactggcatcttccctcagacttgcagttgatagaggctgtggtgttctcactagactttgcagagcagtaggcatctcaaggtaacagattcttattgagtaggtctattaggagtcagaaggtgttggggaggagtctctggcttatgactcctggttcccattagtcttaagtcttctggttcccataaaagactcagttttattgaggtagatacaggtttagaagagaaaagagcaacagattttcagcgttgcagtcactcggttatctatgaagggttgtgcaaaacaggaaggtctgggaatgaccagatatcttgttggcataaatgttatgaaaaggcagaatactggcaagaaatgaggaagagagagaaaaacaatataactttcttgagtgcaaaggtgctagacaactaggagcccagctgggattggtgtagggagggccgaacgctgactagtgtggcctcactgccccaggcttcctttcagaggaaggcctgtcctgctggaactggagccaaggggaggctgcctatgaaggcagaagatgtggatgaattcaggcactgggggtgggggggttatttataaacacaaggtggttggtttaagccaaaaggagataccatcctgataagctctgtgaaagagaagatgtgcctggtgtgtgtaatgcggctggggtatgaaaacactgagaaggagatgaaggagtgtgtgtagcatgggggtgtgtacaacttaacacctggacttttactgggggagtgggaaagtgattctgtaaccaacattagaattactttggatttgtaatcagattggttctatgatttgtctttgactattcacagataattgtaaatgctggttttataagcccaagtcattttacatttgcttttccaaaatgtattaaattggaattttttaatcctttatatacaaaaaaaatacgatcactcagtgtgtgtttctcttccccttcttagtcagcacacccagtcctttattttattctattctatttattttattttaataagtacttagcctcttctgacttctcaaaggacaatcggatacatatcttcctgaaaagaagtagttaaagttcccttgggaactagctacttggtagttacaattcccaaatgcagaacttggtcttttcatgttaaaagccttaatctcatttgggtactcaaaagagaaatcagagtttattctggttaacttgagaagccaagaaagatcatttttagcaagtatgccttccatccttggcagaggcttcccagcatcctaggctcagcttaccgggtgataggccccataagacacacacatgagcagggtgagaaatgcttgctttatagctgctccaccctcatctccagagattttgtgtctatggttgtgggtctggaaacctggcaggaaccacttctagagtacctttgcctaaactcttttagaattgaggccccaactttgatggcacatttaatacccaatttcttccataatagatatttttaatagcaggacagatggcactgattagatcaagaactatttggaagtgcctcttatgtttttttcctgcattctgtacataaagttttaagtggcaggtccagatatgtaaaatcatttctctctattttccagctggttttgttaatgattctctaggacagcaggtaaatgagttaagttgttggcttggggcaagtgaagtttgtgactatgcttgatttaataagctgagagtctcttgtttgtctgtcaaggtgccttcctctgctgaagccttacctccttctcacccagtaacggttaactcttctcttgtgtatatgcaaataaacctattattcacttctcacgtcttcctcttctcttccagggaagacttggttgctta

SEQ ID NO: 125096 - DNA, 2837 bp, Homo sapiens
  Payload ID: 4559
  Gene Symbol: DCAF5
  Gene Name: DDB1 and CUL4 associated factor 5
  ENST ID: ENST00000389997
  CDS Start-End: 6-986
ccagcatgaagaggagagctggcctggggggcagcatgaggtcagtggtgggcttcttgtcccagcggggcttgcatggggaccccctgctcactcaggactttcagaggagacgcctgcggggctgcagaaacctctacaagaaggacctcctcggccacttcggctgtgtcaatgccattgaattctccaacaatggaggccagtggctggtctcaggaggagatgaccgccgggttctgctatggcacatggaacaagccatccactccagggtcaagcccatacagctgaaaggagagcaccattccaacattttttgcctggctttcaacagtgggaacactaaagtgttctctggaggcaatgatgagcaagttatcctccatgatgttgaaagcagtgagacattggacgtgtttgctcatgaagatgcagtatatggcttgtctgtgagcccagtgaatgacaacatttttgccagttcctcagatgatggccgggttctcatttgggacattcgggaatccccccatggagagcccttctgcctggcaaactatccatcagcctttcatagtgtcatgtttaaccctgtggagcccaggttgttggccacagccaattcaaaggaaggagtgggactctgggacattcgaaaacctcagagttctctcctgcgctatggtggaaacctgtccctccaaagtgccatgagtgtacgattcaacagcaacgggacccagctcctggccctgaggcgacgcctgccccctgtgctctatgacatccattcccgcctgcctgtgtttcagtttgacaatcagggttacttcaactcatgcaccatgaaaagctgctgttttgcaggagatcgtgaccagcatcacaactggaaatggagagcccaagctgtgagtttccagccttttctgagtctcaccaggaatggagatgctgatgttgacttaaagctggcagtttaagaatatacttggccttcttgcacctttctgtcttaaccatagaagttctgaagtgtcagtgaccagttgggctaatctgggtcaccaagccgaggaaagacaaatgggaagaaagacaaatctaaggaaagactgatcaaataaacaaatagaattttttattctcaagcacaacaaatcttattgctatttcacatatagattgggaaaaagaaaaaccttagtctctcgctaatgtttagtgttcttatctttgggtcaactatgtcaaattttgacttaaaattcttatatgctgtaccccacctctttagagttatttttggcataaaagaaatataaaagaggcataaaagaaaaatttctttgagaaactggcaagacctcgctttttgaagtaaaagctaggatttttctccttagatgggggttgctagaggcttcctaatgtcatagtttaaggattagtagatgtaataggagccgaataaatgcctgttgaattgtcttgcgtgtagatagatgagaatgttcttttaagttttctgaactagagatttcctctcttataaatagagactatatatccaaattcagaatttatactcatgttggagtcttagggcctacttagctgagatccatactggagaccactaggtggcctcagtgatgtctccttggggtgcccacagtacctgaatgacttaatttgtatatacctgtatggcactgcagggaatttgtttcttgggtgggaagaaacagtttctataggcgatcagactctcaatagaacagatatacagaatggttgatttagctttgtctggctgtggaaatgacaatcaagtctctccctctcttccttttttccttctttctttgcttttgttgatttcctatcctttgtcaacttcttatgcatgtaattcttgttttgttgaataatagagcatgcagtgaaggtgatattaatagtttactaggctttatttccagaaaccagaggctgagggaaaggtgattttcttcaggttgtgtttagcaacaaagcctatcttcatggaccttagaagacccagaacaaagacctctagccaacatgtaagcacctagaccatggtttcccatccttatcattgttaacattttggctagatagttctttgttgtgtggagctgtcctatgcattataagatggttagcagtatccctagcctcttcctactagaagccggtaatatcatcctaagttatcctccaggcaaccaaaaatgtctccagacattgtcccctggggggaaaattgcccctggttgagaacctgtgatccggattataattacccattttgctcagatgcattggggcaggtattgtcataggcagagccacagaaggtattttgtgatagtcctaggtatatacatcaaagatatcattgtttctgtctttcagtttatatataattataaaagtattgaatggcttttgatttttctctatttagatttgactaatttattatttgtgacttgtcctatgggaagagttttatgggtattttattctctctgacagacaagacttctttttggctggggtaagtggttttccttgaaagaagatgcaaagtcattgaatctaactttgggtcagttaacagagttaaagtcttaaaagtctgttcatattcctgaaatagttagaggtatataaaatacagagatttatatttggcttttttgttgactccttagggactaagaaatgtagctaattcatcattgtcttgtctccaaatcctggcacacagtgagaacacaataaaaatttgttgaagtaaa

SEQ ID NO: 125097 - DNA, 759 bp, Homo sapiens
  Payload ID: 4559
  Gene Symbol: DCAF5
  Gene Name: DDB1 and CUL4 associated factor 5
  ENST ID: ENST00000554681
  CDS Start-End: 130-759
gcggccgcgcgtgaggccgagggaggggcggcggcgcgagcggcggcggcggcggttccagcatgaagaggagagctggcctggggggcagcatgaggaggagatgaccgccgggttctgctatggcacatggaacaagccatccactccagggtcaagcccatacagctgaaaggagagcaccattccaacattttttgcctggctttcaacagtgggaacactaaagtgttctctggaggcaatgatgagcaagttatcctccatgatgttgaaagtgagacattggacgtgtttgctcatgaagatgcagtatatggcttgtctgtgagcccagtgaatgacaacatttttgccagttcctcagatgatggccgggttctcatttgggacattcgggaatccccccatggagagcccttctgcctggcaaactatccatcagcctttcatagtgtcatgtttaaccctgtggagcccaggttgttggccacagccaattcaaaggaaggagtgggactctgggacattcgaaaacctcagagttctctcctgcgctatggtggaaacctgtccctccaaagtgccatgagtgtacgattcaacagcaacgggacccagctcctggccctgaggcgacgcctgccccctgtgctctatgacatccattcccgcctgcctgtgtttcagtttgacaatcagggttacttcaactcatgcaccatgaaaagctgctgttttgcaggagatcgtgaccag

SEQ ID NO: 125098 - DNA, 4803 bp, Homo sapiens
  Payload ID: 4559
  Gene Symbol: DCAF5
  Gene Name: DDB1 and CUL4 associated factor 5
  Uniprot ID: Q96JK2
  ENST ID: ENST00000554215
  CDS Start-End: 219-2801
gaggggaaggagaggatgtcttctataaaaaagacctaaaatggttgacagctccttaattcgctttatcccaagtgcaaagtgatctctcctgatgcctgccctgaaagtgtaggtcggggaggggggcgaggttaccgctctacaaagtttgacggcaaactcttcctccgcgtactttaaaaggaggagatgaccgccgggttctgctatggcacatggaacaagccatccactccagggtcaagcccatacagctgaaaggagagcaccattccaacattttttgcctggctttcaacagtgggaacactaaagtgttctctggaggcaatgatgagcaagttatcctccatgatgttgaaagcagtgagacattggacgtgtttgctcatgaagatgcagtatatggcttgtctgtgagcccagtgaatgacaacatttttgccagttcctcagatgatggccgggttctcatttgggacattcgggaatccccccatggagagcccttctgcctggcaaactatccatcagcctttcatagtgtcatgtttaaccctgtggagcccaggttgttggccacagccaattcaaaggaaggagtgggactctgggacattcgaaaacctcagagttctctcctgcgctatggtggaaacctgtccctccaaagtgccatgagtgtacgattcaacagcaacgggacccagctcctggccctgaggcgacgcctgccccctgtgctctatgacatccattcccgcctgcctgtgtttcagtttgacaatcagggttacttcaactcatgcaccatgaaaagctgctgttttgcaggagatcgtgaccagtatatcctttcgggctctgatgacttcaacctgtacatgtggagaattcctgcagatccagaagcaggtggcattggtagggtggtcaacggagccttcatggtgctgaaagggcatcgatctattgttaaccaagtccgatttaatccccacacctacatgatctgctcttctggtgtagaaaagattatcaagatctggagcccatacaagcagccaggatgtactggagacctcgacggtcggattgaggacgattcccgctgcctctatacccatgaagagtacatcagccttgtgctgaacagtgggagtggcctgtcgcatgactacgccaaccagtcggtccaggaagacccccggatgatggccttctttgactcactggtacgccgagagatcgagggctggagctctgactcagacagtgacctcagtgagagtactatcctccaactgcacgctggggtcagcgagcgctcaggctacactgactcagagtcttcggcctcattgcctcgctccccgcctcccacagtagatgagtctgccgacaacgccttccacctggggcccctgcgggtcaccaccacaaacacagtagcctcaactccaccaacacccacgtgtgaggatgcagcctctcgccagcagcgtctgtctgctctgcggcgctaccaagacaaacgcctcctggccctttccaatgagtccgattctgaggagaatgtctgtgaggtggaactagacacagatctctttccccggccacggtcacccagccccgaagatgaatccagcagttccagcagctctagcagctctgaggatgaggaggagctgaatgaacgccgagcctctacctggcagcggaatgccatgcggcgccgacagaagacaacccgagaagacaagcccagtgccccaatcaagcccaccaacacttacattggagaagacaactatgattacccccagatcaaagtggatgacctctcctcctccccaacctcgtcccctgagcggagcacttccacgctagagattcaaccaagccgggcatcaccaacttctgacatagaatcagttgagcgaaaaatttataaagcttacaagtggctccgctactcttatatctcctactcaaataacaaagatggagagacctccttggtgaccggggaggcagatgaagggagagcaggaaccagccacaaagacaacccagccccttcttccagtaaggaagcctgtctaaacatagcaatggcccagaggaaccaggacctgccacctgaaggctgcagcaaggacacttttaaagaagagactcctagaactcccagcaatggcccaggccatgagcacagcagccatgcttgggcagaggtgccagagggtacctctcaggacactggcaatagcggctctgtagagcacccttttgaaaccaagaagctcaatggaaaggccctgagcagtcgggctgaggagccgccttctcctcctgtccccaaggcatctggctccactctcaacagcgggtctggcaactgtcccaggacccagtctgatgacagtgaggagaggagcctcgaaaccatctgtgccaaccacaacaatggacgcttacaccctcgtccccctcaccctcacaataacgggcagaacttgggggagctggaggtggtggcctactcttccccaggacactcagacactgaccgtgataactcgtccctgacagggacactcctacacaaagattgttgcgggtctgaaatggcctgtgagacccccaatgctggaacaagagaggaccccactgacaccccagccacagatagtagcagggctgttcatggccacagtggcctcaaaaggcaacgaattgaattggaagatacagattcagagaattcctcctcagagaagaaattaaaaacatgataaatacaaagggaaaacaaaaagctacaaaagtagccttacaaaaaaaaaaaaattgtttagtgaatacagaggaaaggaaaaacaagtattaaaggcacatgaaaccagggcctgaaattttgtgtctgatgctgctcccttctatccaacattcaacaacgggtctgaatgtctagctggccattggcttgtgctgtgttaagaaaggggaaaaaaaaataacccaagtgactcctttctagtgagacgtgagcgtagtgtgccgcgcaaggctctgtggaagtaaatctttgttgagacgttcgacttgttcttgtgtacgcacaatggcacgtgtgcgcttattgtctcataagaccttccttttagttctccatcagaaaggacctatgaatttgtactttttgccatctcaccctgtttacatgccataggtgttctggtctggatgatgggtgcctgttaaatcaggttgtgctgccagtgagttgtagatttatgctggaagaatggagaatggaaacaggccttcagcccattggctgcgctggagaggaaagcatggttcctttcttaaagaaatcttccatgttttctctaagtaacacttctttattgagcatttaatgtggacatactataaaaaagaatttttaatgctaatgagaggtttagcacttaagatcagattcaagagaatatagattcctgataaatttcactgtttgcaaattgagcagtgctgcaacatgtactgtatgaaggccataaaatagagctagtcatggataacagactttaaccagttaggtgctagatcctaagaggcactcacaaggccagcaggtgcttccttggctcccatgatcgatcgaggcatagtgaaagaagggcaaagacagctttccagagctttgtgctcaggctactaaagtagttgttataggtgtgttaacgaagaagcttagtgaggagcagaatgtggtactatattcatttaactcaacccagaaccattggtcagaattggtgggactggcatcttccctcagacttgcagttgatagaggctgtggtgttctcactagactttgcagagcagtaggcatctcaaggtaacagattcttattgagtaggtctattaggagtcagaaggtgttggggaggagtctctggcttatgactcctggttcccattagtcttaagtcttctggttcccataaaagactcagttttattgaggtagatacaggtttagaagagaaaagagcaacagattttcagcgttgcagtcactcggttatctatgaagggttgtgcaaaacaggaaggtctgggaatgaccagatatcttgttggcataaatgttatgaaaaggcagaatactggcaagaaatgaggaagagagagaaaaacaatataactttcttgagtgcaaaggtgctagacaactaggagcccagctgggattggtgtagggagggccgaacgctgactagtgtggcctcactgccccaggcttcctttcagaggaaggcctgtcctgctggaactggagccaaggggaggctgcctatgaaggcagaagatgtggatgaattcaggcactgggggtgggggggttatttataaacacaaggtggttggtttaagccaaaaggagataccatcctgataagctctgtgaaagagaagatgtgcctggtgtgtgtaatgcggctggggtatgaaaacactgagaaggagatgaaggagtgtgtgtagcatgggggtgtgtacaacttaacacctggacttttactgggggagtgggaaagtgattctgtaaccaacattagaattactttggatttgtaatcagattggttctatgatttgtctttgactattcacagataattgtaaatgctggttttataagcccaagtcattttacatttgcttttccaaaatgtattaaattggaattttttaatcctttatatacaaaaaaaata

SEQ ID NO: 125099 - DNA, 2883 bp, Homo sapiens
  Payload ID: 4559
  Gene Symbol: DCAF5
  Gene Name: DDB1 and CUL4 associated factor 5
  Uniprot ID: Q96JK2
  ENST ID: ENST00000557386
  CDS Start-End: 26-2851
gagcggcggcggcggcggttccagcatgaagaggagagctggcctggggggcagcatgaggtcagtggtgggcttcttgtcccagcggggcttgcatggggaccccctgctcactcaggactttcagaggagacgcctgcggggctgcagaaacctctacaagaaggacctcctcggccacttcggctgtgtcaatgccattgaattctccaacaatggaggccagtggctggtctcaggaggagatgaccgccgggttctgctatggcacatggaacaagccatccactccagggtcaagcccatacagctgaaaggagagcaccattccaacattttttgcctggctttcaacagtgggaacactaaagtgttctctggaggcaatgatgagcaagttatcctccatgatgttgaaagtgagacattggacgtgtttgctcatgaagatgcagtatatggcttgtctgtgagcccagtgaatgacaacatttttgccagttcctcagatgatggccgggttctcatttgggacattcgggaatccccccatggagagcccttctgcctggcaaactatccatcagcctttcatagtgtcatgtttaaccctgtggagcccaggttgttggccacagccaattcaaaggaaggagtgggactctgggacattcgaaaacctcagagttctctcctgcgctatggtggaaacctgtccctccaaagtgccatgagtgtacgattcaacagcaacgggacccagctcctggccctgaggcgacgcctgccccctgtgctctatgacatccattcccgcctgcctgtgtttcagtttgacaatcagggttacttcaactcatgcaccatgaaaagctgctgttttgcaggagatcgtgaccagtatatcctttcgggctctgatgacttcaacctgtacatgtggagaattcctgcagatccagaagcaggtggcattggtagggtggtcaacggagccttcatggtgctgaaagggcatcgatctattgttaaccaagtccgatttaatccccacacctacatgatctgctcttctggtgtagaaaagattatcaagatctggagcccatacaagcagccaggatgtactggagacctcgacggtcggattgaggacgattcccgctgcctctatacccatgaagagtacatcagccttgtgctgaacagtgggagtggcctgtcgcatgactacgccaaccagtcggtccaggaagacccccggatgatggccttctttgactcactggtacgccgagagatcgagggctggagctctgactcagacagtgacctcagtgagagtactatcctccaactgcacgctggggtcagcgagcgctcaggctacactgactcagagtcttcggcctcattgcctcgctccccgcctcccacagtagatgagtctgccgacaacgccttccacctggggcccctgcgggtcaccaccacaaacacagtagcctcaactccaccaacacccacgtgtgaggatgcagcctctcgccagcagcgtctgtctgctctgcggcgctaccaagacaaacgcctcctggccctttccaatgagtccgattctgaggagaatgtctgtgaggtggaactagacacagatctctttccccggccacggtcacccagccccgaagatgaatccagcagttccagcagctctagcagctctgaggatgaggaggagctgaatgaacgccgagcctctacctggcagcggaatgccatgcggcgccgacagaagacaacccgagaagacaagcccagtgccccaatcaagcccaccaacacttacattggagaagacaactatgattacccccagatcaaagtggatgacctctcctcctccccaacctcgtcccctgagcggagcacttccacgctagagattcaaccaagccgggcatcaccaacttctgacatagaatcagttgagcgaaaaatttataaagcttacaagtggctccgctactcttatatctcctactcaaataacaaagatggagagacctccttggtgaccggggaggcagatgaagggagagcaggaaccagccacaaagacaacccagccccttcttccagtaaggaagcctgtctaaacatagcaatggcccagaggaaccaggacctgccacctgaaggctgcagcaaggacacttttaaagaagagactcctagaactcccagcaatggcccaggccatgagcacagcagccatgcttgggcagaggtgccagagggtacctctcaggacactggcaatagcggctctgtagagcacccttttgaaaccaagaagctcaatggaaaggccctgagcagtcgggctgaggagccgccttctcctcctgtccccaaggcatctggctccactctcaacagcgggtctggcaactgtcccaggacccagtctgatgacagtgaggagaggagcctcgaaaccatctgtgccaaccacaacaatggacgcttacaccctcgtccccctcaccctcacaataacgggcagaacttgggggagctggaggtggtggcctactcttccccaggacactcagacactgaccgtgataactcgtccctgacagggacactcctacacaaagattgttgcgggtctgaaatggcctgtgagacccccaatgctggaacaagagaggaccccactgacaccccagccacagatagtagcagggctgttcatggccacagtggcctcaaaaggcaacgaattgaattggaagatacagattcagagaattcctcctcagagaagaaattaaaaacatgataaatacaaagggaaaacaaaaagctacaaaa

SEQ ID NO: 125100 - DNA, 2791 bp, Homo sapiens
  Payload ID: 4559
  Gene Symbol: DCAF5
  Gene Name: DDB1 and CUL4 associated factor 5
  Uniprot ID: Q96JK2
  ENST ID: ENST00000556847
  CDS Start-End: 154-2736
attgcagggggaggggaaggagaggatgtcttctataaaaaagacctaaaatggttgacagctccttaattcgctttatcccaagtgcaaagtgatctctcctgatgcctgccctgaaagtgaggagatgaccgccgggttctgctatggcacatggaacaagccatccactccagggtcaagcccatacagctgaaaggagagcaccattccaacattttttgcctggctttcaacagtgggaacactaaagtgttctctggaggcaatgatgagcaagttatcctccatgatgttgaaagcagtgagacattggacgtgtttgctcatgaagatgcagtatatggcttgtctgtgagcccagtgaatgacaacatttttgccagttcctcagatgatggccgggttctcatttgggacattcgggaatccccccatggagagcccttctgcctggcaaactatccatcagcctttcatagtgtcatgtttaaccctgtggagcccaggttgttggccacagccaattcaaaggaaggagtgggactctgggacattcgaaaacctcagagttctctcctgcgctatggtggaaacctgtccctccaaagtgccatgagtgtacgattcaacagcaacgggacccagctcctggccctgaggcgacgcctgccccctgtgctctatgacatccattcccgcctgcctgtgtttcagtttgacaatcagggttacttcaactcatgcaccatgaaaagctgctgttttgcaggagatcgtgaccagtatatcctttcgggctctgatgacttcaacctgtacatgtggagaattcctgcagatccagaagcaggtggcattggtagggtggtcaacggagccttcatggtgctgaaagggcatcgatctattgttaaccaagtccgatttaatccccacacctacatgatctgctcttctggtgtagaaaagattatcaagatctggagcccatacaagcagccaggatgtactggagacctcgacggtcggattgaggacgattcccgctgcctctatacccatgaagagtacatcagccttgtgctgaacagtgggagtggcctgtcgcatgactacgccaaccagtcggtccaggaagacccccggatgatggccttctttgactcactggtacgccgagagatcgagggctggagctctgactcagacagtgacctcagtgagagtactatcctccaactgcacgctggggtcagcgagcgctcaggctacactgactcagagtcttcggcctcattgcctcgctccccgcctcccacagtagatgagtctgccgacaacgccttccacctggggcccctgcgggtcaccaccacaaacacagtagcctcaactccaccaacacccacgtgtgaggatgcagcctctcgccagcagcgtctgtctgctctgcggcgctaccaagacaaacgcctcctggccctttccaatgagtccgattctgaggagaatgtctgtgaggtggaactagacacagatctctttccccggccacggtcacccagccccgaagatgaatccagcagttccagcagctctagcagctctgaggatgaggaggagctgaatgaacgccgagcctctacctggcagcggaatgccatgcggcgccgacagaagacaacccgagaagacaagcccagtgccccaatcaagcccaccaacacttacattggagaagacaactatgattacccccagatcaaagtggatgacctctcctcctccccaacctcgtcccctgagcggagcacttccacgctagagattcaaccaagccgggcatcaccaacttctgacatagaatcagttgagcgaaaaatttataaagcttacaagtggctccgctactcttatatctcctactcaaataacaaagatggagagacctccttggtgaccggggaggcagatgaagggagagcaggaaccagccacaaagacaacccagccccttcttccagtaaggaagcctgtctaaacatagcaatggcccagaggaaccaggacctgccacctgaaggctgcagcaaggacacttttaaagaagagactcctagaactcccagcaatggcccaggccatgagcacagcagccatgcttgggcagaggtgccagagggtacctctcaggacactggcaatagcggctctgtagagcacccttttgaaaccaagaagctcaatggaaaggccctgagcagtcgggctgaggagccgccttctcctcctgtccccaaggcatctggctccactctcaacagcgggtctggcaactgtcccaggacccagtctgatgacagtgaggagaggagcctcgaaaccatctgtgccaaccacaacaatggacgcttacaccctcgtccccctcaccctcacaataacgggcagaacttgggggagctggaggtggtggcctactcttccccaggacactcagacactgaccgtgataactcgtccctgacagggacactcctacacaaagattgttgcgggtctgaaatggcctgtgagacccccaatgctggaacaagagaggaccccactgacaccccagccacagatagtagcagggctgttcatggccacagtggcctcaaaaggcaacgaattgaattggaagatacagattcagagaattcctcctcagagaagaaattaaaaacatgataaatacaaagggaaaacaaaaagctacaaaagtagccttacaaaaaaaaaaaaa

SEQ ID NO: 125101 - DNA, 728 bp, Homo sapiens
  Payload ID: 4559
  Gene Symbol: DCAF5
  Gene Name: DDB1 and CUL4 associated factor 5
  ENST ID: ENST00000556111
  CDS Start-End: 159-410
ggcggcggcggcggttccagcatgaagaggagagctggcctggggggcagcatgaggcaatgatgagcaagttatcctccatgatgttgaaagcagtgagacattggacgtgtttgctcatgaagatgcagtatatggcttgtctgtgagcccagtgaatgacaacatttttgccagttcctcagatgatggccgggttctcatttgggacattcgggaatccccccatggagagcccttctgcctggcaaactatccatcagcctttcatagtgtcatgtttaaccctgtggagcccaggttgttggccacagccaattcaaaggaaggagtgggactctgggacattcgaaaacctcagagttctctcctgcgctatggtggaaacctgtccctccaaagtgccatgagtgtacgattcaacagcaacgggacccagctcctggccctgaggcgacgcctgccccctgtgctctatgacatccattcccgcctgcctgtgtttcagtttgacaatcagggttacttcaactcatgcaccatgaaaagctgctgttttgcaggagatcgtgaccagtatatcctttcgggctctgatgacttcaacctgtacatgtggagaattcctgcagatccagaagcaggtggcattggtagggtggtcaacggagccttcatggtgctgaaagggcatcgatctattgttaaccaagtccgatttaatcccc

SEQ ID NO: 125102 - DNA, 3186 bp, Homo sapiens
  Payload ID: 4560
  Gene Symbol: DCAF6
  Gene Name: DDB1 and CUL4 associated factor 6
  Uniprot ID: Q58WW2
  ENST ID: ENST00000312263
  CDS Start-End: 205-2787
agagtatgaggcgagctccggcccgggtgcggccgggcttcaggggcccaggcgccgctgctgccaccgccatctaacgctgcgccctggaggcccggcgcgcggatggtgccggtgcggctcgggtgttgaaacgggtgtcccctccccctcctcccctcccccacgcggtggtctcccctcccacccggctcaggcagagccatgtctcggggtggctcctacccacacctgttgtgggacgtgaggaaaaggtccctcgggctggaggacccgtcccggctgcggagtcgctacctgggaagaagagaatttatccaaagattaaaacttgaagcaacccttaatgtgcatgatggttgtgttaatacaatctgttggaatgacactggagaatatattttatctggctcagatgacaccaaattagtaattagtaatccttacagcagaaaggttttgacaacaattcgttcagggcaccgagcaaacatatttagtgcaaagttcttaccttgtacaaatgataaacagattgtatcctgctctggagatggagtaatattttataccaacgttgagcaagatgcagaaaccaacagacaatgccaatttacgtgtcattatggaactacttatgagattatgactgtacccaatgacccttacacttttctctcttgtggtgaagatggaactgttaggtggtttgatacacgcatcaaaactagctgcacaaaagaagattgtaaagatgatattttaattaactgtcgacgtgctgccacgtctgttgctatttgcccaccaataccatattaccttgctgttggttgttctgacagctcagtacgaatatatgatcggcgaatgctgggcacaagagctacagggaattatgcaggtcgagggactactggaatggttgcccgttttattccttcccatcttaataataagtcctgcagagtgacatctctgtgttacagtgaagatggtcaagagattctcgttagttactcttcagattacatatatctttttgacccgaaagatgatacagcacgagaacttaaaactccttctgcggaagagagaagagaagagttgcgacaaccaccagttaagcgtttgagacttcgtggtgattggtcagatactggacccagagcaaggccggagagtgaacgagaacgagatggagagcagagtcccaatgtgtcattgatgcagagaatgtctgatatgttatcaagatggtttgaagaagcaagtgaggttgcacaaagcaatagaggacgaggaagatctcgacccagaggtggaacaagtcaatcagatatttcaactcttcctacggtcccatcaagtcctgatttggaagtgagtgaaactgcaatggaagtagatactccagctgaacaatttcttcagccttctacatcctctacaatgtcagctcaggctcattcgacatcatctcccacagaaagccctcattctactcctttgctatcttctccagacagtgaacaaaggcagtctgttgaggcatctggacaccacacacatcatcagtctgataacaataatgaaaagctgagccccaaaccagggacaggtgaaccagttttaagtttgcactacagcacagaaggaacaactacaagcacaataaaactgaactttacagatgaatggagcagtatagcatcaagttctagaggaattgggagccattgcaaatctgagggtcaggaggaatctttcgtcccacagagctcagtgcaaccaccagaaggagacagtgaaacaaaagctcctgaagaatcatcagaggatgtgacaaaatatcaggaaggagtatctgcagaaaacccagttgagaaccatatcaatataacacaatcagataagttcacagccaagccattggattccaactcaggagaaagaaatgacctcaatcttgatcgctcttgtggggttccagaagaatctgcttcatctgaaaaagccaaggaaccagaaacttcagatcagactagcactgagagtgctaccaatgaaaataacaccaatcctgagcctcagttccaaacagaagccactgggccttcagctcatgaagaaacatccaccagggactctgctcttcaggacacagatgacagtgatgatgacccagtcctgatcccaggtgcaaggtatcgagcaggacctggtgatagacgctctgctgttgcccgtattcaggagttcttcagacggagaaaagaaaggaaagaaatggaagaattggatactttgaacattagaaggccgctagtaaaaatggtttataaaggccatcgcaactccaggacaatgataaaagaagccaatttctggggtgctaactttgtaatgagtggttctgactgtggccacattttcatctgggatcggcacactgctgagcatttgatgcttctggaagctgataatcatgtggtaaactgcctgcagccacatccgtttgacccaattttagcctcatctggcatagattatgacataaagatctggtcaccattagaagagtcaaggatttttaaccgaaaacttgctgatgaagttataactcgaaacgaactcatgctggaagaaactagaaacaccattacagttccagcctctttcatgttgaggatgttggcttcacttaatcatatccgagctgaccggttggagggtgacagatcagaaggctctggtcaagagaatgaaaatgaggatgaggaataataaactctttttggcaagcacttaaatgttctgaaatttgtataagacatttattatatttttttctttacagagctttagtgcaattttaaggttatggtttttggagtttttccctttttttgggataacctaacattggtttggaatgattgtgtgcatgaatttgggagattgtataaaacaaaactagcagaatgtttttaaaactttttgccgtgtatgaggagtgctagaaaatgcaaagtgcaatattttccctaaccttcaaatgtgggagcttggatcaatgttgaagaataattttcatcatagtgaaaatgttggttcaaataaatttctacacttgccatttgcatgtttgttgctttctaattaaagaaactggttgttttaaga

SEQ ID NO: 125103 - DNA, 3349 bp, Homo sapiens
  Payload ID: 4560
  Gene Symbol: DCAF6
  Gene Name: DDB1 and CUL4 associated factor 6
  Uniprot ID: Q58WW2
  ENST ID: ENST00000367840
  CDS Start-End: 95-2950
gccggtgcggctcgggtgttgaaacgggtgtcccctccccctcctcccctcccccacgcggtggtctcccctcccacccggctcaggcagagccatgtctcggggtggctcctacccacacctgttgtgggacgtgaggaaaaggtccctcgggctggaggacccgtcccggctgcggagtcgctacctgggaagaagagaatttatccaaagattaaaacttgaagcaacccttaatgtgcatgatggttgtgttaatacaatctgttggaatgacactggagaatatattttatctggctcagatgacaccaaattagtaattagtaatccttacagcagaaaggttttgacaacaattcgttcagggcaccgagcaaacatatttagtgcaaagttcttaccttgtacaaatgataaacagattgtatcctgctctggagatggagtaatattttataccaacgttgagcaagatgcagaaaccaacagacaatgccaatttacgtgtcattatggaactacttatgagattatgactgtacccaatgacccttacacttttctctcttgtggtgaagatggaactgttaggtggtttgatacacgcatcaaaactagctgcacaaaagaagattgtaaagatgatattttaattaactgtcgacgtgctgccacgtctgttgctatttgcccaccaataccatattaccttgctgttggttgttctgacagctcagtacgaatatatgatcggcgaatgctgggcacaagagctacagggaattatgcaggtcgagggactactggaatggttgcccgttttattccttcccatcttaataataagtcctgcagagtgacatctctgtgttacagtgaagatggtcaagagattctcgttagttactcttcagattacatatatctttttgacccgaaagatgatacagcacgagaacttaaaactccttctgcggaagagagaagagaagagttgcgacaaccaccagttaagcgtttgagacttcgtggtgattggtcagatactggacccagagcaaggccggagagtgaacgagaacgagatggagagcagagtcccaatgtgtcattgatgcagagaatgtctgatatgttatcaagatggtttgaagaagcaagtgaggttgcacaaagcaatagaggacgaggaagatctcgacccagaggtggaacaagtcaatcagatatttcaactcttcctacggtcccatcaagtcctgatttggaagtgagtgaaactgcaatggaagtagatactccagctgaacaatttcttcagccttctacatcctctacaatgtcagctcaggctcattcgacatcatctcccacagaaagccctcattctactcctttgctatcttctccagacagtgaacaaaggcagtctgttgaggcatctggacaccacacacatcatcagtctgaatttttaaggggccctgagatagctttgcttcgtaagcgcctgcaacaactgaggcttaagaaggctgagcagcagaggcagcaagagctagctgcacatacccagcaacagccttccacttctgatcagtcttctcatgagggctcttcacaggaccctcatgcttcagattctccttcttctgtggttaacaaacagctcggatccatgtcacttgacgagcaacaggataacaataatgaaaagctgagccccaaaccagggacaggtgaaccagttttaagtttgcactacagcacagaaggaacaactacaagcacaataaaactgaactttacagatgaatggagcagtatagcatcaagttctagaggaattgggagccattgcaaatctgagggtcaggaggaatctttcgtcccacagagctcagtgcaaccaccagaaggagacagtgaaacaaaagctcctgaagaatcatcagaggatgtgacaaaatatcaggaaggagtatctgcagaaaacccagttgagaaccatatcaatataacacaatcagataagttcacagccaagccattggattccaactcaggagaaagaaatgacctcaatcttgatcgctcttgtggggttccagaagaatctgcttcatctgaaaaagccaaggaaccagaaacttcagatcagactagcactgagagtgctaccaatgaaaataacaccaatcctgagcctcagttccaaacagaagccactgggccttcagctcatgaagaaacatccaccagggactctgctcttcaggacacagatgacagtgatgatgacccagtcctgatcccaggtgcaaggtatcgagcaggacctggtgatagatttaatatcagaggaacaacaataggtgatagaataatgagacgctctgctgttgcccgtattcaggagttcttcagacggagaaaagaaaggaaagaaatggaagaattggatactttgaacattagaaggccgctagtaaaaatggtttataaaggccatcgcaactccaggacaatgataaaagaagccaatttctggggtgctaactttgtaatgagtggttctgactgtggccacattttcatctgggatcggcacactgctgagcatttgatgcttctggaagctgataatcatgtggtaaactgcctgcagccacatccgtttgacccaattttagcctcatctggcatagattatgacataaagatctggtcaccattagaagagtcaaggatttttaaccgaaaacttgctgatgaagttataactcgaaacgaactcatgctggaagaaactagaaacaccattacagttccagcctctttcatgttgaggatgttggcttcacttaatcatatccgagctgaccggttggagggtgacagatcagaaggctctggtcaagagaatgaaaatgaggatgaggaataataaactctttttggcaagcacttaaatgttctgaaatttgtataagacatttattatatttttttctttacagagctttagtgcaattttaaggttatggtttttggagtttttccctttttttgggataacctaacattggtttggaatgattgtgtgcatgaatttgggagattgtataaaacaaaactagcagaatgtttttaaaactttttgccgtgtatgaggagtgctagaaaatgcaaagtgcaatattttccctaaccttcaaatgtgggagcttggatcaatgttgaagaataattttcatcatagtgaaaatgttggttcaaataaatttctacacttgccatttgcatgtttgttgctttctaattaaagaaactggttgttttaaga

SEQ ID NO: 125104 - DNA, 3302 bp, Homo sapiens
  Payload ID: 4560
  Gene Symbol: DCAF6
  Gene Name: DDB1 and CUL4 associated factor 6
  Uniprot ID: Q58WW2
  ENST ID: ENST00000367843
  CDS Start-End: 252-2894
gaggagactgttgctgatctttggatgttctggttagtctaagaaggagagtatgaggcgagctccggcccgggtgcggccgggcttcaggggcccaggcgccgctgctgccaccgccatctaacgctgcgccctggaggcccggcgcgcggatggtgccggtgcggctcgggtgttgaaacgggtgtcccctccccctcctcccctcccccacgcggtggtctcccctcccacccggctcaggcagagccatgtctcggggtggctcctacccacacctgttgtgggacgtgaggaaaaggtccctcgggctggaggacccgtcccggctgcggagtcgctacctgggaagaagagaatttatccaaagattaaaacttgaagcaacccttaatgtgcatgatggttgtgttaatacaatctgttggaatgacactggagaatatattttatctggctcagatgacaccaaattagtaattagtaatccttacagcagaaaggttttgacaacaattcgttcagggcaccgagcaaacatatttagtgcaaagttcttaccttgtacaaatgataaacagattgtatcctgctctggagatggagtaatattttataccaacgttgagcaagatgcagaaaccaacagacaatgccaatttacgtgtcattatggaactacttatgagattatgactgtacccaatgacccttacacttttctctcttgtggtgaagatggaactgttaggtggtttgatacacgcatcaaaactagctgcacaaaagaagattgtaaagatgatattttaattaactgtcgacgtgctgccacgtctgttgctatttgcccaccaataccatattaccttgctgttggttgttctgacagctcagtacgaatatatgatcggcgaatgctgggcacaagagctacagggaattatgcaggtcgagggactactggaatggttgcccgttttattccttcccatcttaataataagtcctgcagagtgacatctctgtgttacagtgaagatggtcaagagattctcgttagttactcttcagattacatatatctttttgacccgaaagatgatacagcacgagaacttaaaactccttctgcggaagagagaagagaagagttgcgacaaccaccagttaagcgtttgagacttcgtggtgattggtcagatactggacccagagcaaggccggagagtgaacgagaacgagatggagagcagagtcccaatgtgtcattgatgcagagaatgtctgatatgttatcaagatggtttgaagaagcaagtgaggttgcacaaagcaatagaggacgaggaagatctcgacccagaggtggaacaagtcaatcagatatttcaactcttcctacggtcccatcaagtcctgatttggaagtgagtgaaactgcaatggaagtagatactccagctgaacaatttcttcagccttctacatcctctacaatgtcagctcaggctcattcgacatcatctcccacagaaagccctcattctactcctttgctatcttctccagacagtgaacaaaggcagtctgttgaggcatctggacaccacacacatcatcagtctgattctccttcttctgtggttaacaaacagctcggatccatgtcacttgacgagcaacaggataacaataatgaaaagctgagccccaaaccagggacaggtgaaccagttttaagtttgcactacagcacagaaggaacaactacaagcacaataaaactgaactttacagatgaatggagcagtatagcatcaagttctagaggaattgggagccattgcaaatctgagggtcaggaggaatctttcgtcccacagagctcagtgcaaccaccagaaggagacagtgaaacaaaagctcctgaagaatcatcagaggatgtgacaaaatatcaggaaggagtatctgcagaaaacccagttgagaaccatatcaatataacacaatcagataagttcacagccaagccattggattccaactcaggagaaagaaatgacctcaatcttgatcgctcttgtggggttccagaagaatctgcttcatctgaaaaagccaaggaaccagaaacttcagatcagactagcactgagagtgctaccaatgaaaataacaccaatcctgagcctcagttccaaacagaagccactgggccttcagctcatgaagaaacatccaccagggactctgctcttcaggacacagatgacagtgatgatgacccagtcctgatcccaggtgcaaggtatcgagcaggacctggtgatagacgctctgctgttgcccgtattcaggagttcttcagacggagaaaagaaaggaaagaaatggaagaattggatactttgaacattagaaggccgctagtaaaaatggtttataaaggccatcgcaactccaggacaatgataaaagaagccaatttctggggtgctaactttgtaatgagtggttctgactgtggccacattttcatctgggatcggcacactgctgagcatttgatgcttctggaagctgataatcatgtggtaaactgcctgcagccacatccgtttgacccaattttagcctcatctggcatagattatgacataaagatctggtcaccattagaagagtcaaggatttttaaccgaaaacttgctgatgaagttataactcgaaacgaactcatgctggaagaaactagaaacaccattacagttccagcctctttcatgttgaggatgttggcttcacttaatcatatccgagctgaccggttggagggtgacagatcagaaggctctggtcaagagaatgaaaatgaggatgaggaataataaactctttttggcaagcacttaaatgttctgaaatttgtataagacatttattatatttttttctttacagagctttagtgcaattttaaggttatggtttttggagtttttccctttttttgggataacctaacattggtttggaatgattgtgtgcatgaatttgggagattgtataaaacaaaactagcagaatgtttttaaaactttttgccgtgtatgaggagtgctagaaaatgcaaagtgcaatattttccctaaccttcaaatgtgggagcttggatcaatgttgaagaataattttcatcatagtgaaaatgttggttcaaataaatttctacacttgccatttgcatgtttgttgctttctaattaaagaaactggttgttttaagataccctgaa

SEQ ID NO: 125105 - DNA, 3522 bp, Homo sapiens
  Payload ID: 4560
  Gene Symbol: DCAF6
  Gene Name: DDB1 and CUL4 associated factor 6
  Uniprot ID: Q58WW2
  ENST ID: ENST00000432587
  CDS Start-End: 354-3116
atctcgcgagaaagggttggcggggagggtatccaggacgaggagagggaggagtcgccatcgcctccgcctccgcctcctcctgttggaggggggctgagggaggagactgttgctgatctttggatgttctggttagtctaagaaggagagtatgaggcgagctccggcccgggtgcggccgggcttcaggggcccaggcgccgctgctgccaccgccatctaacgctgcgccctggaggcccggcgcgcggatggtgccggtgcggctcgggtgttgaaacgggtgtcccctccccctcctcccctcccccacgcggtggtctcccctcccacccggctcaggcagagccatgtctcggggtggctcctacccacacctgttgtgggacgtgaggaaaaggtccctcgggctggaggacccgtcccggctgcggagtcgctacctgggaagaagagaatttatccaaagattaaaacttgaagcaacccttaatgtgcatgatggttgtgttttgacaacaattcgttcagggcaccgagcaaacatatttagtgcaaagttcttaccttgtacaaatgataaacagattgtatcctgctctggagatggagtaatattttataccaacgttgagcaagatgcagaaaccaacagacaatgccaatttacgtgtcattatggaactacttatgagattatgactgtacccaatgacccttacacttttctctcttgtggtgaagatggaactgttaggtggtttgatacacgcatcaaaactagctgcacaaaagaagattgtaaagatgatattttaattaactgtcgacgtgctgccacgtctgttgctatttgcccaccaataccatattaccttgctgttggttgttctgacagctcagtacgaatatatgatcggcgaatgctgggcacaagagctacagggaattatgcaggtcgagggactactggaatggttgcccgttttattccttcccatcttaataataagtcctgcagagtgacatctctgtgttacagtgaagatggtcaagagattctcgttagttactcttcagattacatatatctttttgacccgaaagatgatacagcacgagaacttaaaactccttctgcggaagagagaagagaagagttgcgacaaccaccagttaagcgtttgagacttcgtggtgattggtcagatactggacccagagcaaggccggagagtgaacgagaacgagatggagagcagagtcccaatgtgtcattgatgcagagaatgtctgatatgttatcaagatggtttgaagaagcaagtgaggttgcacaaagcaatagaggacgaggaagatctcgacccagaggtggaacaagtcaatcagatatttcaactcttcctacggtcccatcaagtcctgatttggaagtgagtgaaactgcaatggaagtagatactccagctgaacaatttcttcagccttctacatcctctacaatgtcagctcaggctcattcgacatcatctcccacagaaagccctcattctactcctttgctatcttctccagacagtgaacaaaggcagtctgttgaggcatctggacaccacacacatcatcagtctgaatttttaaggggccctgagatagctttgcttcgtaagcgcctgcaacaactgaggcttaagaaggctgagcagcagaggcagcaagagctagctgcacatacccagcaacagccttccacttctgatcagtcttctcatgagggctcttcacaggaccctcatgcttcagattctccttcttctgtggttaacaaacagctcggatccatgtcacttgacgagcaacaggataacaataatgaaaagctgagccccaaaccagggacaggtgaaccagttttaagtttgcactacagcacagaaggaacaactacaagcacaataaaactgaactttacagatgaatggagcagtatagcatcaagttctagaggaattgggagccattgcaaatctgagggtcaggaggaatctttcgtcccacagagctcagtgcaaccaccagaaggagacagtgaaacaaaagctcctgaagaatcatcagaggatgtgacaaaatatcaggaaggagtatctgcagaaaacccagttgagaaccatatcaatataacacaatcagataagttcacagccaagccattggattccaactcaggagaaagaaatgacctcaatcttgatcgctcttgtggggttccagaagaatctgcttcatctgaaaaagccaaggaaccagaaacttcagatcagactagcactgagagtgctaccaatgaaaataacaccaatcctgagcctcagttccaaacagaagccactgggccttcagctcatgaagaaacatccaccagggactctgctcttcaggacacagatgacagtgatgatgacccagtcctgatcccaggtgcaaggtatcgagcaggacctggtgatagatttaatatcagaggaacaacaataggtgatagaataatgagacgctctgctgttgcccgtattcaggagttcttcagacggagaaaagaaaggaaagaaatggaagaattggatactttgaacattagaaggccgctagtaaaaatggtttataaaggccatcgcaactccaggacaatgataaaagaagccaatttctggggtgctaactttgtaatgagtggttctgactgtggccacattttcatctgggatcggcacactgctgagcatttgatgcttctggaagctgataatcatgtggtaaactgcctgcagccacatccgtttgacccaattttagcctcatctggcatagattatgacataaagatctggtcaccattagaagagtcaaggatttttaaccgaaaacttgctgatgaagttataactcgaaacgaactcatgctggaagaaactagaaacaccattacagttccagcctctttcatgttgaggatgttggcttcacttaatcatatccgagctgaccggttggagggtgacagatcagaaggctctggtcaagagaatgaaaatgaggatgaggaataataaactctttttggcaagcacttaaatgttctgaaatttgtataagacatttattatatttttttctttacagagctttagtgcaattttaaggttatggtttttggagtttttccctttttttgggataacctaacattggtttggaatgattgtgtgcatgaatttgggagattgtataaaacaaaactagcagaatgtttttaaaactttttgccgtgtatgaggagtgctagaaaatgcaaagtgcaatattttccctaaccttcaaatgtgggagcttggatcaatgttgaagaataattttcatcatagtgaaaatgttggttcaaataaatttctacacttgccatttgcatgtttgttgctttctaattaaagaaactggttgttttaagataccctg

SEQ ID NO: 125106 - DNA, 2803 bp, Homo sapiens
  Payload ID: 4560
  Gene Symbol: DCAF6
  Gene Name: DDB1 and CUL4 associated factor 6
  ENST ID: ENST00000470721
  CDS Start-End: 240-1658
gctgatctttggatgttctggttagtctaagaaggagagtatgaggcgagctccggcccgggtgcggccgggcttcaggggcccaggcgccgctgctgccaccgccatctaacgctgcgccctggaggcccggcgcgcggatggtgccggtgcggctcgggtgttgaaacgggtgtcccctccccctcctcccctcccccacgcggtggtctcccctcccacccggctcaggcagagccatgtctcggggtggctcctacccacacctgttgtgggacgtgaggaaaaggtccctcgggctggaggacccgtcccggctgcggagtcgctacctgggaagaagagaatttatccaaagattaaaacttgaagcaacccttaatgtgcatgatggttgtgttaatacaatctgttggaatgacactggagaatatattttatctggctcagatgacaccaaattagtaattagtaatccttacagcagaaaggttttgacaacaattcgttcagggcaccgagcaaacatatttagtgcaaagttcttaccttgtacaaatgataaacagattgtatcctgctctggagatggagtaatattttataccaacgttgagcaagatgcagaaaccaacagacaatgccaatttacgtgtcattatggaactacttatgagattatgactgtacccaatgacccttacacttttctctcttgtggtgaagatggaactgttaggtggtttgatacacgcatcaaaactagctgcacaaaagaagattgtaaagatgatattttaattaactgtcgacgtgctgccacgtctgttgctatttgcccaccaataccatattaccttgctgttggttgttctgacagctcagtacgaatatatgatcggcgaatgctgggcacaagagctacagggaattatgcaggtcgagggactactggaatggttgcccgttttattccttcccatcttaataataagtcctgcagagtgacatctctgtgttacagtgaagatggtcaagagattctcgttagttactcttcagattacatatatctttttgacccgaaagatgatacagcacgagaacttaaaactccttctgcggaagagagaagagaagagttgcgacaaccaccagttaagcgtttgagacttcgtggtgattggtcagatactggacccagagcaaggccggagagtgaacgagaacgagatggagagcagagtcccaatgtgtcattgatgcagagaatgtctgatatgttatcaagatggtttgaagaagcaagtgaggttgcacaaagcaatagaggacgaggaagatctcgacccagaggtggaacaagtcaatcagatatttcaactcttcctacggtcccatcaagtcctgatttggaagtgagtgaaactgcaatggaagtagatactccagctgaacaatttcttcagccttctacatcctctacaatgtcagctcaggctcattcgacatcatctcccacagaaagccctcattctactcctttgctatcttctccagacagtgaacaaaggcagtctgttgaggcatctggacaccacacacatcatcagtctggtcccctgaagtcatgggttgctggctcctgctcagagtgacagcaccctgtggagtctgctggtactgacctaaccaccacagagccccactggagcatggagccagcctagagagggtcagattctccttcttctgtggttaacaaacagctcggatccatgtcacttgacgagcaacagggtgcgtgcaacaggagatgcgctatgcccatccatccatagctttattgcaatgcatatactaagctctctcacacctttcgtagcatttcattttgattatggtcttatagtcagtattttgtggaccaaattacaataggtggtattgtacataaaaggtctttttggcctatacagattattttctatgtaagctcatttctcactttggcccttgatgccaactttgaactctctccctataacaaaattataatggatacaaactatatccattttttaaattctaggtatctgtcataaaattgtgtagaactgtgggtgtgaggttaatactacctcgttgcttatgtaggataagttatttaaacacagtgatattctatattactagattgctttagtaatgatacttggttttatgtctcacttatctggtagccaaattcctggtagctttaactaaagactatagttacgaacccagaggtaagctcaaaagctgtcagtcagaagctcccacttccacttgtacttttcaatgtgggaaaggtatagaatcaatctccaagccttgaatagagcctgatgaaatgaacgcgttacttatttatcaggctttattactagcgatcaaatatagcacagagaaggattagtagaggaagacattctgacatgaagggacatctgaaaaggctggagataggaagactaaaaactaaaaaggctatttagtgttagcgcaaatgttttactatctcacctcagaatttaatgaagtattttaaatatattgtgacaaagtgtgataagtaatcttagttaagtctttaagaatgatttaacacgatattcactttctctatttaaaaaggcagatagctggacgtggtggcacacgcctgtaatcccagctacttgggaggctggggcgggaggatcacttgaacccagaaatttgagaccagcctggtcaatatagcgagaccccgtctctt

SEQ ID NO: 125107 - DNA, 1354 bp, Homo sapiens
  Payload ID: 4561
  Gene Symbol: DCAF7
  Gene Name: DDB1 and CUL4 associated factor 7
  Uniprot ID: P61962
  ENST ID: ENST00000431926
  CDS Start-End: 197-1225
ccgttcccaagctggtttgaaactaggggtcgggctcggccgtcgtcgttgtttgtcgccgcatccccgcttccgggttaggccgttcctgcccgccccctcctctcctcccttcggacccatagatctcaggctcggctccccgcccgccgcagcccactgttgacccggcccgtactgcggccccgtggccaccatgtccctgcacggcaaacggaaggagatctacaagtatgaagcgccctggacagtctacgcgatgaactggagtgtgcggcccgataagcgctttcgcttggcgctgggcagcttcgtggaggagtacaacaacaaggttcagcttgttggtttagatgaggagagttcagagtttatttgcagaaacacctttgaccacccataccccaccacaaagctcatgtggatccctgacacaaaaggcgtctatccagacctactggcaacaagcggtgactatctccgtgtgtggagggttggtgaaacagagaccaggctggagtgtttgctaaacaataataagaactctgatttctgtgctcccctgacctcctttgactggaatgaggtggatccttatcttttaggtacctcaagcattgatacgacatgcaccatctgggggctggagacagggcaggtgttagggcgagtgaatctcgtgtctggccacgtgaagacccagctgatcgcccatgacaaagaggtctatgatattgcatttagccgggccgggggtggcagggacatgtttgcctctgtgggtgctgatggctcggtgcggatgtttgacctccgccatctagaacacagcaccatcatttacgaagacccacagcatcacccactgcttcgcctctgctggaacaagcaggaccctaactacctggccaccatggccatggatggaatggaggtggtgattctagatgtccgggttccctgcacacctgtcgccaggttaaacaaccatcgagcatgtgtcaatggcattgcttgggccccacattcatcctgccacatctgcactgcagcggatgaccaccaggctctcatctgggacatccagcaaatgccccgagccattgaggaccctatcctggcctacacagctgaaggagagatcaacaatgtgcagtgggcatcaactcagcccgactggatcgccatctgctacaacaactgcctggagatactcagagtgtagtgttggtggcgctgtgcccacgaggcaggggcttttgtatttcctgcctctgccccacccccaaacctcctgtataagaagtaccgtattttctgcccatcatactttgtaataaaacttgaacatgta

SEQ ID NO: 125108 - DNA, 1220 bp, Homo sapiens
  Payload ID: 4561
  Gene Symbol: DCAF7
  Gene Name: DDB1 and CUL4 associated factor 7
  Uniprot ID: P61962
  ENST ID: ENST00000415273
  CDS Start-End: 179-607
gaaactaggggtcgggctcggccgtcgtcgttgtttgtcgccgcatccccgcttccgggttaggccgttcctgcccgccccctcctctcctcccttcggacccatagatctcaggctcggctccccgcccgccgcagcccactgttgacccggcccgtactgcggccccgtggccaccatgtccctgcacggcaaacggaaggagatctacaagtatgaagcgccctggacagtctacgcgatgaactggagtgtgcggcccgataagcgctttcgcttggcgctgggcagcttcgtggaggagtacaacaacaaggtggtgattctagatgtccgggttccctgcacacctgtcgccaggttaaacaaccatcgagcatgtgtcaatggcattgcttgggccccacattcatcctgccacatctgcactgcagcggatgaccaccaggctctcatctgggacatccagcaaatgccccgagccattgaggaccctatcctggcctacacagctgaaggagagatcaacaatgtgcagtgggcatcaactcagcccgactggatcgccatctgctacaacaactgcctggagatactcagagtgtagtgttggtggcgctgtgcccacgaggcaggggcttttgtatttcctgcctctgccccacccccaaagtaagaagaaacatgtttccagtggccagtatgtctttcattgctttgcacccactgttaccagaagctgctctaggagttcctggccagtcaccccatcgccctctgtggcagactcagtgctgtgtggcgcctcctcagcccagggctgagttttaagattttctctcctttcctcttctcctttggttcctcaattaaaaaatgtgtgtatatttgtttgtcaggcgttgtgttgaggagcagttcacgcactggctgtgtctattcctctgcccaggtgtctctgtttgctgcccaaggcagcagttcatgtctcgtccatgtccatgttcgtgttagcacttacgtgggaacaaataccaatttgtcttttctcctagtatcagtgtgtttaacaaattttaactttgtatatttgttatctatcaggctaatttttttatgaaaagaattttactctcctgcttcatttctttgtcttatagtcctccctctttgcaccttcttctcttccctcagtgcctggagctggtactgggcccctg

SEQ ID NO: 125109 - DNA, 751 bp, Homo sapiens
  Payload ID: 4561
  Gene Symbol: DCAF7
  Gene Name: DDB1 and CUL4 associated factor 7
  ENST ID: ENST00000615512
  CDS Start-End: 132-751
cccgcttccgggttaggccgttcctgcccgccccctcctctcctcccttcggacccatagatctcaggctcggctccccgcccgccgcagcccactgttgacccggcccgtactgcggccccgtggccaccatgtccctgcacggcaaacggaaggagatctacaagtatgaagcgccctggacagtctacgcgatgaactggagtgtgcggcccgataagcgctttcgcttggcgctgggcagcttcgtggaggagtacaacaacaaggttggtgaaacagagaccaggctggagtgtttgctaaacaataataagaactctgatttctgtgctcccctgacctcctttgactggaatgaggtggatccttatcttttaggtacctcaagcattgatacgacatgcaccatctgggggctggagacagggcaggtgttagggcgagtgaatctcgtgtctggccacgtgaagacccagctgatcgcccatgacaaagaggtctatgatattgcatttagccgggccgggggtggcagggacatgtttgcctctgtgggtgctgatggctcggtgcggatgtttgacctccgccatctagaacacagcaccatcatttacgaagacccacagcatcacccactgcttcgcctctgctggaacaagcaggaccctaactacctggccaccatggccatggatggaatggaggtggtgattctagatgtccgggttccctgcacacctgtcgc

SEQ ID NO: 125110 - DNA, 6340 bp, Homo sapiens
  Payload ID: 4561
  Gene Symbol: DCAF7
  Gene Name: DDB1 and CUL4 associated factor 7
  Uniprot ID: P61962
  ENST ID: ENST00000614556
  CDS Start-End: 218-1246
aaaacggaaggtggttgtcgtccgttcccaagctggtttgaaactaggggtcgggctcggccgtcgtcgttgtttgtcgccgcatccccgcttccgggttaggccgttcctgcccgccccctcctctcctcccttcggacccatagatctcaggctcggctccccgcccgccgcagcccactgttgacccggcccgtactgcggccccgtggccaccatgtccctgcacggcaaacggaaggagatctacaagtatgaagcgccctggacagtctacgcgatgaactggagtgtgcggcccgataagcgctttcgcttggcgctgggcagcttcgtggaggagtacaacaacaaggttcagcttgttggtttagatgaggagagttcagagtttatttgcagaaacacctttgaccacccataccccaccacaaagctcatgtggatccctgacacaaaaggcgtctatccagacctactggcaacaagcggtgactatctccgtgtgtggagggttggtgaaacagagaccaggctggagtgtttgctaaacaataataagaactctgatttctgtgctcccctgacctcctttgactggaatgaggtggatccttatcttttaggtacctcaagcattgatacgacatgcaccatctgggggctggagacagggcaggtgttagggcgagtgaatctcgtgtctggccacgtgaagacccagctgatcgcccatgacaaagaggtctatgatattgcatttagccgggccgggggtggcagggacatgtttgcctctgtgggtgctgatggctcggtgcggatgtttgacctccgccatctagaacacagcaccatcatttacgaagacccacagcatcacccactgcttcgcctctgctggaacaagcaggaccctaactacctggccaccatggccatggatggaatggaggtggtgattctagatgtccgggttccctgcacacctgtcgccaggttaaacaaccatcgagcatgtgtcaatggcattgcttgggccccacattcatcctgccacatctgcactgcagcggatgaccaccaggctctcatctgggacatccagcaaatgccccgagccattgaggaccctatcctggcctacacagctgaaggagagatcaacaatgtgcagtgggcatcaactcagcccgactggatcgccatctgctacaacaactgcctggagatactcagagtgtagtgttggtggcgctgtgcccacgaggcaggggcttttgtatttcctgcctctgccccacccccaaagtaagaagaaacatgtttccagtggccagtatgtctttcattgctttgcacccactgttaccagaagctgctctaggagttcctggccagtcaccccatcgccctctgtggcagactcagtgctgtgtggcgcctcctcagcccagggctgagttttaagattttctctcctttcctcttctcctttggttcctcaattaaaaaatgtgtgtatatttgtttgtcaggcgttgtgttgaggagcagttcacgcactggctgtgtctattcctctgcccaggtgtctctgtttgctgcccaaggcagcagttcatgtctcgtccatgtccatgttcgtgttagcacttacgtgggaacaaataccaatttgtcttttctcctagtatcagtgtgtttaacaaattttaactttgtatatttgttatctatcaggctaatttttttatgaaaagaattttactctcctgcttcatttctttgtcttatagtcctccctctttgcaccttcttctcttccctcagtgcctggagctggtactgggcccctggccccatgagcagtttgccttcttgagtcactgcctgtgtagtacatacctgaccgggagtccaaaccaccttggtgctctgaagtccactgactcatcacacctttcttagcctggctcctctcaagggcattctgggcttgtaaacagacataggaagcctctgtttaccctgaagcaccactgtccagcccattggttcccactggcagcatggtagagctgagagaaacaggctctcagggtacctgacttgaggggaatcgtttcatgaagctgaacttcaagcatatttccagtacattctttcagagtctgtttttccatccaaatataagccccaggccattccacttagtgtcttttcaatgataggcaagaatgatatctgagttgaacttcggtgcttctgttgtttgagtttactgtgcctggtggtatattgggcattctttggattgagtgttctgaggtgagagagtcttcccgaggcatcctgtctgtgcttccaaccctgaacaagaccttacatgagagatggactgatggactgcggcaatcctgggctgtcaagtggatagatagttaaaaagcattatactgtgggtaatgaaaagggaggaaaaaaaaagaaggaaaaggaattatagacccccagggtcagccagttaagagctctacccacacctgtcaacccctctctcccccagtttaggttctgagcagtattggacttgtagcctgcagttgtcttttgacttgcaggccgcaggtgtctttctgttatgtgaatgagttccatggaggggcatatgtgtgattccaccgttagatgagcccttggggcaggcagtttgggatgtgctcttgggggaaagttggctgtttccttgcgctctgctcctacccgaaggtttttaagtccctctgaattgctcatctgagattagtagagtagcaggcctgaaggatgatggttttgtcctctttggttctcacctgcttgagaagtaaaacagtaactttgttcttctgggcccttaagcttttttggttaagtcttccttttcagaagtagatgtcattatatgccaaaagtctagctctttgctttaccatacagggacctgtcccaaagaaaaaggctctttttttagccagcatatttccccttctacccttttactttgttgttctgattttaggactctggctggccatgtgcttgtggttgcctctcctgcatttgccactggatttgcactgcatcgtttggagatacaaagcgagcagttcttggtcagaaccctcctctgcttttcattgtgtttgataatggttactgggtccttctctcaagggtagcaaggccaagctgatggctgcttgtttaggaggccatcagttccttcctgtggagaagggtctgaaatggaagtcagtggtagaaggggctggtctgctgggcagggcttacatccactgagttctaagattcctttcctgatctgcacctacgcctggtctgtatggtggaatttgtcagctggaactcagaaacaacaacttgaaaaaaaaataataattagaacatatttgcataagatagctatttactctggaaaccaacaacttttgagatttcccttgccctgtggacgcccagctcctgtcatccttccttaggtcctgcagtacagtcttcccctgaatgccaccggggacccagggggactccacccccctaagcaagcacacacatactcacagttgatgagttgctggtctttgagtcccagctctcttaccctccctttactccaccagcccgacgacccatgactgaggaggggatttctacagtctcaggatttagaaagtctgtaagccatccatgctccagaaagcaccgatctgttgtagttgcaaaaacaactctgtaatttgttgaggttctcaaactgacagccagcgagactgggtgggaggccctggatctgttctccctgactgcgggaggagcagccactaggactttagcaggaagcccacatggaggctccgccaggctgtggcccagctggtgatggcccttttgctcctggcagcctgaggcacagctgcctgtattgtcctcatctgttctgactgaaggatggaggtgctgaataaattaggcctcaggcctctaccaccagagagctggagaatgggtccacgtcattcaaggacctgaattttttatgctcaggagcattggaatcctcttcttccagggaggaattagcctgcaaggttaggacttgaagagggaaggtatttaataactgggcgaggatgggtgtggtggctcacacctgtaatcccagcattttgggaggctgaggtggccagatcccaaggtcagaagatcgagaccatcctggctaacatggtgaaaccccatctctactaaaaatacaaaaaaaaattagccgggggtggtggcgggtacctgtagtcctagctacttgggaggctgaggcaggagaatggcgtgaacctgggaggtggagcttgcagtgagccaagatcgtgccactgcactccagcctgggcgacagagcaagactccgtctcaaaaaataaaaaaaaaaaaaaaataggtgaaaattccttataaatccaggattggctctgagagaactggctaagattcaggaagaaacaaaaaattcagaatcctacaaggttttgatgacaattagggccaaaattttaggaggagatgtaggatgcaggagaaaattaaagtgttttctttatatcagaggaggaaatagtagaggtcagtgaaggtctggggtagggaaacattcagactgtccattgcatggctgtggagtgagactgcccttagcctgggtcagccttcctgggccataaattgggcatccgtgatgctaggtaactgtgggaacaaaatgacagcttagagcagccatgggtgatgtttggtggtaaaaaacctacaggcgtttggggtcccatgattgttccagaccatgactcttcctggttgtgggtttgttacagagcaggagaagcagaggttatgacagttatgcagactttccccctcctttttctcttttctcttccccttgcttttccactgtttcttcctgctgccacctgggccttgaattcctgggctgtgaagacatgtagcagctgcagggtttaccacacgtgggagggcagcccagtactgtccctctgccttccccactttgagaatatggcagcccctttcattcctggcttggggtaggggagaccattgaagtagaagcctcaaagcagacttttccctttactgtgtgtactccaggacgaagaaggaagatcatgcttgatacttagattggttttcccagggaagagggcggagcagagcaaagtcactgtgaaccctgggccaggccctggctgggccagctcctgagagcgtctcgtgttgcagacccttgcccacttcacccacctgcaccttctccccctctcacagtgtcactgctgctaatggtcaaagtcaaatgtgtggccacatgggatgggccaggtcctctcaggctactttctggatgtcatttttaaaatatggaaacatgcaggtgccttcccaaagaggcttggactggtatatccaacgagaaacaaataagctaaagaaagtttaaactcaagaagaaagatgttgacagtctatgtaacagctggaaagtttataggcacccacctttgggacaacccagtgattatgaacatgtgatatctactatttaaaagaaatgttctcaccttgggttgattgtggtataccatgtgttatgaaaattgttgagctgaagctttgaatcgatttagttgagtctgactcacttgctttggttcctgtgtattttactacccctcttgtcagtgaccttccttccccaccccacccagagtgaatttgtagcatgattgtataaacctctatgtagaaaatggagatttcttgctctgaaatgttaagctctaactgatccatttctgtgtcctttagcctagtatgtctgaacttccattcttgttatatatttaaactttccctctatattataggttttgtggcatccacggtcaggtgtagaggaagctgccccttgcagaactgtactgtaatatttttcttttataaatattttcacaggactgattgtacacagggcttgtaataaaattttaacactgtgctgtgaaacaactatggggaatctccattgaaggctacttcatgggcacctgaaagtggagtgttatagctatgactttctatttcttgtttcctaagtaaattaaacctaattttcaccctttcattctgtttcagcctcctgtataagaagtaccgtattttctgcccatcatactttgtaataaaacttgaacatgta

SEQ ID NO: 125111 - DNA, 3972 bp, Homo sapiens
  Payload ID: 4562
  Gene Symbol: DCAF8
  Gene Name: DDB1 and CUL4 associated factor 8
  Uniprot ID: Q5TAQ9
  ENST ID: ENST00000326837
  CDS Start-End: 302-2095
gcggtggtggtggcggccgctggccagtgtaagatggcggcggcgttggtggtggcagtggacggggcggctgggcctggaacagtcggagcagccgctagcagaaggatgacccaagacgggaagcgggctgctgagcctcgccgattcccgtgcttgtaactgccccagccggacaccccccctcccttgacctacccgtccttcagtgaatctacagacctattttctcaggagctcagcctggccttacttcagtgataaaaggaggaaaggctggctacagcaaacatcattcaagatgtccagcaaagggagcagcacagatggcagaacagacttagctaatggaagcctgtctagcagtccagaggagatgtctggagctgaagaggggagggagacatcctcaggcattgaagtggaggcctcagacctgagtttgagcttgactggggatgatggtggccccaaccgcaccagcacagaaagtcgaggcacagacacagagagctcaggtgaagataaggactctgacagcatggaggacactggtcattactccattaatgatgaaaatcgagtccatgaccgctcagaggaagaggaagaggaggaagaagaggaggaagaagagcagcctcggcgccgtgtacagcgcaagcgggctaaccgtgaccaggactcatcagatgatgagcgggccctagaggactgggtgtcctcagaaacatcagctctaccccgacctcgctggcaagccctccctgcccttcgggagcgggagctgggttcaagtgcccgctttgtctatgaggcctgtggggcaagagtctttgtgcagcgtttccgcctgcagcatgggcttgagggccatactggttgtgtcaataccctgcactttaaccagcgcggcacctggctggccagtggcagcgatgacctgaaggtggtggtgtgggattgggtacggcggcagccagtactggactttgagagtggccacaaaagtaatgtgttccaggccaagtttcttcctaacagtggtgattctactctggccatgtgtgcccgtgacgggcaggttcgagtagcagaactgtctgccacacagtgttgcaagaatacaaaacgtgtggcccagcacaagggagcgtcccacaagttggcactggaaccagactctccctgtacgttcttatctgcaggtgaagatgcagttgttttcaccattgacctgagacaagaccgcccagcgtcgaaactggtggtgacaaaagagaaagagaagaaagtggggctgtatacgatctatgtgaatcctgccaatacccaccagtttgcagtgggtggacgagatcagtttgtaaggatttatgaccagaggaaaattgatgagaatgagaacaatggagtactcaagaagttctgtcctcatcacctggtgaacagtgagtccaaagcaaacatcacctgtcttgtgtacagccacgacggcacagagctcctggccagttacaatgatgaagacatttacctcttcaactcctctcacagtgatggggcccagtatgttaagagatacaagggccacagaaataatgccacagtaaaaggcgtcaatttctatggccccaagagtgagtttgtggtgagcggtagtgactgtgggcacatcttcctctgggagaaatcatcctgccagattattcagttcatggagggggacaagggaggcgtggtaaactgtcttgagccccaccctcacctgcctgtgctggcaaccagtggcctagaccatgatgtgaagatctgggcacccacagctgaagcttccactgagctgacagggttaaaagatgtgattaagaagaacaagcgggagcgggatgaagatagcttgcaccaaactgacctgtttgatagtcacatgctgtggttccttatgcatcacctgagacagagacgccatcaccggcgctggcgagaacctggggttggggccacagacgcggactctgatgagtctcccagctcctcagacacatcggacgaggaggagggccctgaccgggtgcagtgcatgccatcttgaggcctcatacctaggtggggcaggctggggctgccaacctgatcctgcctgggcaaccctttcctgtcccaggccctacattcagcagaaacgcactttggactttttgctttagataaaagaaagacatcccaggagaaggacaaaccagaggagtgaaccaacaaagagtacctaggaatgggagttgagccctggaatggggctctatggagaggtgcataggactcggcagaaatggcctctccccaaagcctctttttgagaggagagggaagcctattttgttaactggtttgggatagggaatggggtttctttttctttaatctcccttgtttcttgggctgggggaggggtggggggaacaactggctattcagtaccaaggggccagagtggagggtaggagtgccactctctctttggtttaggtttttgaccttttcttcctttgttttttaaaagtttatgacagttggctccccccccacccccagcaaccccatcccagaatcctattttcctgggaagtccttaaagcccctaaccatcccacactcttcactttcctttccaccttattcattctctgtacttaccacagtattttgcacttgattacatatccttcactctcttctcttcatcccatcaccccctaaataggtcaggtgagggaggctgggaagaggtgggaggaggggcagaagtgaaggaagaataggaaggatattacctcttctgttatttttttaagaaacattgtttggtggcagcaatctccctgtccctatcactgttagaggcctaattttatatctataaatatattaaaaagcaagtcaaacttggatgtatcaaggtaaaattattgtcaaagtttaaatacctatatattctctgaatgcaataaagggacttaagagtgaacaagagtaatggtgtggaagtgacacctggggtcagtttacctctgtgtatggtcactagagattgggacttaccctttaggttttaggaggcttgagaatggaaggatcctcatttctgcccttcctggttccctgctttggtgtaggggttgggaaaaacaggaaattcctctcagctctgcctcagatctcctacctctccttaagtcttgtagggggttccaaggatggctcttctaaccagaggctggcctgtctttaaaacttaactactttagggtggtgccaccactgcagactattgtggtactttgtgacagaagacatgtacacacacaccacacacatacatacacactctctcactctgtctctcttacctttagctgcttgatcattaagccatccaacttcatgccagttcccttctttatagaagagtgaagggaaagacttcctgggtttgacttaaaccttgtccacctcttgatattttaggattgaggaataagtcattaatctaaggactgattacagtggctggagcttgggcacttgtcttatcactggtcactgagtctgaaagtcccagctgaattcttgcccttaagtgcttttgctgctatttttttgcccccagttccacaagatccaaccaagaattctgtatcctgggacagtcagattcttctaaatcaggccaggaaggaggggaaaagagtgagagaatggtattcccagatacttcttcctcctgccccttttcccagcagctctgagaccagatgttggctgctgtacttactccctgaggtagggaatgtgtggtgatcgagtggtctgtgttcctattgctggtggggtgatagggtgggctaaaaaccatgcactctggaatttgttgtattttctcccagtaaagcttttcttctcccgactgct

SEQ ID NO: 125112 - DNA, 4106 bp, Homo sapiens
  Payload ID: 4562
  Gene Symbol: DCAF8
  Gene Name: DDB1 and CUL4 associated factor 8
  Uniprot ID: Q5TAQ9
  ENST ID: ENST00000368073
  CDS Start-End: 436-2229
agtgtaagatggcggcggcgttggtggtggcagtggacggggcggctgggcctggaacagtcggagcagccgctagcagaaggatgacccaagacgggaagcgggctgctgagcctcgccgattcccgtgcttgtaactgccccagccggacaccccccctcccttgacctacccggtctgtgtctcgttccggctcggcctgcgccccccctcgcttcccagccggtttcccctaaggatgggcctgacccgtatcccaagctcttagcgctcaggtcttttccttccgccgacccgaagtcatcgctgggagtactggttgccctttcctcagtccttcagtgaatctacagacctattttctcaggagctcagcctggccttacttcagtgataaaaggaggaaaggctggctacagcaaacatcattcaagatgtccagcaaagggagcagcacagatggcagaacagacttagctaatggaagcctgtctagcagtccagaggagatgtctggagctgaagaggggagggagacatcctcaggcattgaagtggaggcctcagacctgagtttgagcttgactggggatgatggtggccccaaccgcaccagcacagaaagtcgaggcacagacacagagagctcaggtgaagataaggactctgacagcatggaggacactggtcattactccattaatgatgaaaatcgagtccatgaccgctcagaggaagaggaagaggaggaagaagaggaggaagaagagcagcctcggcgccgtgtacagcgcaagcgggctaaccgtgaccaggactcatcagatgatgagcgggccctagaggactgggtgtcctcagaaacatcagctctaccccgacctcgctggcaagccctccctgcccttcgggagcgggagctgggttcaagtgcccgctttgtctatgaggcctgtggggcaagagtctttgtgcagcgtttccgcctgcagcatgggcttgagggccatactggttgtgtcaataccctgcactttaaccagcgcggcacctggctggccagtggcagcgatgacctgaaggtggtggtgtgggattgggtacggcggcagccagtactggactttgagagtggccacaaaagtaatgtgttccaggccaagtttcttcctaacagtggtgattctactctggccatgtgtgcccgtgacgggcaggttcgagtagcagaactgtctgccacacagtgttgcaagaatacaaaacgtgtggcccagcacaagggagcgtcccacaagttggcactggaaccagactctccctgtacgttcttatctgcaggtgaagatgcagttgttttcaccattgacctgagacaagaccgcccagcgtcgaaactggtggtgacaaaagagaaagagaagaaagtggggctgtatacgatctatgtgaatcctgccaatacccaccagtttgcagtgggtggacgagatcagtttgtaaggatttatgaccagaggaaaattgatgagaatgagaacaatggagtactcaagaagttctgtcctcatcacctggtgaacagtgagtccaaagcaaacatcacctgtcttgtgtacagccacgacggcacagagctcctggccagttacaatgatgaagacatttacctcttcaactcctctcacagtgatggggcccagtatgttaagagatacaagggccacagaaataatgccacagtaaaaggcgtcaatttctatggccccaagagtgagtttgtggtgagcggtagtgactgtgggcacatcttcctctgggagaaatcatcctgccagattattcagttcatggagggggacaagggaggcgtggtaaactgtcttgagccccaccctcacctgcctgtgctggcaaccagtggcctagaccatgatgtgaagatctgggcacccacagctgaagcttccactgagctgacagggttaaaagatgtgattaagaagaacaagcgggagcgggatgaagatagcttgcaccaaactgacctgtttgatagtcacatgctgtggttccttatgcatcacctgagacagagacgccatcaccggcgctggcgagaacctggggttggggccacagacgcggactctgatgagtctcccagctcctcagacacatcggacgaggaggagggccctgaccgggtgcagtgcatgccatcttgaggcctcatacctaggtggggcaggctggggctgccaacctgatcctgcctgggcaaccctttcctgtcccaggccctacattcagcagaaacgcactttggactttttgctttagataaaagaaagacatcccaggagaaggacaaaccagaggagtgaaccaacaaagagtacctaggaatgggagttgagccctggaatggggctctatggagaggtgcataggactcggcagaaatggcctctccccaaagcctctttttgagaggagagggaagcctattttgttaactggtttgggatagggaatggggtttctttttctttaatctcccttgtttcttgggctgggggaggggtggggggaacaactggctattcagtaccaaggggccagagtggagggtaggagtgccactctctctttggtttaggtttttgaccttttcttcctttgttttttaaaagtttatgacagttggctccccccccacccccagcaaccccatcccagaatcctattttcctgggaagtccttaaagcccctaaccatcccacactcttcactttcctttccaccttattcattctctgtacttaccacagtattttgcacttgattacatatccttcactctcttctcttcatcccatcaccccctaaataggtcaggtgagggaggctgggaagaggtgggaggaggggcagaagtgaaggaagaataggaaggatattacctcttctgttatttttttaagaaacattgtttggtggcagcaatctccctgtccctatcactgttagaggcctaattttatatctataaatatattaaaaagcaagtcaaacttggatgtatcaaggtaaaattattgtcaaagtttaaatacctatatattctctgaatgcaataaagggacttaagagtgaacaagagtaatggtgtggaagtgacacctggggtcagtttacctctgtgtatggtcactagagattgggacttaccctttaggttttaggaggcttgagaatggaaggatcctcatttctgcccttcctggttccctgctttggtgtaggggttgggaaaaacaggaaattcctctcagctctgcctcagatctcctacctctccttaagtcttgtagggggttccaaggatggctcttctaaccagaggctggcctgtctttaaaacttaactactttagggtggtgccaccactgcagactattgtggtactttgtgacagaagacatgtacacacacaccacacacatacatacacactctctcactctgtctctcttacctttagctgcttgatcattaagccatccaacttcatgccagttcccttctttatagaagagtgaagggaaagacttcctgggtttgacttaaaccttgtccacctcttgatattttaggattgaggaataagtcattaatctaaggactgattacagtggctggagcttgggcacttgtcttatcactggtcactgagtctgaaagtcccagctgaattcttgcccttaagtgcttttgctgctatttttttgcccccagttccacaagatccaaccaagaattctgtatcctgggacagtcagattcttctaaatcaggccaggaaggaggggaaaagagtgagagaatggtattcccagatacttcttcctcctgccccttttcccagcagctctgagaccagatgttggctgctgtacttactccctgaggtagggaatgtgtggtgatcgagtggtctgtgttcctattgctggtggggtgatagggtgggctaaaaaccatgcactctggaatttgttgtattttctcccagtaaagcttttcttctcccgactgct

SEQ ID NO: 125113 - DNA, 3824 bp, Homo sapiens
  Payload ID: 4562
  Gene Symbol: DCAF8
  Gene Name: DDB1 and CUL4 associated factor 8
  Uniprot ID: Q5TAQ9
  ENST ID: ENST00000368074
  CDS Start-End: 154-1947
gcaggcgcaagcgcagagagcggaggcggtggtggtggcggccgctggccagttccttcagtgaatctacagacctattttctcaggagctcagcctggccttacttcagtgataaaaggaggaaaggctggctacagcaaacatcattcaagatgtccagcaaagggagcagcacagatggcagaacagacttagctaatggaagcctgtctagcagtccagaggagatgtctggagctgaagaggggagggagacatcctcaggcattgaagtggaggcctcagacctgagtttgagcttgactggggatgatggtggccccaaccgcaccagcacagaaagtcgaggcacagacacagagagctcaggtgaagataaggactctgacagcatggaggacactggtcattactccattaatgatgaaaatcgagtccatgaccgctcagaggaagaggaagaggaggaagaagaggaggaagaagagcagcctcggcgccgtgtacagcgcaagcgggctaaccgtgaccaggactcatcagatgatgagcgggccctagaggactgggtgtcctcagaaacatcagctctaccccgacctcgctggcaagccctccctgcccttcgggagcgggagctgggttcaagtgcccgctttgtctatgaggcctgtggggcaagagtctttgtgcagcgtttccgcctgcagcatgggcttgagggccatactggttgtgtcaataccctgcactttaaccagcgcggcacctggctggccagtggcagcgatgacctgaaggtggtggtgtgggattgggtacggcggcagccagtactggactttgagagtggccacaaaagtaatgtgttccaggccaagtttcttcctaacagtggtgattctactctggccatgtgtgcccgtgacgggcaggttcgagtagcagaactgtctgccacacagtgttgcaagaatacaaaacgtgtggcccagcacaagggagcgtcccacaagttggcactggaaccagactctccctgtacgttcttatctgcaggtgaagatgcagttgttttcaccattgacctgagacaagaccgcccagcgtcgaaactggtggtgacaaaagagaaagagaagaaagtggggctgtatacgatctatgtgaatcctgccaatacccaccagtttgcagtgggtggacgagatcagtttgtaaggatttatgaccagaggaaaattgatgagaatgagaacaatggagtactcaagaagttctgtcctcatcacctggtgaacagtgagtccaaagcaaacatcacctgtcttgtgtacagccacgacggcacagagctcctggccagttacaatgatgaagacatttacctcttcaactcctctcacagtgatggggcccagtatgttaagagatacaagggccacagaaataatgccacagtaaaaggcgtcaatttctatggccccaagagtgagtttgtggtgagcggtagtgactgtgggcacatcttcctctgggagaaatcatcctgccagattattcagttcatggagggggacaagggaggcgtggtaaactgtcttgagccccaccctcacctgcctgtgctggcaaccagtggcctagaccatgatgtgaagatctgggcacccacagctgaagcttccactgagctgacagggttaaaagatgtgattaagaagaacaagcgggagcgggatgaagatagcttgcaccaaactgacctgtttgatagtcacatgctgtggttccttatgcatcacctgagacagagacgccatcaccggcgctggcgagaacctggggttggggccacagacgcggactctgatgagtctcccagctcctcagacacatcggacgaggaggagggccctgaccgggtgcagtgcatgccatcttgaggcctcatacctaggtggggcaggctggggctgccaacctgatcctgcctgggcaaccctttcctgtcccaggccctacattcagcagaaacgcactttggactttttgctttagataaaagaaagacatcccaggagaaggacaaaccagaggagtgaaccaacaaagagtacctaggaatgggagttgagccctggaatggggctctatggagaggtgcataggactcggcagaaatggcctctccccaaagcctctttttgagaggagagggaagcctattttgttaactggtttgggatagggaatggggtttctttttctttaatctcccttgtttcttgggctgggggaggggtggggggaacaactggctattcagtaccaaggggccagagtggagggtaggagtgccactctctctttggtttaggtttttgaccttttcttcctttgttttttaaaagtttatgacagttggctccccccccacccccagcaaccccatcccagaatcctattttcctgggaagtccttaaagcccctaaccatcccacactcttcactttcctttccaccttattcattctctgtacttaccacagtattttgcacttgattacatatccttcactctcttctcttcatcccatcaccccctaaataggtcaggtgagggaggctgggaagaggtgggaggaggggcagaagtgaaggaagaataggaaggatattacctcttctgttatttttttaagaaacattgtttggtggcagcaatctccctgtccctatcactgttagaggcctaattttatatctataaatatattaaaaagcaagtcaaacttggatgtatcaaggtaaaattattgtcaaagtttaaatacctatatattctctgaatgcaataaagggacttaagagtgaacaagagtaatggtgtggaagtgacacctggggtcagtttacctctgtgtatggtcactagagattgggacttaccctttaggttttaggaggcttgagaatggaaggatcctcatttctgcccttcctggttccctgctttggtgtaggggttgggaaaaacaggaaattcctctcagctctgcctcagatctcctacctctccttaagtcttgtagggggttccaaggatggctcttctaaccagaggctggcctgtctttaaaacttaactactttagggtggtgccaccactgcagactattgtggtactttgtgacagaagacatgtacacacacaccacacacatacatacacactctctcactctgtctctcttacctttagctgcttgatcattaagccatccaacttcatgccagttcccttctttatagaagagtgaagggaaagacttcctgggtttgacttaaaccttgtccacctcttgatattttaggattgaggaataagtcattaatctaaggactgattacagtggctggagcttgggcacttgtcttatcactggtcactgagtctgaaagtcccagctgaattcttgcccttaagtgcttttgctgctatttttttgcccccagttccacaagatccaaccaagaattctgtatcctgggacagtcagattcttctaaatcaggccaggaaggaggggaaaagagtgagagaatggtattcccagatacttcttcctcctgccccttttcccagcagctctgagaccagatgttggctgctgtacttactccctgaggtagggaatgtgtggtgatcgagtggtctgtgttcctattgctggtggggtgatagggtgggctaaaaaccatgcactctggaatttgttgtattttctcccagtaaagcttttcttctcccgactgct

SEQ ID NO: 125114 - DNA, 517 bp, Homo sapiens
  Payload ID: 4562
  Gene Symbol: DCAF8
  Gene Name: DDB1 and CUL4 associated factor 8
  ENST ID: ENST00000407642
  CDS Start-End: 200-517
gtaagatggcggcggcgttggtggtggcagtggacggggcggctgggcctggaacagtcggagcagccgctagcagaaggatgacccaagacgggaagcgggctgctgagcctcgccgattcccgtgcttgtaactgccccagccggacaccccccctcccttgacctacccggctggctacagcaaacatcattcaagatgtccagcaaagggagcagcacagatggcagaacagacttagctaatggaagcctgtctagcagtccagaggagatgtctggagctgaagaggggagggagacatcctcaggcattgaagtggaggcctcagacctgagtttgagcttgactggggatgatggtggccccaaccgcaccagcacagaaagtcgaggcacagacacagagagctcaggtgaagataaggactctgacagcatggaggacactggtcattactccattaatgatgaaaatcgagtccatgaccgctcagaggaagaggaagaggaggaa

SEQ ID NO: 125115 - DNA, 439 bp, Homo sapiens
  Payload ID: 4562
  Gene Symbol: DCAF8
  Gene Name: DDB1 and CUL4 associated factor 8
  ENST ID: ENST00000419626
  CDS Start-End: 318-439
gctgggcctggaacagtcggagcagccgctagcagaaggatgacccaagacgggaagcgggctgctgagcctcgccgattcccgtgcttgtaactgccccagccggacaccccccctcccttgacctacccggtctgtgtctcgttccggctcggcctgcgccccccctcgcttcccagccggtttcccctaaggatgggcctgacccgtatcccaagctcttagcgctcaggtcttttccttccgccgacccgaagtcatcgctgggagtactggttgccctttcctcaggctggctacagcaaacatcattcaagatgtccagcaaagggagcagcacagatggcagaacagacttagctaatggaagcctgtctagcagtccagaggagatgtctggagctgaagaggggagggagacatcctcaggcattgaagt

SEQ ID NO: 125116 - DNA, 501 bp, Homo sapiens
  Payload ID: 4562
  Gene Symbol: DCAF8
  Gene Name: DDB1 and CUL4 associated factor 8
  ENST ID: ENST00000440682
  CDS Start-End: 173-501
gcaaacggggccggaaagcgtggcagcgcaggcgcaagcgcagagagcggaggcggtggtggtggcggccgctggccagttgaatctacagacctattttctcaggagctcagcctggccttacttcagtgataaaaggaggaaaggctggctacagcaaacatcattcaagatgtccagcaaagggagcagcacagatggcagaacagacttagctaatggaagcctgtctagcagtccagaggagatgtctggagctgaagaggggagggagacatcctcaggcattgaagtggaggcctcagacctgagtttgagcttgactggggatgatggtggccccaaccgcaccagcacagaaagtcgaggcacagacacagagagctcaggtgaagataaggactctgacagcatggaggacactggtcattactccattaatgatgaaaatcgagtccatgaccgctcagaggaagaggaagaggaggaagaagaggagga

SEQ ID NO: 125117 - DNA, 728 bp, Homo sapiens
  Payload ID: 4562
  Gene Symbol: DCAF8
  Gene Name: DDB1 and CUL4 associated factor 8
  ENST ID: ENST00000447377
  CDS Start-End: 93-728
aaagcgtggcagcgcaggcgcaagcgcagagagcggaggcggtggtggtggcggccgctggccagtgctggctacagcaaacatcattcaagatgtccagcaaagggagcagcacagatggcagaacagacttagctaatggaagcctgtctagcagtccagaggagatgtctggagctgaagaggggagggagacatcctcaggcattgaagtggaggcctcagacctgagtttgagcttgactggggatgatggtggccccaaccgcaccagcacagaaagtcgaggcacagacacagagagctcaggtgaagataaggactctgacagcatggaggacactggtcattactccattaatgatgaaaatcgagtccatgaccgctcagaggaagaggaagaggaggaagaagaggaggaagaagagcagcctcggcgccgtgtacagcgcaagcgggctaaccgtgaccaggactcatcagatgatgagcgggccctagaggactgggtgtcctcagaaacatcagctctaccccgacctcgctggcaagccctccctgcccttcgggagcgggagctgggttcaagtgcccgctttgtctatgaggcctgtggggcaagagtctttgtgcagcgtttccgcctgcagcatgggcttgagggccatactggttgtgtcaataccctgcactttaaccagcgcggcacctggctggccagtggcagc

SEQ ID NO: 125118 - DNA, 1426 bp, Homo sapiens
  Payload ID: 4562
  Gene Symbol: DCAF8
  Gene Name: DDB1 and CUL4 associated factor 8
  Uniprot ID: Q5TAQ9
  ENST ID: ENST00000475733
  CDS Start-End: 229-1050
cggcgttggtggtggcagtggacggggcggctgggcctggaacagtcggagcagccgctagcagaaggatgacccaagacgggaagcgggctgctgagcctcgccgattcccgtgcttgtaactgccccagccggacaccccccctcccttgacctacccggagctcagcctggccttacttcagtgataaaaggaggaaaggctggctacagcaaacatcattcaagatgtccagcaaagggagcagcacagatggcagaacagacttagctaatggaagcctgtctagcagtccagaggagatgtctggagctgaagaggggagggagacatcctcaggcattgaagtggaggcctcagacctgagtttgagcttgactggggatgatggtggccccaaccgcaccagcacagaaagtcgaggcacagacacagagagctcaggtgaagataaggactctgacagcatggaggacactggtcattactccattaatgatgaaaatcgagtccatgaccgctcagaggaagaggaagaggaggaagaagaggaggaagaagagcagcctcggcgccgtgtacagcgcaagcgggctaaccgtgaccaggactcatcagatgatgagcgggccctagaggactgggtgtcctcagaaacatcagctctaccccgacctcgctggcaagccctccctgcccttcgggagcgggagctgggttcaagtgcccgctttgtctatgaggcctgtggggcaagagtctttgtgcagcgtttccgcctgcagcatgggcttgagggccatactggttgtgtcaataccctgcactttaaccagcgcggcacctggctggccagtggcagcgatgacctgaaggtggtggtgtgggattgggtacggcggcagccagtactggactttgagagtggccacaaaagtaatgtgttccaggtgaggcaagggagcataatagcaactgagagaatcaggcatgagttagagaaatctgaactgcagcatggattgggagctgatagtgagttattgtaggaattacatatcgggacatggccctactttggctcccctaatgacctaaatacactgaaagactcttggcaaccctagattccttgagcatgtggactgttggaagcctcataggtagggtgcatgcagcttattaaatgtgtgctggtaggaggcagtgtagtataagcacaggctcttgaaccaaactgcctgagttcaaatcctagcccttctgcttactagctcagtgatcttggccaagttattttacctttgtcttcagtttatctgtaaaatgggactaataacacatagggttatgaggattaagtaacaatagaagctaagcagttagaactgtgactggtacttaataaacatttgataaatgtta

SEQ ID NO: 125119 - DNA, 2277 bp, Homo sapiens
  Payload ID: 4562
  Gene Symbol: DCAF8
  Gene Name: DDB1 and CUL4 associated factor 8
  ENST ID: ENST00000461888
  CDS Start-End: 184-1437
gtcgcaaacggggccggaaagcgtggcagcgcaggcgcaagcgcagagagcggaggcggtggtggtggcggccgctggccagttccttcagtgaatctacagacctattttctcaggagctcagcctggccttacttcagtgataaaaggaggaaaggctggctacagcaaacatcattcaagatgtccagcaaagggagcagcacagatggcagaacagacttagctaatggaagcctgtctagcagtccagaggagatgtctggagctgaagaggggagggagacatcctcaggcattgaagtggaggcctcagacctgagtttgagcttgactggggatgatggtggccccaaccgcaccagcacagaaagtcgaggcacagacacagagagctcaggtgaagataaggactctgacagcatggaggacactggtcattactccattaatgatgaaaatcgagtccatgaccgctcagaggaagaggaagaggaggaagaagaggaggaagaagagcagcctcggcgccgtgtacagcgcaagcgggctaaccgtgaccaggactcatcagatgatgagcgggccctagaggactgggtgtcctcagaaacatcagctctaccccgacctcgctggcaagccctccctgcccttcgggagcgggagctgggttcaagtgcccgctttgtctatgaggcctgtggggcaagagtctttgtgcagcgtttccgcctgcagcatgggcttgagggccatactggttgtgtcaataccctgcactttaaccagcgcggcacctggctggccagtggcagcgatgacctgaaggtggtggtgtgggattgggtacggcggcagccagtactggactttgagagtggccacaaaagtaatgtgttccaggccaagtttcttcctaacagtggtgattctactctggccatgtgtgcccgtgacgggcaggttcgagtagcagaactgtctgccacacagtgttgcaagaatacaaaacgtgtggcccagcacaagggagcgtcccacaagttggcactggaaccagactctccctgtacgttcttatctgcaggtgaagatgcagttgttttcaccattgacctgagacaagaccgcccagcgtcgaaactggtggtgacaaaagagaaagagaagaaagtggggctgtatacgatctatgtgaatcctgccaatacccaccagtttgcagtgggtggacgagatcagtttgtaaggatttatgaccagaggaaaattgatgagaatgagaacaatggagtactcaagaagttctgtcctcatcacctgagctcctggccagttacaatgatgaagacatttacctcttcaactcctctcacagtgatggggcccagtatgttaagagatacaagggccacagaaataatgccacagtaaaaggcgtcaatttctatggccccaagagtgagtttgtggtgagcggtagtgactgtgggcacatcttcctctgggagaaatcatcctgccagattattcagttcatggagggggacaagggaggcgtgggacaagggttgggggtggtatcagaggacagccccttagtctcccaagagcactttgatgcttgatcccattctctacattcccccagcccagtcatctaaggccagagctcttttctctgctcaggcattattgacaggataagtcctggcattcagacaggtctggtgaagtgaccaggtactctggcccagaagttctctgtcggctccccccgcaggctccaattcaggtaaactgtcttgagccccaccctcacctgcctgtgctggcaaccagtggcctagaccatgatgtgaagatctgggcacccacagctgaagcttccactgagctgacagggttaaaagatgtgattaagaagaacaagcgggagcgggatgaagatagcttgcaccaaactgacctgtttgatagtcacatgctgtggttccttatgcatcacctgagacagagacgccatcaccggcgctggcgagaacctggggttggggccacagacgcggactctgatgagtctcccagctcctcagacacatcggacgaggaggagggccctgaccgggtgcagtgcatgccatcttgaggcctcatacctaggtggggcaggctggggctgccaacctgatcctgcctgggcaaccctttcctgtcccaggccctacattcagcagaaacgcactttggactttttgctttagataaaagaaa

SEQ ID NO: 125120 - DNA, 573 bp, Homo sapiens
  Payload ID: 4562
  Gene Symbol: DCAF8
  Gene Name: DDB1 and CUL4 associated factor 8
  ENST ID: ENST00000473382
  CDS Start-End: 1-244
gttaaaagatgtgattaagaagaacaagcgggagcgggatgaagatagcttgcaccaaactgacctgtttgatagtcacatgctgtggttccttatgcatcacctgagacagagacgccatcaccggcgctggcgagaacctggggttggggccacagacgcggactctgatgagtctcccagctcctcagacacatcggacgaggaggagggccctgaccgggtgcagtgcatgccatcttgaggcctcatacctagataaaagaaagacatcccaggagaaggacaaaccagaggagtgaaccaacaaagagtacctaggaatgggagttgagccctggaatggggctctatggagaggtgcataggactcggcagaaatggcctctccccaaagcctctttttgagaggagagggaagcctattttgttaactggtttgggatagggaatggggtttctttttctttaatctcccttgtttcttgggctgggggaggggtggggggaacaactggctattcagtaccaaggggccagagtggagggtaggagtgccactctctctttggt

SEQ ID NO: 125121 - DNA, 919 bp, Homo sapiens
  Payload ID: 4562
  Gene Symbol: DCAF8
  Gene Name: DDB1 and CUL4 associated factor 8
  ENST ID: ENST00000495887
  CDS Start-End: 545-919
ttagaacggtcccatttggtccctgttagttggaaagcatctggtggcttgaatttctgactcatgattgttactggagtctctgtaaacaaaccggcactagcgctatcacattctctccgggatttccccccctgctctgtggcttcttgttgagaggttgtttggttatggtttagcgttgaaaagattcaggttatccttttaaatgactttacgttttagtggagctgggagattacttgcctggcttctaatcttcatgttggttcattttatttccatatgtgtgtgggttatttgttcagtaattagaattagataaagtattctgcttttaagtagttttgagaaggcctaaaaatactaaagtgtattcataaatatttttattatgttcagtagaagacacacctttgccatgtaaattttaacttttctcagtccttcagtgaatctacagacctattttctcaggagctcagcctggccttacttcagtgataaaaggaggaaaggaagcctgtctagcagtccagaggagatgtctggagctgaagaggggagggagacatcctcaggcattgaagtggaggcctcagacctgagtttgagcttgactggggatgatggtggccccaaccgcaccagcacagaaagtcgaggcacagacacagagagctcaggtgaagataaggactctgacagcatggaggacactggtcattactccattaatgatgaaaatcgagtccatgaccgctcagaggaagaggaagaggaggaagaagaggaggaagaagagcagcctcggcgccgtgtacagcgcaagcgggctaaccgtgaccaggactcatcagatgatgagcgggccctagaggactgggtgtcctcagaaacatcagctctaccccgacct

SEQ ID NO: 125122 - DNA, 876 bp, Homo sapiens
  Payload ID: 4562
  Gene Symbol: DCAF8
  Gene Name: DDB1 and CUL4 associated factor 8
  ENST ID: ENST00000490368
  CDS Start-End: 1-329
atgaagacatttacctcttcaactcctctcacagtgatggggcccagtatgttaagagatacaagggccacagaaataatgccacagtaaaaggcgtcaatttctatggccccaagagtgagtttgtggtgagcggtagtgactgtgggcacatcttcctctgggagaaatcatcctgccagattattcagttcatggagggggacaagggaggcgtgagagatgcagggctgaatgccctctcccaggccagcatttgtccattctccaaaagcattctgcaggccagtttgcttttagctcagccaatgccagggtttgatgattaacccatttgcccagacaggtctggtgaagtgaccaggtactctggcccagaagttctctgtcggctccccccgcaggctccaattcaggtaaactgtcttgagccccaccctcacctgcctgtgctggcaaccagtggcctagaccatgatgtgaagatctgggcacccacagctgaagcttccactgagctgacagggttaaaagatgtgattaagaagaacaagcgggagcgggatgaagatagcttgcaccaaactgacctgtttgatagtcacatgctgtggttccttatgcatcacctgagacagagacgccatcaccggcgctggcgagaacctggggttggggccacagacgcggactctgatgagtctcccagctcctcagacacatcggacgaggaggagggccctgaccgggtgcagtgcatgccatcttgaggcctcatacctaggtggggcaggctggggctgccaacctgatcctgcctgggcaaccctttcctgtcccaggccctacattcagcagaaacgcactttggacttt

SEQ ID NO: 125123 - DNA, 513 bp, Homo sapiens
  Payload ID: 4562
  Gene Symbol: DCAF8
  Gene Name: DDB1 and CUL4 associated factor 8
  ENST ID: ENST00000477163
  CDS Start-End: 1-201
agatacaagggccacagaaataatgccacagtaaaaggcgtcaatttctatggccccaagagtgagtttgtggtgagcggtagtgactgtgggcacatcttcctctgggagaaatcatcctgccagattattcagttcatggagggggacaagggaggctgggaagaggtgggaggaggggcagaagtgaaggaagaataggaaggatattacctcttctgttatttttttaagaaacattgtttggtggcagcaatctccctgtccctatcactgttagaggcctaattttatatctataaatatattaaaaagcaagtcaaacttggatgtatcaaggtaaaattattgtcaaagtttaaatacctatatattctctgaatgcaataaagggacttaagagtgaacaagagtaatggtgtggaagtgacacctggggtcagtttacctctgtgtatggtcactagagattgggacttaccctttaggttttaggaggcttgagaatggaag

SEQ ID NO: 125124 - DNA, 1607 bp, Homo sapiens
  Payload ID: 4562
  Gene Symbol: DCAF8
  Gene Name: DDB1 and CUL4 associated factor 8
  Uniprot ID: Q5TAQ9
  ENST ID: ENST00000610139
  CDS Start-End: 410-1231
gtggcagtggacggggcggctgggcctggaacagtcggagcagccgctagcagaaggatgacccaagacgggaagcgggctgctgagcctcgccgattcccgtgcttgtaactgccccagccggacaccccccctcccttgacctacccggtctgtgtctcgttccggctcggcctgcgccccccctcgcttcccagccggtttcccctaaggatgggcctgacccgtatcccaagctcttagcgctcaggtcttttccttccgccgacccgaagtcatcgctgggagtactggttgccctttcctcagtccttcagtgaatctacagacctattttctcaggagctcagcctggccttacttcagtgataaaaggaggaaaggctggctacagcaaacatcattcaagatgtccagcaaagggagcagcacagatggcagaacagacttagctaatggaagcctgtctagcagtccagaggagatgtctggagctgaagaggggagggagacatcctcaggcattgaagtggaggcctcagacctgagtttgagcttgactggggatgatggtggccccaaccgcaccagcacagaaagtcgaggcacagacacagagagctcaggtgaagataaggactctgacagcatggaggacactggtcattactccattaatgatgaaaatcgagtccatgaccgctcagaggaagaggaagaggaggaagaagaggaggaagaagagcagcctcggcgccgtgtacagcgcaagcgggctaaccgtgaccaggactcatcagatgatgagcgggccctagaggactgggtgtcctcagaaacatcagctctaccccgacctcgctggcaagccctccctgcccttcgggagcgggagctgggttcaagtgcccgctttgtctatgaggcctgtggggcaagagtctttgtgcagcgtttccgcctgcagcatgggcttgagggccatactggttgtgtcaataccctgcactttaaccagcgcggcacctggctggccagtggcagcgatgacctgaaggtggtggtgtgggattgggtacggcggcagccagtactggactttgagagtggccacaaaagtaatgtgttccaggtgaggcaagggagcataatagcaactgagagaatcaggcatgagttagagaaatctgaactgcagcatggattgggagctgatagtgagttattgtaggaattacatatcgggacatggccctactttggctcccctaatgacctaaatacactgaaagactcttggcaaccctagattccttgagcatgtggactgttggaagcctcataggtagggtgcatgcagcttattaaatgtgtgctggtaggaggcagtgtagtataagcacaggctcttgaaccaaactgcctgagttcaaatcctagcccttctgcttactagctcagtgatcttggccaagttattttacctttgtcttcagtttatctgtaaaatgggactaataacacatagggttatgaggattaagtaacaatagaagctaagcagttagaactgtgactggtacttaataaacatttgataaatgtta

SEQ ID NO: 125125 - DNA, 3363 bp, Homo sapiens
  Payload ID: 4563
  Gene Symbol: DCAF8L1
  Gene Name: DDB1 and CUL4 associated factor 8-like 1
  Uniprot ID: A6NGE4
  ENST ID: ENST00000441525
  CDS Start-End: 22-1824
ctacagcaaacatcgttcgagatgtcccaccaagagggcagcacaggtggcttaccagacttagtgactgaaagcctgttcagcagcccagaggagcagtctggagtagcagcggtgacggcggcctcctcagacattgaaatggcagccacagagccatcgaccggagatggtggtgataccagggatggtggtttcctgaacgatgccagcacagaaaatcaaaacacagactcagaaagttcaagtgaagacgtcgaacttgaaagcatgggtgaaggtttatttggttacccgttagtgggagaggagacagaaagggaggaggaagaagaagagatggaggaggaaggggaggaggaagaacagcctcggatgtgtccacgatgcggtggcaccaaccatgatcagtgtttgttagacgaggatcaggcgttggaggagtggatttcctcagagacatctgccctgccccgatctcgctggcaagtccttactgctcttcgccagcggcagctgggttcaagtgcccgctttgtatatgaggcctgtggggcaagaacctttgtgcagcgtttccgcctgcagtatcttcttggaagccatgccggttctgtcagtaccatacactttaaccagcgtggcacccgactggccagtagcggtgatgacttaagggtgatagtgtgggactgggtgcggcagaagccagtactgaactttgagagtggtcacgatattaatgtcatccaggctaagttctttcctaactgtggtgattccactctggccatgtgtggccatgatggacaggtacgggtagcagaactaattaatgcatcatattgcgagaatactaagcgtgtggccaagcacaggggacctgcccacgagttggctctggagccagactctccttataagttcctcacttcaggtgaagatgccgttgtgttcaccattgacctcaggcaagaccggccagcttcaaaagttgtggtaacaagagaaaatgataagaaagtcggactgtatacaatctctatgaatcctgccaatatttaccaatttgcagtgggtggacatgatcagtttgtaaggatttatgaccagaggagaattgataagaaagaaaacaatggagtactcaagaaattcactcctcatcatctggtttattgtgatttcccaacaaacatcacctgcgttgtgtacagccacgatggcacagagctcctggccagctacaatgatgaagatatttacctcttcaactcctctctcagtgatggtgctcaatatgttaagagatataaggggcacagaaataatgacacaatcaaatgtgttaatttctatggcccccggagtgagtttgtcgtgagcggtagtgattgtgggcacgtcttcttctgggagaaatcatcctcccagatcatccagttcatggagggggacagaggagatatagtaaactgtcttgaaccccacccttacctacctgtgttggcgaccagtggcctagatcagcatgtcaggatctggacacccacagctaaaactgccactgagcttactgggttaaaagatgtgattaagaagaacaagcaggagcgagatgaagacaacttgaactatacggactcgtttgacaaccgcatgcttcggttcttcgtgcgtcacctgttacagagagctcatcaacccggctggagagatcatggagctgagttcccagatgaagaagagttggatgagtcttccagcacctcagatacatccgaggaggagggccaagatcgagtgcagtgcataccatcctgaaggcctcatatccagtccagctagatgccacctaagtacactggactttaaaattcagtttgactaatttagaattgtcaattgattaacagatttgctttttgtcttctgtttttgttaccccttatatgagtgcatacacaacttatttatgcctcttttcctttgttcccttataattgacctctaaaattgcataattttgttgaaaaaattaatggccttattagatgtatctactcatttcagacattctgaaagctattactttttagttttttcattttttaccaatttattttgaagataaagttcttcagttgagttgaaaatttcataaacgtgtttattctttagaggtaaaataaggcaaaccatagttctttgaatactgacacacacatacacacagtctcagaaaaggaaaagagaagtagtgtgtagattaattcctaacacttggccacacacacacacagcttcaaaagttgtagtaacaagagagaagaataagaaagtgggactgtatacaatctctatgaatcctgccaatatttaccaattcgcagtgggtggacatgatcggtttttaaggatttatgaccagaggagaattgatgagaaagaaaacaatggagtactcaagaaattcactcttcatcatctggttaattgtgattttccaacaaacatcacctgcattgtgtacagccacgatggcacagagctcctggccagctatgcacacacacatacacacagagccttagaaaaggaaaacaagaagtagtgtgtagatgaattcctaaccagataattcatctcctcagagcaaataacttgggattatccacattttctgaatcaatatgttaataatattgattaatttgagcacactgaagctggtaagaactaaattaaatttaatcacatgacattgtttactctatgcattaaatgttcttgaagttttatggttgggaactcccacaggattacattccaggaagtcctcctggcgcaagcatctcctataagataccagataggaatataaaaatctctcatatttgaaaacatttattttaattaacttttaagaataagttgcaataaaaattgtttatacttacacataaccatttgatacagttggtagaaaaatcctatttaacatccatgcattgcttaaaatttagctgttttatgagtttgttttgaaaattgttgcaataaaaattgtttatacttacaagtgatgtagttggtagaaaaatcctatttgacatccatgcattgcttaaaatttagctgttttatgagtttgttttaaaaattgttgcagtaaaaattgtttatacttacaagtgatgtagttggtagaaaaatcctatttgacatccatggattgcttaaagttctctcagctgtcctcgagtttaaattgttttaaaaattgtcttaagctttacttaatataaatttaagttactagatgttaaattactgttcaataaaaatattcatttttatttt

SEQ ID NO: 125126 - DNA, 2295 bp, Homo sapiens
  Payload ID: 4564
  Gene Symbol: DCAF8L2
  Gene Name: DDB1 and CUL4 associated factor 8-like 2
  Uniprot ID: P0C7V8
  ENST ID: ENST00000451261
  CDS Start-End: 400-2295
tttagaagacgtcttgcactgttcaaatgcagaggaaggcgaatgactcgagtctatggttttggtatactgagcctggggctactggtgtcagcctggtggtagtgcagctcatctgatgcctggggctgcaggatcctagttggttcctgtgacagaccttgggaagctcaatctcagatgtgttttcttaattgaagaaaatcatatcacatgtgaactttctgaccatactgtggagcggtgctaataaggaggaagctgcactgttgcagaggtccattaactctttcaggacggtgtggaatcagtggggaaatctctaattgctactgacacagagcttttaggggcctggcctttgcagttccagatctactacagcaaacatcgttcaagatgtcccaccaagaaggcagcacagacggcttaccagacttagggactgaaagcctgttcagcagcccagaggagcagtctggagccgtggcggcgacagaggcctcctcagacattgacatagcgacctcagagctgagtgtgacagtgaccggagatggcagtgatagcagggatggtggattccccaacgatgccagcacagaaaatcgaagctcagaccaagaaagcgcaagtgaagacatcgaacttgagagcttggaggactttgagcatttcctcatgagtggtgaaagtttattccattaccctttagtgggagaggaggagacagaaagggaggaggaagacgaagagatacaagaggagggaggggaggaggaggaagaggaggaggaggaggaggaggaggaggaggaggaggaggaggaggaagaagaacagcctcgggcgggtccacaaggcagtggcggcaaccatgagcagtattcgttagaggaggatcaggcgctggaggagtgggtttcctcagagacatctgccctgccccgacctcgctggcaggtcgttactgctcttcaccagcggcagctgggttcacgtccccgctttgtatatgaggcctgtggggcaagagcctttgtgcagcgtttccgcctgcaatatcgtcttgcagaccatgtcggctgtgtcaatactgtacactttaaccagcgtggcacccggctggccagtagcggtgatgacctaaaggtgatagtgtgggactgggtgcggcagaggccagtactgaactttgaaagtggtcacacaaataatgtcttccaggccaagttccttcctaactgtggtgattccactctggccatgtgtgcccgtgatgggcaggtacgggtagcagagttaattaatgcatcatatttcaacaatactaagtgtgtggcccagcacaggggacctgcccacaagttggctctggagcctgactctccttataagttcctcacttcaggtgaagatgctgttgtcttcaccattgacctcagacaagaccggccagcttcaaaagttgtggtaacaagagaaaatgataagaaagtgggactgtatacaattactgtgaatcccgccaatacctaccaatttgcagtgggtggacaagatcagtttgtaaggatttatgaccagaggaaaattgataagaaagaaaacaatggcgtgctcaagaaattcactcctcatcatctggttaattgtgatttcccaacaaacatcacctgcgttgtgtacagccacgatggcacagagctgctagccagctacaatgatgacgatatttacctcttcaactcctctcacagtgatggtgctcaatacagtaagagatttaagggacacagaaataataccacagtcaaaggtgttaatttctatggccccaggagtgagtttgtagtgagcggtagtgattgcgggcacatcttcttctgggagaaatcatcctgccaaatcatccagttcctaaaggggagcagagaaggtacaataaactgtcttgaaccccacccttacctacctgtgttggcgtgcagtggcctagatcatgatgtcaagatctggacacccacagctaaagctgccactgagcttactgggttaaagaaggtgattaagaagaacaagtgggaacgagatgaagacagcttgcaccatggcagcctgtttgaccagtacatgctttggttcctcctgcgtcacgtgacgcagagaggtcgtcaccaggactggagaagtggtgaagctgaatttccagatgaagaatcggatgagtcttccagcacttcagagacatctgaggaggaggtccaagaccgagtgcagtgcatgccatcctga

SEQ ID NO: 125127 - DNA, 562 bp, Homo sapiens
  Payload ID: 4564
  Gene Symbol: DCAF8L2
  Gene Name: DDB1 and CUL4 associated factor 8-like 2
  ENST ID: ENST00000431122
  CDS Start-End: 475-562
actgttcaaatgcagaggaaggcgaatgactcgagtctatggttttggtatactgagcctggggctactggtgtcagcctggtggtagtgcagctcatctgatgcctggggctgcaggatcctagttggttcctgtgacagaccttgggaagctcaatctcagatgtgttttcttaattgaagaaaatcatatcacatgtgaactttctgaccatactgtggagcggtgctaataaggagggttctgtgttcacttgactaccagaaacatttctagtttaccatcagagttttagccgcttccatgcttctgtgactgcagctactctcaggaagctgcactgttgcagaggtccattaactctttcaggacggtgtggaatcagtggggaaatctctaattgctactgacacagagcttttaggggcctggcctttgcagttccagatctactacagcaaacatcgttcaagatgtcccaccaagaaggcagcacagacggcttaccagacttagggactgaaagcctgttcagcagcccagaggagcagtctggagccg

SEQ ID NO: 125128 - DNA, 2013 bp, Homo sapiens
  Payload ID: 4564
  Gene Symbol: DCAF8L2
  Gene Name: DDB1 and CUL4 associated factor 8-like 2
  Uniprot ID: P0C7V8
  ENST ID: ENST00000545306
  CDS Start-End: 88-1983
tcctaaccgcaggccaactttcttcccagagcttttaggggcctggcctttgcagttccagatctactacagcaaacatcgttcaagatgtcccaccaagaaggcagcacagacggcttaccagacttagggactgaaagcctgttcagcagcccagaggagcagtctggagccgtggcggcgacagaggcctcctcagacattgacatagcgacctcagagctgagtgtgacagtgaccggagatggcagtgatagcagggatggtggattccccaacgatgccagcacagaaaatcgaagctcagaccaagaaagcgcaagtgaagacatcgaacttgagagcttggaggactttgagcatttcctcatgagtggtgaaagtttattccattaccctttagtgggagaggaggagacagaaagggaggaggaagacgaagagatacaagaggagggaggggaggaggaggaagaggaggaggaggaggaggaggaggaggaggaggaggaggaggaggaagaagaacagcctcgggcgggtccacaaggcagtggcggcaaccatgagcagtattcgttagaggaggatcaggcgctggaggagtgggtttcctcagagacatctgccctgccccgacctcgctggcaggtcgttactgctcttcaccagcggcagctgggttcacgtccccgctttgtatatgaggcctgtggggcaagagcctttgtgcagcgtttccgcctgcaatatcgtcttgcagaccatgtcggctgtgtcaatactgtacactttaaccagcgtggcacccggctggccagtagcggtgatgacctaaaggtgatagtgtgggactgggtgcggcagaggccagtactgaactttgaaagtggtcacacaaataatgtcttccaggccaagttccttcctaactgtggtgattccactctggccatgtgtgcccgtgatgggcaggtacgggtagcagagttaattaatgcatcatatttcaacaatactaagtgtgtggcccagcacaggggacctgcccacaagttggctctggagcctgactctccttataagttcctcacttcaggtgaagatgctgttgtcttcaccattgacctcagacaagaccggccagcttcaaaagttgtggtaacaagagaaaatgataagaaagtgggactgtatacaattactgtgaatcccgccaatacctaccaatttgcagtgggtggacaagatcagtttgtaaggatttatgaccagaggaaaattgataagaaagaaaacaatggcgtgctcaagaaattcactcctcatcatctggttaattgtgatttcccaacaaacatcacctgcgttgtgtacagccacgatggcacagagctgctagccagctacaatgatgacgatatttacctcttcaactcctctcacagtgatggtgctcaatacagtaagagatttaagggacacagaaataataccacagtcaaaggtgttaatttctatggccccaggagtgagtttgtagtgagcggtagtgattgcgggcacatcttcttctgggagaaatcatcctgccaaatcatccagttcctaaaggggagcagagaaggtacaataaactgtcttgaaccccacccttacctacctgtgttggcgtgcagtggcctagatcatgatgtcaagatctggacacccacagctaaagctgccactgagcttactgggttaaagaaggtgattaagaagaacaagtgggaacgagatgaagacagcttgcaccatggcagcctgtttgaccagtacatgctttggttcctcctgcgtcacgtgacgcagagaggtcgtcaccaggactggagaagtggtgaagctgaatttccagatgaagaatcggatgagtcttccagcacttcagagacatctgaggaggaggtccaagaccgagtgcagtgcatgccatcctgaaggcctcatatccagtccagctacatgcca

SEQ ID NO: 125129 - DNA, 5503 bp, Homo sapiens
  Payload ID: 4565
  Gene Symbol: DDHD1
  Gene Name: DDHD domain containing 1
  Uniprot ID: Q8NEL9
  ENST ID: ENST00000323669
  CDS Start-End: 1-2703
atgaattacccgggccgcgggtccccacggagccccgagcataacggccgaggcggcggcggcggcgcctgggagctgggctcagacgcgaggccagcgttcggcggcggcgtctgctgcttcgagcacctgcccggcggggacccggacgacggcgacgtgcccctggccctgctgcgcggggaacccgggctgcatttggcgccgggcaccgacgaccacaaccaccacctcgcgctggacccctgcctcagtgacgagaactatgacttcagctccgccgagtcgggctcctcgctgcgctactacagcgagggtgagagcggcggcggcggcagctccttgtcgctgcacccgccgcagcagcctccgctggtcccgacgaactcggggggcggcggcgcgacaggagggtcccccggggaaaggaaacgtacccggcttggcggcccggcggcccggcaccgctatgaggtagtgacggagctgggcccggaggaggtacgctggttctacaaggaggacaagaagacctggaagcccttcatcggctacgactcgctccgcatcgagctcgccttccggaccctgctgcagaccacgggtgcccggccccagggcggggaccgggacggcgaccatgtgtgctcccccacgggcccagcctccagttccggagaagatgacgatgaggaccgcgcctgcggcttctgccagagtacgacggggcacgagccggagatggtggagcttgtgaacatcgagcctgtgtgcgtgcggggcggcctctacgaggtggatgtgacccaaggagagtgctacccggtgtactggaaccaggctgataaaataccagtaatgcgtggacagtggtttattgacggcacttggcagcctctagaagaggaagaaagtaatttaattgagcaagaacatctcaattgttttaggggccagcagatgcaggaaaatttcgatattgaagtgtcaaaatccatagatggaaaagatgctgttcatagtttcaagttgagtcgaaaccatgtggactggcacagtgtggatgaagtatatctttatagtgatgcaacaacatctaaaattgcaagaacagttacccaaaaactgggattttctaaagcatcaagtagtggtaccagacttcatagaggttatgtagaagaagccacattagaagacaagccatcacagactacccatattgtatttgttgtgcatggcattgggcagaaaatggaccaaggaagaattatcaaaaatacagctatgatgagagaagctgcaagaaaaatagaagaaaggcatttttccaaccatgcaacacatgttgaatttctgcctgttgagtggcggtcaaaacttactcttgatggagacactgttgattccattactcctgacaaagtacgaggtttaagggatatgctgaacagcagtgcaatggacataatgtattatactagtccactttatagagatgaactagttaaaggccttcagcaagagctgaatcgattgtattcccttttctgttctcggaatccagactttgaagaaaaagggggtaaagtctcaatagtatcacattccttgggatgtgtaattacttatgacataatgactggctggaatccagttcggctgtatgaacagttgctgcaaaaggaagaagagttgcctgatgaacgatggatgagctatgaagaacgacatcttcttgatgaactctatataactaaacgacggctgaaggaaatagaagaacggcttcacggattgaaagcatcatctatgacacaaacacctgccttaaaatttaaggttgagaatttcttctgtatgggatccccattagcagttttcttggcgttgcgtggcatccgcccaggaaatactggaagtcaagaccatattttgcctagagagatttgtaaccggttactaaatatttttcatcctacagatccagtggcttatagattagaaccattaatactgaaacactacagcaacatttcacctgtccagatccactggtacaatacttcaaatcctttaccttatgaacatatgaagccaagctttctcaacccagctaaagaacctacctcagtttcagagaatgaaggcatttcaaccataccaagccctgtgacctcaccagttttgtcccgccgacactatggagaatctataacaaatataggcaaagcaagcatattaggggctgctagcattggaaagggacttggaggaatgttgttctcaagatttggacgttcatctacaacacagtcatctgaaacatcaaaagactcaatggaagatgagaagaagccagttgcctcaccttctgctaccaccgtagggacacagacccttccacatagcagttctggcttcctcgattctgcatatttcagacttcaagaatcgttctttaatctcccacaacttctttttccggaaaatgtaatgcagaataaagataatgccctcgtggagttggatcacaggattgattttgaactcagagaaggccttgtggagagccgctattggtcagctgtcacgtcgcatactgcctattggtcatccttggatgttgccctttttcttttaaccttcatgtataaacatgagcacgatgatgatgcaaaacccaatttagatccaatctgaactctcttgaaggacatgaatggcctaaaactgattttttttttttccgttaaaatgtgtgtgtcaagatacggagatttcagggttaaagtatatttcagttttctttagggcaacatatatttgaatttaaaagcactttatttaaaaaaaaaagaagttttcagttctgaagaagtcatttacagtttgcatcattttaattatgagtctgacaaaaccttctccagagaatcaagcaagacctggatgtgaagaaggtttgggtaaactgcatgtaaaggctacaaatcacaatctgattcctcccaaatataaaggcatatggaacataatgtattaaccaaagtatgttataaatcaaaaatggtcaaggttcagcatattctatatgaagatcacaaggtggtatcgttttagatttctatgaaggctttcatttgtacatccctttgaaaaaatataacagatttaaaatgttttgaatttaacttgtttagaaaaactaatgcttaaaacaatatttgaactactgtatttataatttattacctctaattgctttatttcagtgtatgagacattactgttttaatgtttgctttgaacataatttaagaaccagatttattttctatagtgataaacccttttttctcagaactccatctttgtactcttcagatgaatatatagacactgtggcatacattttttttcattaaaaacttatggcttcatacaacactagttcaattttttaaataaactttttattatgttacatgtacttcagagaaagctaaagtttctctaaacttgacacggagtactccataatgggtacatttcattagctttattagaaaactagtaaatgcttttgaataggtagtatgacagctattttaaatgtataaacatttgtgtgccaaacaacatatatgaagggatgtgatgccactaactagtgcacattgtttctcaatgtgccattgagacacaaggcacagtaagtcaggattctgaggcattggaagggttttcttcagctgtaattgtttccacagtgcttttcatctgaggggctcaaagtttaagagtgcattcaataacccatgtactagcttcttgaggtaagtaaataaatcttgttctcatgttacatgttaatacaccaaggcaccaaaacatttaaagtgccatgaattagattacatcagaaatcagaaaagcttggattgagctagtcaccgtggttcacgcctgtaatcccaacacttcgggaggccaagatgggaggatctcttgagcccaggatttcaagaccagcttgggcaacatagtgagaccctcttctctgcaaaaactgacaaaaattagccacttgtagtggtgtacacctgtagtcccagctactcaagaggctgaggtgggaggatcacccgagcccagaagttcaaagctgcagtgagctctgatcacaccaatgcactccagcctgggtgacagagccagaccctgtctctaaaaaacaaaaaagaaaagcttgggttgaagccaggccatattcttttatatgctgttcaatgacttgattcacatgtgaccttttagtagtttgcaaacaataataacagaagttgcaattcataattcagagaaatgaccatgaagccggtgtttccctgcttgatttctatgttcttggattctcacacaaaagaggagttacctagaggggatcagtagccatccctgttgcacacaaccctcacttctgagtggtttccactaggttccacttaaggtgctgtcttttcttaacttgcaaggaattgcttagcttcccaataatcattgtcaaactgggagcaaagttggtcagctgtatctctcacctcctcctttcttcataagatagtagaatctgtggcttacttgtaggttttacttagtgcttcagtactgttggctgttttggccttttgctgaatttgcacaacaacataaagcacttctttttaatgtttaaaaaaaattccaaggctccatgaccaagtatgtgactcactaagaaacccttgctataaaaggcttttgatgaaatcttagcaaagctaaattatctctaacttagagattcctatgaactcaggtcattttcatagcctgtttattttgtaggtctaatttagttctcaggaaaattaaactcatgctatatgactgtatcgttaaaggtacttgagcgtatgttgctgtaggtggtatgacactcaaatgcataagaacttgaagggatttattcttaaccactagaatatgaagagccctttttacctgagaagagtgaaattatgtcagaccttttaatttgatatcactgagtaaaaggtatgttcctatagccataggaatatgtctgcttcctttttttcatgttgagaaaacagtcaaatttaaccatttggagtttatttgaattcttggaaagagcaatattcaaaaccttttcaaaaataagatattctggactactggatggatgttttgttttcagttcatttttcatcagtagagatggtgatttcggttttgtagtatccttgtttctatgtctgtgcatgttaacattggatgtatttgtatatacttaattaatatacagactgtgtgtcattctggcttgattagaagctaagtcagttactgagtaacattttgcaactttattccagcaagtactaaatcggccaaaaaaagttttgtttttgataccattaaaattttattctct

SEQ ID NO: 125130 - DNA, 5603 bp, Homo sapiens
  Payload ID: 4565
  Gene Symbol: DDHD1
  Gene Name: DDHD domain containing 1
  Uniprot ID: Q8NEL9
  ENST ID: ENST00000357758
  CDS Start-End: 185-2803
aacgcagctgcggcggctgcgggtctcgtgggggcggagcggtcgccgctgccgccgcagctcgggtcgggatttgaaagattagaaacttcgggtggagagggcggcggcgttgaatgtgtggcggaagcgctgggggtcacggctccgcgcgccgccggacagccggcggcgtctccacagcatgaattacccgggccgcgggtccccacggagccccgagcataacggccgaggcggcggcggcggcgcctgggagctgggctcagacgcgaggccagcgttcggcggcggcgtctgctgcttcgagcacctgcccggcggggacccggacgacggcgacgtgcccctggccctgctgcgcggggaacccgggctgcatttggcgccgggcaccgacgaccacaaccaccacctcgcgctggacccctgcctcagtgacgagaactatgacttcagctccgccgagtcgggctcctcgctgcgctactacagcgagggtgagagcggcggcggcggcagctccttgtcgctgcacccgccgcagcagcctccgctggtcccgacgaactcggggggcggcggcgcgacaggagggtcccccggggaaaggaaacgtacccggcttggcggcccggcggcccggcaccgctatgaggtagtgacggagctgggcccggaggaggtacgctggttctacaaggaggacaagaagacctggaagcccttcatcggctacgactcgctccgcatcgagctcgccttccggaccctgctgcagaccacgggtgcccggccccagggcggggaccgggacggcgaccatgtgtgctcccccacgggcccagcctccagttccggagaagatgacgatgaggaccgcgcctgcggcttctgccagagtacgacggggcacgagccggagatggtggagcttgtgaacatcgagcctgtgtgcgtgcggggcggcctctacgaggtggatgtgacccaaggagagtgctacccggtgtactggaaccaggctgataaaataccagtaatgcgtggacagtggtttattgacggcacttggcagcctctagaagaggaagaaagtaatttaattgagcaagaacatctcaattgttttaggggccagcagatgcaggaaaatttcgatattgaagtgtcaaaatccatagatggaaaagatgctgttcatagtttcaagttgagtcgaaaccatgtggactggcacagtgtggatgaagtatatctttatagtgatgcaacaacatctaaaattgcaagaacagttacccaaaaactgggattttctaaagcatcaagtagtggtaccagacttcatagaggttatgtagaagaagccacattagaagacaagccatcacagactacccatattgtatttgttgtgcatggcattgggcagaaaatggaccaaggaagaattatcaaaaatacagctatgatgagagaagctgcaagaaaaatagaagaaaggcatttttccaaccatgcaacacatgttgaatttctgcctgttgagtggcggtcaaaacttactcttgatggagacactgttgattccattactcctgacaaagtacgaggtttaagggatatgctgaacagcagtgcaatggacataatgtattatactagtccactttatagagatgaactagttaaaggccttcagcaagagctgaatcgattgtattcccttttctgttctcggaatccagactttgaagaaaaagggggtaaagtctcaatagtatcacattccttgggatgtgtaattacttatgacataatgactggctggaatccagttcggctgtatgaacagttgctgcaaaaggaagaagagttgcctgatgaacgatggatgagctatgaagaacgacatcttcttgatgaactctatataactaaacgacggctgaaggaaatagaagaacggcttcacggattgaaagcatcatctatgacacaaacacctgccttaaaatttaaggttgagaatttcttctgtatgggatccccattagcagttttcttggcgttgcgtggcatccgcccaggaaatactggaagtcaagaccatattttgcctagagagatttgtaaccggttactaaatatttttcatcctacagatccagtggcttatagattagaaccattaatactgaaacactacagcaacatttcacctgtccagatccactggtacaatacttcaaatcctttaccttatgaacatatgaagccaagctttctcaacccagctaaagaacctacctcagtttcagagaatgaaggcatttcaaccataccaagccctgtgacctcaccagttttgtcccgccgacactatggagaatctataacaaatataggcaaagcaagcatattaggggctgctagcattggaaagggacttggaggaatgttgttctcaagatttggacgttcatctacaacacagtcatctgaaacatcaaaagactcaatggaagatgagaagaagccagttgcctcaccttctgctaccaccgtagggacacagacccttccacatagcagttctggcttcctcgattctgcattggagttggatcacaggattgattttgaactcagagaaggccttgtggagagccgctattggtcagctgtcacgtcgcatactgcctattggtcatccttggatgttgccctttttcttttaaccttcatgtataaacatgagcacgatgatgatgcaaaacccaatttagatccaatctgaactctcttgaaggacatgaatggcctaaaactgattttttttttttccgttaaaatgtgtgtgtcaagatacggagatttcagggttaaagtatatttcagttttctttagggcaacatatatttgaatttaaaagcactttatttaaaaaaaaaagaagttttcagttctgaagaagtcatttacagtttgcatcattttaattatgagtctgacaaaaccttctccagagaatcaagcaagacctggatgtgaagaaggtttgggtaaactgcatgtaaaggctacaaatcacaatctgattcctcccaaatataaaggcatatggaacataatgtattaaccaaagtatgttataaatcaaaaatggtcaaggttcagcatattctatatgaagatcacaaggtggtatcgttttagatttctatgaaggctttcatttgtacatccctttgaaaaaatataacagatttaaaatgttttgaatttaacttgtttagaaaaactaatgcttaaaacaatatttgaactactgtatttataatttattacctctaattgctttatttcagtgtatgagacattactgttttaatgtttgctttgaacataatttaagaaccagatttattttctatagtgataaacccttttttctcagaactccatctttgtactcttcagatgaatatatagacactgtggcatacattttttttcattaaaaacttatggcttcatacaacactagttcaattttttaaataaactttttattatgttacatgtacttcagagaaagctaaagtttctctaaacttgacacggagtactccataatgggtacatttcattagctttattagaaaactagtaaatgcttttgaataggtagtatgacagctattttaaatgtataaacatttgtgtgccaaacaacatatatgaagggatgtgatgccactaactagtgcacattgtttctcaatgtgccattgagacacaaggcacagtaagtcaggattctgaggcattggaagggttttcttcagctgtaattgtttccacagtgcttttcatctgaggggctcaaagtttaagagtgcattcaataacccatgtactagcttcttgaggtaagtaaataaatcttgttctcatgttacatgttaatacaccaaggcaccaaaacatttaaagtgccatgaattagattacatcagaaatcagaaaagcttggattgagctagtcaccgtggttcacgcctgtaatcccaacacttcgggaggccaagatgggaggatctcttgagcccaggatttcaagaccagcttgggcaacatagtgagaccctcttctctgcaaaaactgacaaaaattagccacttgtagtggtgtacacctgtagtcccagctactcaagaggctgaggtgggaggatcacccgagcccagaagttcaaagctgcagtgagctctgatcacaccaatgcactccagcctgggtgacagagccagaccctgtctctaaaaaacaaaaaagaaaagcttgggttgaagccaggccatattcttttatatgctgttcaatgacttgattcacatgtgaccttttagtagtttgcaaacaataataacagaagttgcaattcataattcagagaaatgaccatgaagccggtgtttccctgcttgatttctatgttcttggattctcacacaaaagaggagttacctagaggggatcagtagccatccctgttgcacacaaccctcacttctgagtggtttccactaggttccacttaaggtgctgtcttttcttaacttgcaaggaattgcttagcttcccaataatcattgtcaaactgggagcaaagttggtcagctgtatctctcacctcctcctttcttcataagatagtagaatctgtggcttacttgtaggttttacttagtgcttcagtactgttggctgttttggccttttgctgaatttgcacaacaacataaagcacttctttttaatgtttaaaaaaaattccaaggctccatgaccaagtatgtgactcactaagaaacccttgctataaaaggcttttgatgaaatcttagcaaagctaaattatctctaacttagagattcctatgaactcaggtcattttcatagcctgtttattttgtaggtctaatttagttctcaggaaaattaaactcatgctatatgactgtatcgttaaaggtacttgagcgtatgttgctgtaggtggtatgacactcaaatgcataagaacttgaagggatttattcttaaccactagaatatgaagagccctttttacctgagaagagtgaaattatgtcagaccttttaatttgatatcactgagtaaaaggtatgttcctatagccataggaatatgtctgcttcctttttttcatgttgagaaaacagtcaaatttaaccatttggagtttatttgaattcttggaaagagcaatattcaaaaccttttcaaaaataagatattctggactactggatggatgttttgttttcagttcatttttcatcagtagagatggtgatttcggttttgtagtatccttgtttctatgtctgtgcatgttaacattggatgtatttgtatatacttaattaatatacagactgtgtgtcattctggcttgattagaagctaagtcagttactgagtaacattttgcaactttattccagcaagtactaaatcggccaaaaaaagttttgtttttgataccattaaaattttattctct

SEQ ID NO: 125131 - DNA, 12769 bp, Homo sapiens
  Payload ID: 4565
  Gene Symbol: DDHD1
  Gene Name: DDHD domain containing 1
  Uniprot ID: Q8NEL9
  ENST ID: ENST00000395606
  CDS Start-End: 107-2746
agattagaaacttcgggtggagagggcggcggcgttgaatgtgtggcggaagcgctgggggtcacggctccgcgcgccgccggacagccggcggcgtctccacagcatgaattacccgggccgcgggtccccacggagccccgagcataacggccgaggcggcggcggcggcgcctgggagctgggctcagacgcgaggccagcgttcggcggcggcgtctgctgcttcgagcacctgcccggcggggacccggacgacggcgacgtgcccctggccctgctgcgcggggaacccgggctgcatttggcgccgggcaccgacgaccacaaccaccacctcgcgctggacccctgcctcagtgacgagaactatgacttcagctccgccgagtcgggctcctcgctgcgctactacagcgagggtgagagcggcggcggcggcagctccttgtcgctgcacccgccgcagcagcctccgctggtcccgacgaactcggggggcggcggcgcgacaggagggtcccccggggaaaggaaacgtacccggcttggcggcccggcggcccggcaccgctatgaggtagtgacggagctgggcccggaggaggtacgctggttctacaaggaggacaagaagacctggaagcccttcatcggctacgactcgctccgcatcgagctcgccttccggaccctgctgcagaccacgggtgcccggccccagggcggggaccgggacggcgaccatgtgtgctcccccacgggcccagcctccagttccggagaagatgacgatgaggaccgcgcctgcggcttctgccagagtacgacggggcacgagccggagatggtggagcttgtgaacatcgagcctgtgtgcgtgcggggcggcctctacgaggtggatgtgacccaaggagagtgctacccggtgtactggaaccaggctgataaaataccagtaatgcgtggacagtggtttattgacggcacttggcagcctctagaagaggaagaaagtaatttaattgagcaagaacatctcaattgttttaggggccagcagatgcaggaaaatttcgatattgaagtgtcaaaatccatagatggaaaagatggcagtgggatcaactattctgctgttcatagtttcaagttgagtcgaaaccatgtggactggcacagtgtggatgaagtatatctttatagtgatgcaacaacatctaaaattgcaagaacagttacccaaaaactgggattttctaaagcatcaagtagtggtaccagacttcatagaggttatgtagaagaagccacattagaagacaagccatcacagactacccatattgtatttgttgtgcatggcattgggcagaaaatggaccaaggaagaattatcaaaaatacagctatgatgagagaagctgcaagaaaaatagaagaaaggcatttttccaaccatgcaacacatgttgaatttctgcctgttgagtggcggtcaaaacttactcttgatggagacactgttgattccattactcctgacaaagtacgaggtttaagggatatgctgaacagcagtgcaatggacataatgtattatactagtccactttatagagatgaactagttaaaggccttcagcaagagctgaatcgattgtattcccttttctgttctcggaatccagactttgaagaaaaagggggtaaagtctcaatagtatcacattccttgggatgtgtaattacttatgacataatgactggctggaatccagttcggctgtatgaacagttgctgcaaaaggaagaagagttgcctgatgaacgatggatgagctatgaagaacgacatcttcttgatgaactctatataactaaacgacggctgaaggaaatagaagaacggcttcacggattgaaagcatcatctatgacacaaacacctgccttaaaatttaaggttgagaatttcttctgtatgggatccccattagcagttttcttggcgttgcgtggcatccgcccaggaaatactggaagtcaagaccatattttgcctagagagatttgtaaccggttactaaatatttttcatcctacagatccagtggcttatagattagaaccattaatactgaaacactacagcaacatttcacctgtccagatccactggtacaatacttcaaatcctttaccttatgaacatatgaagccaagctttctcaacccagctaaagaacctacctcagtttcagagaatgaaggcatttcaaccataccaagccctgtgacctcaccagttttgtcccgccgacactatggagaatctataacaaatataggcaaagcaagcatattaggggctgctagcattggaaagggacttggaggaatgttgttctcaagatttggacgttcatctacaacacagtcatctgaaacatcaaaagactcaatggaagatgagaagaagccagttgcctcaccttctgctaccaccgtagggacacagacccttccacatagcagttctggcttcctcgattctgcattggagttggatcacaggattgattttgaactcagagaaggccttgtggagagccgctattggtcagctgtcacgtcgcatactgcctattggtcatccttggatgttgccctttttcttttaaccttcatgtataaacatgagcacgatgatgatgcaaaacccaatttagatccaatctgaactctcttgaaggacatgaatggcctaaaactgattttttttttttccgttaaaatgtgtgtgtcaagatacggagatttcagggttaaagtatatttcagttttctttagggcaacatatatttgaatttaaaagcactttatttaaaaaaaaaagaagttttcagttctgaagaagtcatttacagtttgcatcattttaattatgagtctgacaaaaccttctccagagaatcaagcaagacctggatgtgaagaaggtttgggtaaactgcatgtaaaggctacaaatcacaatctgattcctcccaaatataaaggcatatggaacataatgtattaaccaaagtatgttataaatcaaaaatggtcaaggttcagcatattctatatgaagatcacaaggtggtatcgttttagatttctatgaaggctttcatttgtacatccctttgaaaaaatataacagatttaaaatgttttgaatttaacttgtttagaaaaactaatgcttaaaacaatatttgaactactgtatttataatttattacctctaattgctttatttcagtgtatgagacattactgttttaatgtttgctttgaacataatttaagaaccagatttattttctatagtgataaacccttttttctcagaactccatctttgtactcttcagatgaatatatagacactgtggcatacattttttttcattaaaaacttatggcttcatacaacactagttcaattttttaaataaactttttattatgttacatgtacttcagagaaagctaaagtttctctaaacttgacacggagtactccataatgggtacatttcattagctttattagaaaactagtaaatgcttttgaataggtagtatgacagctattttaaatgtataaacatttgtgtgccaaacaacatatatgaagggatgtgatgccactaactagtgcacattgtttctcaatgtgccattgagacacaaggcacagtaagtcaggattctgaggcattggaagggttttcttcagctgtaattgtttccacagtgcttttcatctgaggggctcaaagtttaagagtgcattcaataacccatgtactagcttcttgaggtaagtaaataaatcttgttctcatgttacatgttaatacaccaaggcaccaaaacatttaaagtgccatgaattagattacatcagaaatcagaaaagcttggattgagctagtcaccgtggttcacgcctgtaatcccaacacttcgggaggccaagatgggaggatctcttgagcccaggatttcaagaccagcttgggcaacatagtgagaccctcttctctgcaaaaactgacaaaaattagccacttgtagtggtgtacacctgtagtcccagctactcaagaggctgaggtgggaggatcacccgagcccagaagttcaaagctgcagtgagctctgatcacaccaatgcactccagcctgggtgacagagccagaccctgtctctaaaaaacaaaaaagaaaagcttgggttgaagccaggccatattcttttatatgctgttcaatgacttgattcacatgtgaccttttagtagtttgcaaacaataataacagaagttgcaattcataattcagagaaatgaccatgaagccggtgtttccctgcttgatttctatgttcttggattctcacacaaaagaggagttacctagaggggatcagtagccatccctgttgcacacaaccctcacttctgagtggtttccactaggttccacttaaggtgctgtcttttcttaacttgcaaggaattgcttagcttcccaataatcattgtcaaactgggagcaaagttggtcagctgtatctctcacctcctcctttcttcataagatagtagaatctgtggcttacttgtaggttttacttagtgcttcagtactgttggctgttttggccttttgctgaatttgcacaacaacataaagcacttctttttaatgtttaaaaaaaattccaaggctccatgaccaagtatgtgactcactaagaaacccttgctataaaaggcttttgatgaaatcttagcaaagctaaattatctctaacttagagattcctatgaactcaggtcattttcatagcctgtttattttgtaggtctaatttagttctcaggaaaattaaactcatgctatatgactgtatcgttaaaggtacttgagcgtatgttgctgtaggtggtatgacactcaaatgcataagaacttgaagggatttattcttaaccactagaatatgaagagccctttttacctgagaagagtgaaattatgtcagaccttttaatttgatatcactgagtaaaaggtatgttcctatagccataggaatatgtctgcttcctttttttcatgttgagaaaacagtcaaatttaaccatttggagtttatttgaattcttggaaagagcaatattcaaaaccttttcaaaaataagatattctggactactggatggatgttttgttttcagttcatttttcatcagtagagatggtgatttcggttttgtagtatccttgtttctatgtctgtgcatgttaacattggatgtatttgtatatacttaattaatatacagactgtgtgtcattctggcttgattagaagctaagtcagttactgagtaacattttgcaactttattccagcaagtactaaatcggccaaaaaaagttttgtttttgataccattaaaattttattctctattttgtgtacatgctatgatgattctcccaagtactgattagatcactgaactttagttagcttcccaagaattattaaccgttagaataagacttagattaaatcttgctttatttttactttaaaattagtcttgctaaggccttatgttagttcatactttcttttcaacagtaatcttgtttataatccagtgtttctgtgttttaggacataatttaaaaatatactggattttggccaggtgtggcagctcatgcctgtaatcccagcactttgggaggccaagcagggaagattacttgagcccaagagttgaaaaccaacctggacaacatggtgaaacccagactctacaaaaaatgcaaagattagctgggtgtgttggcagacgcctgtggtcccagctactcaggaggctgaggtcggtaggactgcatgattccgggaggtcaaggcttcagtgagccaagattgcaccactgcactccaccttgggtgacagagctggacactgtatccaaaaaaaaaaagtatgtatttacacacacacacacacacacacacacacactggatgttctaataactgctcttttgtatgtgaagcaagccttaggaatcttacgttttacttctttctgttaaacggcatctgttatcttttgaagtactcacactgaacatgcttcatgctgaatactcacgctaaaggcctcagacatgtaaacattcatccttagtctcttttttctctgttttctcattgggagctgaagcatcctagtctgcagaaaatttaacacaccatattccagctttgcatcacctagacagtagacaaaaggaaaagaaattgtcagtaccgtatcacagctagtgcctctgttcattccagtgatagtacatgagccccttccagtggagtcagatcaagccaaaagattttcctgtaaagtctgtagtagaagacaaatttctttttgatccattagattggtatttctatcttctcagctaattaatgagtaaggcatgtggacaatcgagaaaactaatttgagtgtatgtattaaaattgctcttctaaaaacacgtaaaatattaaagatcaaggcagagcaaaaaagaacgtagcaatcatatactagaaaaagaaactaagttttgctaaactatgtttgggttagttgacctctgtagctattctaaagttttctatcccttatctgtattccgctgtcattcctgtgcctcaagcctctgccaggaatctgatggtactctggctgaacttaaaacataagaatctcaaaggtctcatttagtaaatgttagtgctaagttggtgacagcctgggttatatgctttctctttcagtcttcagtagatgcttgtgatagttttcaaagaactgtaaaatttccgggtctgtacagatttttagagatcatttaatccaaccctgttacagtatcatgtcagcatttaaatagcagtaaaggtcatgaaaagtgaagtgaaaggcagcaaactccatgaaaaactaaatacagtgacaactgagggaagtggtaaagtaaaaaaatattaatgatggaattttaaagctggaaggggcatagagaccattcttttctcaataatattctgcaaatattaacaggtgtcatgtcagaaactaagtttaggaattgacaaattcaaaaatctcccttacagcagggctttgagagcctttgctacactaaatgctctgtgaatctatctggtgctgcgtgggggcctccaaatttatttaaccatattttttaatttggcatttacctagagaaatgctatcacatttaattccttcgttttacagtttcacctcctcatgtgattccttcattttgtaagtgaccgattccaccctatacaatcacatggccaatgaatgacagtcagaattagaacctagtcccctgattcccaaccatgtcttataccagactgtttcccctaatcgataggaaactactcctaaagggcagaaactgcctctctttgtttttgtcccccaacctcccctccacacatacacctctgtaatctgatgctttaagctcagattaaagcatcagcaagctttaatctgacacatggccgtaggcttgagttagcagttggtcccttctttcttccagactctcataagagtaccctatcaggtctggacagacttccgtttatgcctcagattcaaaatacccaggaaaaagaagaagaaatacaaaacaacaaaaagaaaatcaagaaaaaaataagatatccaggaaatattttgttagttttctattctggtgacaaatgcaaacttaaggaaacaagttgcacagtgttaactaatgtttaacattcctttccatagtgtttatgtgggccttttatcaattcatgacaaataggtcacctccaaaactgttccaacataggttaactcagaaatttaaaatttaagtactatcctttttggagactatgagaagagtttttactattgtgttttgttttgttttttggtgtgtgtgtgtatgtatgtgcattccccaaaaatagtccattggcagattgttagggtgaacttttcctctgcctttgtgtttgtataagggcgggtgcatgcttagtattgtctgctaccttatggtttttcatttatatgtaacatggtacaacttgcttcctccccacccaacagttgtcaggatatgttggggaatattctttaggaagattacatctggtcttctgttggagtaagatgaaaaacaagtatgttaacacttgacctttactgctttctcctggaagacattgaatatctaggagcgtcactcataccttcccttgactgtacccacacccactgcggtccctgcttgatctctcaaactttttgtttccctttgagcttcatgacaaaaaattataaccattttctggttctaaggctgccataatcccaactttgccagtaagaagatggagaatttttgctcatagggacatttctcagaagcagctggcaccataactctcctgagacccttgtttcctttctttcagctcctatgacttcttatgttcactctctctaacactactaaatgttgtcaatgactgcaatcacaactctttgaaggcaggctttttcttttcctttgttacctcttattttcaatagccaaagcaggttagttttctcagaatcttcagttttactgaagcatgcattatttctgttttctctctgcagtgatcagtttggatgacagaaactttaaacttttattctggcattgtccagttctgattttctcagctggaactggtgcatgcacatttaataatttcaaagaagtgagaggtaaatgttttctcctgcattatactgtgtttctctagctgaattgatccgtttgttatcttgctcacccgaaacaagtagttgtgccctacagtgagcaacctcagactaggctgttctaagcattctggagaaaataatcctcatcatacagtttgtggtaactcttccaaaaagtttatgaaaattgaaagatctccctatgcatcagctgtggctgccacattccgttctactaggaaggctagtggccacaactccctctagaacatcagaggataaagtacacttatatattagaaaagacaggcatattctgattatggttcattcacaatttctcagtccagggttcagtcagtgaccatagctctgaggtcttcaggctaactccaagaacccgtgccagatagaaacctactcctactacctttccactcaccttcccattcccccacctttgctaccaaagtgactttaaaagtcgagttttaggtgtttgtttttttaacagtctaggaatttcagtgcaattccgtgaggtggtgctgaccttagatgagaaatacgtggccaggctataaggactacatgtagaattgagatgggacagtgtacgtatggactgtgaggggaaagaaaaggtaaatgtgtgaaaggaaagagattggtgcatggtcatgacagtctgacagcttagacatttcagaggcattgtttatgagaaaggggatagggacacataggtctgatgacaaccaaagccctttgatgatgccatctgtcactcaaggctccccacagcctgcccaacctgactctcctgcctgcttctccactgcctaccttcaacaatcaaactatatttttgttacagcaaactacattccatttgcctttaaatgcttgcattttagttattgtactggctacctgtttttgtctgcccagcatcctgtttcccctccttttggatcctctcctagccaattccatgtcttgaatcctttcctgctccttgttaaaattattttctgctttgtgtgagtccctgtaagcaccagcagctcaatcagcactgtctgtaccatggtcaagagatgagtacatgactcaggtcagaccttatttcccaccccataagccacaatgattagacaagaaataggcacagaaccctaactagatagggcagaagccttccataggattttatttgctggccctgaaatgcaggtagccttctatggctgttaaacacaatccagtggcacatggggtgatatgaggatggagccatccatggcaaaactccaccctttcctgtgacatggattatgtgcatctgccatgaaaaggaagcatacacaagaaatgagccaagagttcctggagaactgaagcaagtatcacctccagatcagttgtacttttatttgcttacactattctgaggtgggtctctgtctcttggatccaaaagagttcaaattaataatcatttgacaaaaaattacctccacattcctaatgaagttgtctttgaagataatgtcttgtgatcccctggttgaagttaattactgcttgtgagcccccattaacaacgtgttcctttccccattgcttgcttgtatcagctttgctgaagatctattggctgtaggtgtgcagctttatttctgtgttctctattgtgttccattggtctacgtgtctgttattgtaccagtgccgtgctgttttggttactgtggtcttatagtttgaagccacatctgtgtgatgctgctggctttgttctttctgctttgggttgctttggctattcaggctctttctttggttccatctgaattttagaatagttgttttctaattctgtgaaaatgttccaacctctgtgaaaaatgaggttggtagtttgataggacagcattgattctgtaaattgctttgggcagtatggccatttttaaactatattgattcttccaatccatgaacatggaatgtttttccattttttggtttcatccctgatttctttctgccatgttttgtagttctccttgtagagatctttcacctccttggttaggtgtatttttaagtatttcagtttttttatggctattgtaaatggtattgggttcttgatttgctctcagcttgaacgttattggtgtatagaaatgctcctaatttttgtgcattgattttgtatcctgaaacttgactaaagttgtttatcagtctaggagcttttggcagagtcttcggggttttctaggtataaaatcatatcagcgaagagagctagtttgatttcttttcccagttggatgccttttatttatttctcttgcctgattgctctaagttgaatgggagcgatgagactgggcatcctcttcttattccagttctcagaaggaatagttccagcttttgctcatccagtatgatgtctgtgggttggttgtagatggctcttattattttgagatatgttcctttgatacctagtctgttgaggggttttatcatgagggatgttggattttatccgtattcaataaatggtgttgggataactggctagccctatgcagaagaatgaaactggaccccccacctttcaccgtatatgaaaattaactcaagatggattaaagatttaaatgtaagacctcaaactgtaaaaatcctagaagaaaacctaggaaatacccttatcaacatcagccttggcaaagaacttttggctaagtccccaaaggcaattgcaacaaaacagaaattggcaagtggggacctaattaaagcactctgcacagcaaaagacactatcaacagagtaaacagacaacatacagaattggagaaaatatttgcaaactagacatccaacaaagatctgacatccagaatcaataaggaacttaacaagcaaaaaacaaccccattaaaaaatgggtgaaggacatgaacagacacttctcaaaagaagacatacaagcaatcaacaaacgtgaaaaaatgctcatcactaatcatcagagaaatgcaaatcaaaaccacaataagataccatctcacaccagttagaatggctattgtaaagaagtctaataacatgccagtaaggtttcagagaaaagagaacatttatacactgttgtgggaatgtaaattagttcagtcactgtggaaagcagtttggagatttctcaaataacttaaaacagatctaccattcaacccagcatatgggtttatttcccaaaaggaaataaatccttctaccaaaaacacatatggtcatcacagtgctattcacagtagcaaagacagatcaacgtggctgcccatcaacagtggactggataaagaaaatgtggtacatataaatcatggagtattaggcagccataaaaagaacaaaatcatgtcctttgcagccagccacatggatacagctggaagccataatctaagcaaattaagaacagaaaaccaagtactgcatgttctaacaaatgggagctaaatattgagtacctcaggatgcaaaggtgggaacaacagacactgcagactggaacactgtgggtgaggagggcagaaggataggttgaaaaactacctattgggtactatgctcactacctgggtgatgggatctgtacctcaaacctcagcatcacacaatatacccttgtaacaaacttgcacatttacccactgtttctaaatgaaaagttgaaatattttttattaaaaaacacaaaagcaatatgtttctc

SEQ ID NO: 125132 - DNA, 599 bp, Homo sapiens
  Payload ID: 4565
  Gene Symbol: DDHD1
  Gene Name: DDHD domain containing 1
  ENST ID: ENST00000556910
  CDS Start-End: 323-599
aagtatgtgagggatggtgtttggtcagggacaggatggagattgtgaagggagcacctgcacatgaatggcgcatttgggacaatagctggaaaagagacagggtagatatgcagtgctaaggagtttggcctttatcctgcgagtaatgaggaaccaaacagtagaaggttctttatacttacatgtgattaatgacaatgcaaaagttgagctggagagttggaagcagaatatcagtagaatgctagtgtcataaatcaggtgaaaactggtgggagcctacagaagttaacctaaagaggctgataaaataccagtaatgcgtggacagtggtttattgacggcacttggcagcctctagaagaggaagaaagtaatttaattgagcaagaacatctcaattgttttaggggccagcagatgcaggaaaatttcgatattgaagtgtcaaaatccatagatggaaaagatgctgttcatagtttcaagttgagtcgaaaccatgtggactggcacagtgtggatgaagtatatctttatagtgatgcaacaacatctaaaattgcaagaacagttacccaaaaactgggatttt

SEQ ID NO: 125133 - DNA, 12339 bp, Homo sapiens
  Payload ID: 4565
  Gene Symbol: DDHD1
  Gene Name: DDHD domain containing 1
  ENST ID: ENST00000612692
  CDS Start-End: 1-2316
atgaattacccgggccgcgggtccccacggagccccgagcataacggccgaggcggcggcggcggcgcctgggagctgggctcagacgcgaggccagcgttcggcggcggcgtctgctgcttcgagcacctgcccggcggggacccggacgacggcgacgtgcccctggccctgctgcgcggggaacccgggctgcatttggcgccgggcaccgacgaccacaaccaccacctcgcgctggacccctgcctcagtgacgagaactatgacttcagctccgccgagtcgggctcctcgctgcgctactacagcgagggtgagagcggcggcggcggcagctccttgtcgctgcacccgccgcagcagcctccgctggtcccgacgaactcggggggcggcctctacgaggtggatgtgacccaaggagagtgctacccggtgtactggaaccaggctgataaaataccagtaatgcgtggacagtggtttattgacggcacttggcagcctctagaagaggaagaaagtaatttaattgagcaagaacatctcaattgttttaggggccagcagatgcaggaaaatttcgatattgaagtgtcaaaatccatagatggaaaagatgctgttcatagtttcaagttgagtcgaaaccatgtggactggcacagtgtggatgaagtatatctttatagtgatgcaacaacatctaaaattgcaagaacagttacccaaaaactgggattttctaaagcatcaagtagtggtaccagacttcatagaggttatgtagaagaagccacattagaagacaagccatcacagactacccatattgtatttgttgtgcatggcattgggcagaaaatggaccaaggaagaattatcaaaaatacagctatgatgagagaagctgcaagaaaaatagaagaaaggcatttttccaaccatgcaacacatgttgaatttctgcctgttgagtggcggtcaaaacttactcttgatggagacactgttgattccattactcctgacaaagtacgaggtttaagggatatgctgaacagcagtgcaatggacataatgtattatactagtccactttatagagatgaactagttaaaggccttcagcaagagctgaatcgattgtattcccttttctgttctcggaatccagactttgaagaaaaagggggtaaagtctcaatagtatcacattccttgggatgtgtaattacttatgacataatgactggctggaatccagttcggctgtatgaacagttgctgcaaaaggaagaagagttgcctgatgaacgatggatgagctatgaagaacgacatcttcttgatgaactctatataactaaacgacggctgaaggaaatagaagaacggcttcacggattgaaagcatcatctatgacacaaacacctgccttaaaatttaaggttgagaatttcttctgtatgggatccccattagcagttttcttggcgttgcgtggcatccgcccaggaaatactggaagtcaagaccatattttgcctagagagatttgtaaccggttactaaatatttttcatcctacagatccagtggcttatagattagaaccattaatactgaaacactacagcaacatttcacctgtccagatccactggtacaatacttcaaatcctttaccttatgaacatatgaagccaagctttctcaacccagctaaagaacctacctcagtttcagagaatgaaggcatttcaaccataccaagccctgtgacctcaccagttttgtcccgccgacactatggagaatctataacaaatataggcaaagcaagcatattaggggctgctagcattggaaagggacttggaggaatgttgttctcaagatttggacgttcatctacaacacagtcatctgaaacatcaaaagactcaatggaagatgagaagaagccagttgcctcaccttctgctaccaccgtagggacacagacccttccacatagcagttctggcttcctcgattctgcatatttcagacttcaagaatcgttctttaatctcccacaacttctttttccggaaaatgtaatgcagaataaagataatgccctcgtggagttggatcacaggattgattttgaactcagagaaggccttgtggagagccgctattggtcagctgtcacgtcgcatactgcctattggtcatccttggatgttgccctttttcttttaaccttcatgtataaacatgagcacgatgatgatgcaaaacccaatttagatccaatctgaactctcttgaaggacatgaatggcctaaaactgattttttttttttccgttaaaatgtgtgtgtcaagatacggagatttcagggttaaagtatatttcagttttctttagggcaacatatatttgaatttaaaagcactttatttaaaaaaaaaagaagttttcagttctgaagaagtcatttacagtttgcatcattttaattatgagtctgacaaaaccttctccagagaatcaagcaagacctggatgtgaagaaggtttgggtaaactgcatgtaaaggctacaaatcacaatctgattcctcccaaatataaaggcatatggaacataatgtattaaccaaagtatgttataaatcaaaaatggtcaaggttcagcatattctatatgaagatcacaaggtggtatcgttttagatttctatgaaggctttcatttgtacatccctttgaaaaaatataacagatttaaaatgttttgaatttaacttgtttagaaaaactaatgcttaaaacaatatttgaactactgtatttataatttattacctctaattgctttatttcagtgtatgagacattactgttttaatgtttgctttgaacataatttaagaaccagatttattttctatagtgataaacccttttttctcagaactccatctttgtactcttcagatgaatatatagacactgtggcatacattttttttcattaaaaacttatggcttcatacaacactagttcaattttttaaataaactttttattatgttacatgtacttcagagaaagctaaagtttctctaaacttgacacggagtactccataatgggtacatttcattagctttattagaaaactagtaaatgcttttgaataggtagtatgacagctattttaaatgtataaacatttgtgtgccaaacaacatatatgaagggatgtgatgccactaactagtgcacattgtttctcaatgtgccattgagacacaaggcacagtaagtcaggattctgaggcattggaagggttttcttcagctgtaattgtttccacagtgcttttcatctgaggggctcaaagtttaagagtgcattcaataacccatgtactagcttcttgaggtaagtaaataaatcttgttctcatgttacatgttaatacaccaaggcaccaaaacatttaaagtgccatgaattagattacatcagaaatcagaaaagcttggattgagctagtcaccgtggttcacgcctgtaatcccaacacttcgggaggccaagatgggaggatctcttgagcccaggatttcaagaccagcttgggcaacatagtgagaccctcttctctgcaaaaactgacaaaaattagccacttgtagtggtgtacacctgtagtcccagctactcaagaggctgaggtgggaggatcacccgagcccagaagttcaaagctgcagtgagctctgatcacaccaatgcactccagcctgggtgacagagccagaccctgtctctaaaaaacaaaaaagaaaagcttgggttgaagccaggccatattcttttatatgctgttcaatgacttgattcacatgtgaccttttagtagtttgcaaacaataataacagaagttgcaattcataattcagagaaatgaccatgaagccggtgtttccctgcttgatttctatgttcttggattctcacacaaaagaggagttacctagaggggatcagtagccatccctgttgcacacaaccctcacttctgagtggtttccactaggttccacttaaggtgctgtcttttcttaacttgcaaggaattgcttagcttcccaataatcattgtcaaactgggagcaaagttggtcagctgtatctctcacctcctcctttcttcataagatagtagaatctgtggcttacttgtaggttttacttagtgcttcagtactgttggctgttttggccttttgctgaatttgcacaacaacataaagcacttctttttaatgtttaaaaaaaattccaaggctccatgaccaagtatgtgactcactaagaaacccttgctataaaaggcttttgatgaaatcttagcaaagctaaattatctctaacttagagattcctatgaactcaggtcattttcatagcctgtttattttgtaggtctaatttagttctcaggaaaattaaactcatgctatatgactgtatcgttaaaggtacttgagcgtatgttgctgtaggtggtatgacactcaaatgcataagaacttgaagggatttattcttaaccactagaatatgaagagccctttttacctgagaagagtgaaattatgtcagaccttttaatttgatatcactgagtaaaaggtatgttcctatagccataggaatatgtctgcttcctttttttcatgttgagaaaacagtcaaatttaaccatttggagtttatttgaattcttggaaagagcaatattcaaaaccttttcaaaaataagatattctggactactggatggatgttttgttttcagttcatttttcatcagtagagatggtgatttcggttttgtagtatccttgtttctatgtctgtgcatgttaacattggatgtatttgtatatacttaattaatatacagactgtgtgtcattctggcttgattagaagctaagtcagttactgagtaacattttgcaactttattccagcaagtactaaatcggccaaaaaaagttttgtttttgataccattaaaattttattctctattttgtgtacatgctatgatgattctcccaagtactgattagatcactgaactttagttagcttcccaagaattattaaccgttagaataagacttagattaaatcttgctttatttttactttaaaattagtcttgctaaggccttatgttagttcatactttcttttcaacagtaatcttgtttataatccagtgtttctgtgttttaggacataatttaaaaatatactggattttggccaggtgtggcagctcatgcctgtaatcccagcactttgggaggccaagcagggaagattacttgagcccaagagttgaaaaccaacctggacaacatggtgaaacccagactctacaaaaaatgcaaagattagctgggtgtgttggcagacgcctgtggtcccagctactcaggaggctgaggtcggtaggactgcatgattccgggaggtcaaggcttcagtgagccaagattgcaccactgcactccaccttgggtgacagagctggacactgtatccaaaaaaaaaaagtatgtatttacacacacacacacacacacacacacacactggatgttctaataactgctcttttgtatgtgaagcaagccttaggaatcttacgttttacttctttctgttaaacggcatctgttatcttttgaagtactcacactgaacatgcttcatgctgaatactcacgctaaaggcctcagacatgtaaacattcatccttagtctcttttttctctgttttctcattgggagctgaagcatcctagtctgcagaaaatttaacacaccatattccagctttgcatcacctagacagtagacaaaaggaaaagaaattgtcagtaccgtatcacagctagtgcctctgttcattccagtgatagtacatgagccccttccagtggagtcagatcaagccaaaagattttcctgtaaagtctgtagtagaagacaaatttctttttgatccattagattggtatttctatcttctcagctaattaatgagtaaggcatgtggacaatcgagaaaactaatttgagtgtatgtattaaaattgctcttctaaaaacacgtaaaatattaaagatcaaggcagagcaaaaaagaacgtagcaatcatatactagaaaaagaaactaagttttgctaaactatgtttgggttagttgacctctgtagctattctaaagttttctatcccttatctgtattccgctgtcattcctgtgcctcaagcctctgccaggaatctgatggtactctggctgaacttaaaacataagaatctcaaaggtctcatttagtaaatgttagtgctaagttggtgacagcctgggttatatgctttctctttcagtcttcagtagatgcttgtgatagttttcaaagaactgtaaaatttccgggtctgtacagatttttagagatcatttaatccaaccctgttacagtatcatgtcagcatttaaatagcagtaaaggtcatgaaaagtgaagtgaaaggcagcaaactccatgaaaaactaaatacagtgacaactgagggaagtggtaaagtaaaaaaatattaatgatggaattttaaagctggaaggggcatagagaccattcttttctcaataatattctgcaaatattaacaggtgtcatgtcagaaactaagtttaggaattgacaaattcaaaaatctcccttacagcagggctttgagagcctttgctacactaaatgctctgtgaatctatctggtgctgcgtgggggcctccaaatttatttaaccatattttttaatttggcatttacctagagaaatgctatcacatttaattccttcgttttacagtttcacctcctcatgtgattccttcattttgtaagtgaccgattccaccctatacaatcacatggccaatgaatgacagtcagaattagaacctagtcccctgattcccaaccatgtcttataccagactgtttcccctaatcgataggaaactactcctaaagggcagaaactgcctctctttgtttttgtcccccaacctcccctccacacatacacctctgtaatctgatgctttaagctcagattaaagcatcagcaagctttaatctgacacatggccgtaggcttgagttagcagttggtcccttctttcttccagactctcataagagtaccctatcaggtctggacagacttccgtttatgcctcagattcaaaatacccaggaaaaagaagaagaaatacaaaacaacaaaaagaaaatcaagaaaaaaataagatatccaggaaatattttgttagttttctattctggtgacaaatgcaaacttaaggaaacaagttgcacagtgttaactaatgtttaacattcctttccatagtgtttatgtgggccttttatcaattcatgacaaataggtcacctccaaaactgttccaacataggttaactcagaaatttaaaatttaagtactatcctttttggagactatgagaagagtttttactattgtgttttgttttgttttttggtgtgtgtgtgtatgtatgtgcattccccaaaaatagtccattggcagattgttagggtgaacttttcctctgcctttgtgtttgtataagggcgggtgcatgcttagtattgtctgctaccttatggtttttcatttatatgtaacatggtacaacttgcttcctccccacccaacagttgtcaggatatgttggggaatattctttaggaagattacatctggtcttctgttggagtaagatgaaaaacaagtatgttaacacttgacctttactgctttctcctggaagacattgaatatctaggagcgtcactcataccttcccttgactgtacccacacccactgcggtccctgcttgatctctcaaactttttgtttccctttgagcttcatgacaaaaaattataaccattttctggttctaaggctgccataatcccaactttgccagtaagaagatggagaatttttgctcatagggacatttctcagaagcagctggcaccataactctcctgagacccttgtttcctttctttcagctcctatgacttcttatgttcactctctctaacactactaaatgttgtcaatgactgcaatcacaactctttgaaggcaggctttttcttttcctttgttacctcttattttcaatagccaaagcaggttagttttctcagaatcttcagttttactgaagcatgcattatttctgttttctctctgcagtgatcagtttggatgacagaaactttaaacttttattctggcattgtccagttctgattttctcagctggaactggtgcatgcacatttaataatttcaaagaagtgagaggtaaatgttttctcctgcattatactgtgtttctctagctgaattgatccgtttgttatcttgctcacccgaaacaagtagttgtgccctacagtgagcaacctcagactaggctgttctaagcattctggagaaaataatcctcatcatacagtttgtggtaactcttccaaaaagtttatgaaaattgaaagatctccctatgcatcagctgtggctgccacattccgttctactaggaaggctagtggccacaactccctctagaacatcagaggataaagtacacttatatattagaaaagacaggcatattctgattatggttcattcacaatttctcagtccagggttcagtcagtgaccatagctctgaggtcttcaggctaactccaagaacccgtgccagatagaaacctactcctactacctttccactcaccttcccattcccccacctttgctaccaaagtgactttaaaagtcgagttttaggtgtttgtttttttaacagtctaggaatttcagtgcaattccgtgaggtggtgctgaccttagatgagaaatacgtggccaggctataaggactacatgtagaattgagatgggacagtgtacgtatggactgtgaggggaaagaaaaggtaaatgtgtgaaaggaaagagattggtgcatggtcatgacagtctgacagcttagacatttcagaggcattgtttatgagaaaggggatagggacacataggtctgatgacaaccaaagccctttgatgatgccatctgtcactcaaggctccccacagcctgcccaacctgactctcctgcctgcttctccactgcctaccttcaacaatcaaactatatttttgttacagcaaactacattccatttgcctttaaatgcttgcattttagttattgtactggctacctgtttttgtctgcccagcatcctgtttcccctccttttggatcctctcctagccaattccatgtcttgaatcctttcctgctccttgttaaaattattttctgctttgtgtgagtccctgtaagcaccagcagctcaatcagcactgtctgtaccatggtcaagagatgagtacatgactcaggtcagaccttatttcccaccccataagccacaatgattagacaagaaataggcacagaaccctaactagatagggcagaagccttccataggattttatttgctggccctgaaatgcaggtagccttctatggctgttaaacacaatccagtggcacatggggtgatatgaggatggagccatccatggcaaaactccaccctttcctgtgacatggattatgtgcatctgccatgaaaaggaagcatacacaagaaatgagccaagagttcctggagaactgaagcaagtatcacctccagatcagttgtacttttatttgcttacactattctgaggtgggtctctgtctcttggatccaaaagagttcaaattaataatcatttgacaaaaaattacctccacattcctaatgaagttgtctttgaagataatgtcttgtgatcccctggttgaagttaattactgcttgtgagcccccattaacaacgtgttcctttccccattgcttgcttgtatcagctttgctgaagatctattggctgtaggtgtgcagctttatttctgtgttctctattgtgttccattggtctacgtgtctgttattgtaccagtgccgtgctgttttggttactgtggtcttatagtttgaagccacatctgtgtgatgctgctggctttgttctttctgctttgggttgctttggctattcaggctctttctttggttccatctgaattttagaatagttgttttctaattctgtgaaaatgttccaacctctgtgaaaaatgaggttggtagtttgataggacagcattgattctgtaaattgctttgggcagtatggccatttttaaactatattgattcttccaatccatgaacatggaatgtttttccattttttggtttcatccctgatttctttctgccatgttttgtagttctccttgtagagatctttcacctccttggttaggtgtatttttaagtatttcagtttttttatggctattgtaaatggtattgggttcttgatttgctctcagcttgaacgttattggtgtatagaaatgctcctaatttttgtgcattgattttgtatcctgaaacttgactaaagttgtttatcagtctaggagcttttggcagagtcttcggggttttctaggtataaaatcatatcagcgaagagagctagtttgatttcttttcccagttggatgccttttatttatttctcttgcctgattgctctaagttgaatgggagcgatgagactgggcatcctcttcttattccagttctcagaaggaatagttccagcttttgctcatccagtatgatgtctgtgggttggttgtagatggctcttattattttgagatatgttcctttgatacctagtctgttgaggggttttatcatgagggatgttggattttatccgtattcaataaatggtgttgggataactggctagccctatgcagaagaatgaaactggaccccccacctttcaccgtatatgaaaattaactcaagatggattaaagatttaaatgtaagacctcaaactgtaaaaatcctagaagaaaacctaggaaatacccttatcaacatcagccttggcaaagaacttttggctaagtccccaaaggcaattgcaacaaaacagaaattggcaagtggggacctaattaaagcactctgcacagcaaaagacactatcaacagagtaaacagacaacatacagaattggagaaaatatttgcaaactagacatccaacaaagatctgacatccagaatcaataaggaacttaacaagcaaaaaacaaccccattaaaaaatgggtgaaggacatgaacagacacttctcaaaagaagacatacaagcaatcaacaaacgtgaaaaaatgctcatcactaatcatcagagaaatgcaaatcaaaaccacaataagataccatctcacaccagttagaatggctattgtaaagaagtctaataacatgccagtaaggtttcagagaaaagagaacatttatacactgttgtgggaatgtaaattagttcagtcactgtggaaagcagtttggagatttctcaaataacttaaaacagatctaccattcaacccagcatatgggtttatttcccaaaaggaaataaatccttctaccaaaaacacatatggtcatcacagtgctattcacagtagcaaagacagatcaacgtggctgcccatcaacagtggactggataaagaaaatgtggtacatataaatcatggagtattaggcagccataaaaagaacaaaatcatgtcctttgcagccagccacatggatacagctggaagccataatctaagcaaattaagaacagaaaaccaagtactgcatgttctaacaaatgggagctaaatattgagtacctcaggatgcaaaggtgggaacaacagacactgcagactggaacactgtgggtgaggagggcagaaggataggttgaaaaactacctattgggtactatgctcactacctgggtgatgggatctgtacctcaaacctcagcatcacacaatatacccttgtaacaaacttgcacatttacccactgtttctaaatgaaaagttgaaatattttttattaaaaaacacaaaagcaatatgtttctc

SEQ ID NO: 125134 - DNA, 4921 bp, Homo sapiens
  Payload ID: 4566
  Gene Symbol: DDHD2
  Gene Name: DDHD domain containing 2
  Uniprot ID: O94830
  ENST ID: ENST00000397166
  CDS Start-End: 526-2661
attccgactttcccgccccgtacgtgaggggccgccttgaagcctcttccgccacggacactcgaaactgatcttgaagcccctgccgtcacggatactagaaactgatctcgaagccccttccgccacggacactcgaaactctcccccactgttagacctcagcagccagcagcccgccgcccggcgctgcagctccctgcccgcaggagccacgtctcgcgcgactccccccacctctcgcgacacttgccgcccgtgccctgcggccctgcacgccccacccgcggtcgcgcgccgcgctccccgccgcctcaccttttcgcctggcatccgggcccgctactcgcccactgggagcgccgtggcgcctggtgttcggcgcgagcccggcggggctgcaggttccgccctgctccgccgcgccccgcccgggctggggtaaaggccgcggccgggccatgcagtgtcctcctcagggagggcaggagagcctgaggagtggcggggccgccagagagcgaaatgtcatcagtgcagtcacaacaggagcagttgtcccagtcagatccatctccgtcaccaaactcatgtagttcctttgagctaatagacatggatgctggcagcttgtatgaaccagtttctccccattggttttattgtaagataatagattctaaggagacatggattcctttcaactctgaggattcacagcagctggaagaggcatatagctctggaaaaggttgtaatgggagagttgttcctactgatgggggcagatatgatgttcatttgggggagaggatgcggtatgctgtatactgggatgaactggcatcggaagtgagacgatgtacgtggttttacaagggggacaaagacaataagtatgttccctactcggagagcttcagccaagttttagaggaaacttacatgcttgctgtaactttggatgaatggaaaaagaaactggaatctcccaacagagaaattattattttacacaatccaaagcttatggtgcattaccagccagttgcagggtctgatgattggggttcaacacccacggagcagggtcgaccaagaactgtgaagagaggagttgagaacatctctgttgacattcattgtggagaacctttacaaatagatcacttggtttttgtagtccatgggattggaccagcttgtgatctccgctttcgaagcattgtacagtgtgttaatgattttcgcagtgtttccttgaacttgctacagacacattttaagaaagcccaagaaaatcagcagattgggagggtagaatttcttccagtcaactggcacagtcctttgcattctactggtgtggatgtagatctgcagcgaataaccctgcccagcattaaccgcctcaggcacttcaccaatgacacaattctggatgtcttcttctacaatagtcccacctactgtcagactattgtggacacagttgcttctgaaatgaaccgaatatacacactttttctacagaggaaccctgatttcaaagggggtgtatccattgctggtcatagtttaggttcgcttatattgtttgatatcctaacaaatcagaaagattctttgggggatattgacagtgaaaaggattcgctaaatattgtaatggatcaaggagatacacctacactagaggaagatttgaagaaacttcagctctctgaattctttgatatctttgagaaggagaaagtagataaggaagctctggctttatgtacagaccgagatcttcaggaaataggaattcctttaggaccaagaaagaagatattaaactatttcagcaccagaaaaaactcaatgggtattaagagaccagccccgcagcctgcttcaggggcaaacatccccaaagaatctgagttctgcagtagcagtaatactagaaatggtgactatctggatgttggcattgggcaggtgtctgtgaaatacccccggctcatctataaaccagagatattctttgcctttggatctcccattggaatgttccttactgtccgaggactaaaaagaattgatcccaactacagatttccaacgtgcaaaggtttcttcaatatttatcacccttttgatcctgtggcctataggattgaaccaatggtggtcccaggagtggaatttgagccaatgctgatcccacatcataaaggcaggaagcggatgcacttagaactgagagagggcttgaccaggatgagtatggaccttaagaacaacttgctaggttcgctgcggatggcctggaagtcttttaccagagctccataccctgccttacaagcttcagaaacaccagaagaaactgaagcagaacctgaatcaacttcagagaagcctagtgatgttaacacagaagagacctctgtggcagttaaagaagaagtcctgcctatcaatgtggggatgctgaatggaggccaacgcattgactatgtgctacaggagaagcctattgaaagttttaatgagtatttatttgctttacaaagccatctatgctactgggagtctgaagatacagtattgctcgtcctcaaagagatctaccaaacccagggtatcttccttgatcagcctttacagtaaaaatgacccatctatggctgcttaatacggacattgagggatccttccccagaaaatccacctgtttgttgctgcaattttcctctcctcagctgcgtcatttcctgcatgttgcctgccacttactcaccactggggtctttggaagataatcttcctctttggaaatgaatggaaaagcaaaaggccctattacttttaaccactggcttcatataaacacttgccatttttttctgcatagctgggggtggtttgtgtctttaattctttgatgatagtttatagttgccacactttattgattagtacttgacagggtgtaaagcctattttgggtttgatttgttttgggtggggtagacatgtttttaaggaacttattgcttatctttagaaaatgttctagtttggaaacagattcttgagattcagaaggcattttggagtacacttatctcttgtttgtgttgaactgaaggctaagtctcagtggacatggaaaagacttttgggtgatttatttttgaacctgcatttctttcttatgtgtagtgtatgaagaaagactagaatgtagctttaaaaaagtgttgtttactctcttagaactgacagacttattgccagaaatcactgatgttcattgtttttgcaactgtttgagctgctgtaagagtctaaagttgacaagttagttcatgttaggtgcatctttataaagcaaagatgttgtatatcctaggcctcccttttatatttgatagaagttatttgctaatagcttctattcttacgttgaaaatagttgtaaaagctgatgaacctgaaattgtgtagcctctacaggctgctgaggttctaaataaaaccttttagtggtgcctttatggtgaaacagaatttgtcacctgccatttctacttgagctaaggtagtattgtgtatcctctttccttcttaggtatccataatccacaaagcatatttaaaaggctcttggcacgggcagcattggttgagcaggtaggtttggctagggggaaatgtttaacttgttctgaaagaaaaacttatgtctgtagggtccaagaaacagctattccagagtcagtgtcagctgagtctggaacatatgaagtgaggtttacttctaagaacacaagtgactgcacactaattttgtcaaggcatcttttcactactttgctgtagatttttcttcttcattggtcagtttgtcattgtctttgtagttctctttatgataatcctttatacttgctctcagattccacaggcctctgtttatagagtggcaaaggcaggcgagctgtggtttattgtttataaatttttttataaatgttatggtattcaaagccactgacatttaatatttactgaagccattccttagacagcagtggtctttatccctttctggaaagaaaaggaaaatgaagggtaattactgtcaccatggagattgtagaggtaaggttggggtataggtcaggcctggcctttctttgtcatctgcttatagtctagtgctaagtatgccactaagtttcagatatatggaatactttatttttttaaaggtatataaactctgagttattgagaattaagtattcactgtatattaaggggaagcttttgccaagttgtggtcttcaaatttatgtttactcttcctattggcagaataggtgctatttaagagtaaaccaaaggataagcagagggagtccctataaccaaagatggacagcatagccctggatagccagataaaccactctttgtattaagaaatgtttctttcctagtggtgaggggtgggtaactgtgaaagagctttatatcttgtctattcatggtattatagctgtatattcccaggatgataagcttgattgaaatcctgtatttagtcatatattatttgcgctgcttcatttgtatcatgtgcaatctctagaccaaccctatttttaaactctggtacagcatcattttgtacatattcccagctgcagaactagtatcacttatctcagcaaaagagattgtttgcatggaaagattaatagcactgattagatttctaatattttgcatttttgaaatgtttgttttctacgtgattatatttaaaactttagtaaatactaacatgaaaccatattgactagtggcctacttttacctggactcacccgtctcaaagtcaagaaaatcagtacagtca

SEQ ID NO: 125135 - DNA, 4113 bp, Homo sapiens
  Payload ID: 4566
  Gene Symbol: DDHD2
  Gene Name: DDHD domain containing 2
  Uniprot ID: O94830
  ENST ID: ENST00000517385
  CDS Start-End: 928-1920
gcactctagcctgggtgacagagtgagactccgtctcaaaaatatgcactgctgatctgttaatagagttatggaatcattgagctaaatgaagtttgcatatgaacaaatgaatgaattggctacaaattgatatgatttatagaaactctgttcgaaagtattggggacttgatgtttaaacattattttagtaaaaattcctataaccatgtatcatctgtaggattgatttggtacctatttctcctgttggaccatgagttcctccagagcagagcttttgtcttagactattttatttctatttctatttcttttttttctttctttttttttttttttttgagacagtctcttgctctgtcacccaggctggaatgcagtggcatgatctcggctcactgcaacctctgcctgcagggttcaaatgattctcctgcttcagcctccccagtagctgggacaggcgcatgccaccgtacccggctaatttttgtatctttagtagagacagggtgttggtcagactggtcttgaactcctgaccttgtgatccgcccacctcggcctcccaaagtgctgggattacagatgtgagccaccatgcccagcctagactgttttatttcttaagcactgttttcctaatttcttaagcactgagctcccttaaaattcagcaaatgtttgttaatgatgatgaatattttactaatttctttaaaaacatattttcaattgaagttgcaaaaccttggaacctcttaatttatatcttgcataaatgacaatttgttaaagttaagatacattgctgtggaaatctatgtatttctttactgcaaaatagtattaaaggaaactaaatgaatttcaagaatatgagctttataatttaatttttaggattcgctaaatattgtaatggatcaaggagatacacctacactagaggaagatttgaagaaacttcagctctctgaattctttgatatctttgagaaggagaaagtagataaggaagctctggctttatgtacagaccgagatcttcaggaaataggaattcctttaggaccaagaaagaagatattaaactatttcagcaccagaaaaaactcaatgggtattaagagaccagccccgcagcctgcttcaggggcaaacatccccaaagaatctgagttctgcagtagcagtaatactagaaatggtgactatctggatgttggcattgggcaggtgtctgtgaaatacccccggctcatctataaaccagagatattctttgcctttggatctcccattggaatgttccttactgtccgaggactaaaaagaattgatcccaactacagatttccaacgtgcaaaggtttcttcaatatttatcacccttttgatcctgtggcctataggattgaaccaatggtggtcccaggagtggaatttgagccaatgctgatcccacatcataaaggcaggaagcggatgcacttagaactgagagagggcttgaccaggatgagtatggaccttaagaacaacttgctaggttcgctgcggatggcctggaagtcttttaccagagctccataccctgccttacaagcttcagaaacaccagaagaaactgaagcagaacctgaatcaacttcagagaagcctagtgatgttaacacagaagagacctctgtggcagttaaagaagaagtcctgcctatcaatgtggggatgctgaatggaggccaacgcattgactatgtgctacaggagaagcctattgaaagttttaatgagtatttatttgctttacaaagccatctatgctactgggagtctgaagatacagtattgctcgtcctcaaagagatctaccaaacccagggtatcttccttgatcagcctttacagtaaaaatgacccatctatggctgcttaatacggacattgagggatccttccccagaaaatccacctgtttgttgctgcaattttcctctcctcagctgcgtcatttcctgcatgttgcctgccacttactcaccactggggtctttggaagataatcttcctctttggaaatgaatggaaaagcaaaaggccctattacttttaaccactggcttcatataaacacttgccatttttttctgcatagctgggggtggtttgtgtctttaattctttgatgatagtttatagttgccacactttattgattagtacttgacagggtgtaaagcctattttgggtttgatttgttttgggtggggtagacatgtttttaaggaacttattgcttatctttagaaaatgttctagtttggaaacagattcttgagattcagaaggcattttggagtacacttatctcttgtttgtgttgaactgaaggctaagtctcagtggacatggaaaagacttttgggtgatttatttttgaacctgcatttctttcttatgtgtagtgtatgaagaaagactagaatgtagctttaaaaaagtgttgtttactctcttagaactgacagacttattgccagaaatcactgatgttcattgtttttgcaactgtttgagctgctgtaagagtctaaagttgacaagttagttcatgttaggtgcatctttataaagcaaagatgttgtatatcctaggcctcccttttatatttgatagaagttatttgctaatagcttctattcttacgttgaaaatagttgtaaaagctgatgaacctgaaattgtgtagcctctacaggctgctgaggttctaaataaaaccttttagtggtgcctttatggtgaaacagaatttgtcacctgccatttctacttgagctaaggtagtattgtgtatcctctttccttcttaggtatccataatccacaaagcatatttaaaaggctcttggcacgggcagcattggttgagcaggtaggtttggctagggggaaatgtttaacttgttctgaaagaaaaacttatgtctgtagggtccaagaaacagctattccagagtcagtgtcagctgagtctggaacatatgaagtgaggtttacttctaagaacacaagtgactgcacactaattttgtcaaggcatcttttcactactttgctgtagatttttcttcttcattggtcagtttgtcattgtctttgtagttctctttatgataatcctttatacttgctctcagattccacaggcctctgtttatagagtggcaaaggcaggcgagctgtggtttattgtttataaatttttttataaatgttatggtattcaaagccactgacatttaatatttactgaagccattccttagacagcagtggtctttatccctttctggaaagaaaaggaaaatgaagggtaattactgtcaccatggagattgtagaggtaaggttggggtataggtcaggcctggcctttctttgtcatctgcttatagtctagtgctaagtatgccactaagtttcagatatatggaatactttatttttttaaaggtatataaactctgagttattgagaattaagtattcactgtatattaaggggaagcttttgccaagttgtggtcttcaaatttatgtttactcttcctattggcagaataggtgctatttaagagtaaaccaaaggataagcagagggagtccctataaccaaagatggacagcatagccctggatagccagataaaccactctttgtattaagaaatgtttctttcctagtggtgaggggtgggtaactgtgaaagagctttatatcttgtctattcatggtattatagctgtatattcccaggatgataagcttgattgaaatcctgtatttagtcatatattatttgcgctgcttcatttgtatcatgtgcaatctctagaccaaccctatttttaaactctggtacagcatcattttgtacatattcccagctgcagaactagtatcacttatctcagcaaaagagattgtttgcatggaaagattaatagcactgattagatttctaatattttgcatttttgaaatgtttgttttctacgtgattatatttaaaactttagtaaatactaacatgaaacc

SEQ ID NO: 125136 - DNA, 4532 bp, Homo sapiens
  Payload ID: 4566
  Gene Symbol: DDHD2
  Gene Name: DDHD domain containing 2
  Uniprot ID: O94830
  ENST ID: ENST00000520272
  CDS Start-End: 201-2336
ggaacctcggctcccgggaagccccgagcctgggggaaccctgggcaccctgtgaaccctgtggtctgcactggctgccctgctgctgtcgcggggctgcgggcggacgacctgagcccgagctccgagggcccggagcggggcgccagggcctagggtcgcgggggccaggggcgcgccagggtggctgagagagcgaaatgtcatcagtgcagtcacaacaggagcagttgtcccagtcagatccatctccgtcaccaaactcatgtagttcctttgagctaatagacatggatgctggcagcttgtatgaaccagtttctccccattggttttattgtaagataatagattctaaggagacatggattcctttcaactctgaggattcacagcagctggaagaggcatatagctctggaaaaggttgtaatgggagagttgttcctactgatgggggcagatatgatgttcatttgggggagaggatgcggtatgctgtatactgggatgaactggcatcggaagtgagacgatgtacgtggttttacaagggggacaaagacaataagtatgttccctactcggagagcttcagccaagttttagaggaaacttacatgcttgctgtaactttggatgaatggaaaaagaaactggaatctcccaacagagaaattattattttacacaatccaaagcttatggtgcattaccagccagttgcagggtctgatgattggggttcaacacccacggagcagggtcgaccaagaactgtgaagagaggagttgagaacatctctgttgacattcattgtggagaacctttacaaatagatcacttggtttttgtagtccatgggattggaccagcttgtgatctccgctttcgaagcattgtacagtgtgttaatgattttcgcagtgtttccttgaacttgctacagacacattttaagaaagcccaagaaaatcagcagattgggagggtagaatttcttccagtcaactggcacagtcctttgcattctactggtgtggatgtagatctgcagcgaataaccctgcccagcattaaccgcctcaggcacttcaccaatgacacaattctggatgtcttcttctacaatagtcccacctactgtcagactattgtggacacagttgcttctgaaatgaaccgaatatacacactttttctacagaggaaccctgatttcaaagggggtgtatccattgctggtcatagtttaggttcgcttatattgtttgatatcctaacaaatcagaaagattctttgggggatattgacagtgaaaaggattcgctaaatattgtaatggatcaaggagatacacctacactagaggaagatttgaagaaacttcagctctctgaattctttgatatctttgagaaggagaaagtagataaggaagctctggctttatgtacagaccgagatcttcaggaaataggaattcctttaggaccaagaaagaagatattaaactatttcagcaccagaaaaaactcaatgggtattaagagaccagccccgcagcctgcttcaggggcaaacatccccaaagaatctgagttctgcagtagcagtaatactagaaatggtgactatctggatgttggcattgggcaggtgtctgtgaaatacccccggctcatctataaaccagagatattctttgcctttggatctcccattggaatgttccttactgtccgaggactaaaaagaattgatcccaactacagatttccaacgtgcaaaggtttcttcaatatttatcacccttttgatcctgtggcctataggattgaaccaatggtggtcccaggagtggaatttgagccaatgctgatcccacatcataaaggcaggaagcggatgcacttagaactgagagagggcttgaccaggatgagtatggaccttaagaacaacttgctaggttcgctgcggatggcctggaagtcttttaccagagctccataccctgccttacaagcttcagaaacaccagaagaaactgaagcagaacctgaatcaacttcagagaagcctagtgatgttaacacagaagagacctctgtggcagttaaagaagaagtcctgcctatcaatgtggggatgctgaatggaggccaacgcattgactatgtgctacaggagaagcctattgaaagttttaatgagtatttatttgctttacaaagccatctatgctactgggagtctgaagatacagtattgctcgtcctcaaagagatctaccaaacccagggtatcttccttgatcagcctttacagtaaaaatgacccatctatggctgcttaatacggacattgagggatccttccccagaaaatccacctgtttgttgctgcaattttcctctcctcagctgcgtcatttcctgcatgttgcctgccacttactcaccactggggtctttggaagataatcttcctctttggaaatgaatggaaaagcaaaaggccctattacttttaaccactggcttcatataaacacttgccatttttttctgcatagctgggggtggtttgtgtctttaattctttgatgatagtttatagttgccacactttattgattagtacttgacagggtgtaaagcctattttgggtttgatttgttttgggtggggtagacatgtttttaaggaacttattgcttatctttagaaaatgttctagtttggaaacagattcttgagattcagaaggcattttggagtacacttatctcttgtttgtgttgaactgaaggctaagtctcagtggacatggaaaagacttttgggtgatttatttttgaacctgcatttctttcttatgtgtagtgtatgaagaaagactagaatgtagctttaaaaaagtgttgtttactctcttagaactgacagacttattgccagaaatcactgatgttcattgtttttgcaactgtttgagctgctgtaagagtctaaagttgacaagttagttcatgttaggtgcatctttataaagcaaagatgttgtatatcctaggcctcccttttatatttgatagaagttatttgctaatagcttctattcttacgttgaaaatagttgtaaaagctgatgaacctgaaattgtgtagcctctacaggctgctgaggttctaaataaaaccttttagtggtgcctttatggtgaaacagaatttgtcacctgccatttctacttgagctaaggtagtattgtgtatcctctttccttcttaggtatccataatccacaaagcatatttaaaaggctcttggcacgggcagcattggttgagcaggtaggtttggctagggggaaatgtttaacttgttctgaaagaaaaacttatgtctgtagggtccaagaaacagctattccagagtcagtgtcagctgagtctggaacatatgaagtgaggtttacttctaagaacacaagtgactgcacactaattttgtcaaggcatcttttcactactttgctgtagatttttcttcttcattggtcagtttgtcattgtctttgtagttctctttatgataatcctttatacttgctctcagattccacaggcctctgtttatagagtggcaaaggcaggcgagctgtggtttattgtttataaatttttttataaatgttatggtattcaaagccactgacatttaatatttactgaagccattccttagacagcagtggtctttatccctttctggaaagaaaaggaaaatgaagggtaattactgtcaccatggagattgtagaggtaaggttggggtataggtcaggcctggcctttctttgtcatctgcttatagtctagtgctaagtatgccactaagtttcagatatatggaatactttatttttttaaaggtatataaactctgagttattgagaattaagtattcactgtatattaaggggaagcttttgccaagttgtggtcttcaaatttatgtttactcttcctattggcagaataggtgctatttaagagtaaaccaaaggataagcagagggagtccctataaccaaagatggacagcatagccctggatagccagataaaccactctttgtattaagaaatgtttctttcctagtggtgaggggtgggtaactgtgaaagagctttatatcttgtctattcatggtattatagctgtatattcccaggatgataagcttgattgaaatcctgtatttagtcatatattatttgcgctgcttcatttgtatcatgtgcaatctctagaccaaccctatttttaaactctggtacagcatcattttgtacatattcccagctgcagaactagtatcacttatctcagcaaaagagattgtttgcatggaaagattaatagcactgattagatttctaatattttgcatttttgaaatgtttgttttctacgtgattatatttaaaactttagtaaatactaacatgaaaccata

SEQ ID NO: 125137 - DNA, 945 bp, Homo sapiens
  Payload ID: 4566
  Gene Symbol: DDHD2
  Gene Name: DDHD domain containing 2
  ENST ID: ENST00000529845
  CDS Start-End: 313-801
actatttcagcaccagaaaaaactcaatgggtattaagagaccagccccgcagcctgcttcaggggcaaacatccccaaagaatctgagttctgcagtagcagtaatactagaaatggtgactatctggatgttggcattgggcaggtgtctgtgaaatacccccggctcatctataaaccagagatattctttgcctttggatctcccattggaatgttccttactgtccgaggactaaaaagaattgatcccaactacagatttccaacgtgcaaaggtttcttcaatatttatcaccctgattgaaccaatggtggtcccaggagtggaatttgagccaatgctgatcccacatcataaaggcaggaagcggatgcacttagaactgagagagggcttgaccaggatgagtatggaccttaagaacaacttgctaggttcgctgcggatggcctggaagtcttttaccagagctccataccctgccttacaagcttcagaaacaccagaagaaactgaagcagaacctgaatcaacttcagagaagcctagtgatgttaacacagaagagacctctgtggcagttaaagaagaagtcctgcctatcaatgtggggatgctgaatggaggccaacgcattgactatgtgctacaggagaagcctattgaaagttttaatgagtatttatttgctttacaaagccatctatgctactgggagtctgaagatacagtattgctcgtcctcaaagagatctaccaaacccagggtatcttccttgatcagcctttacagtaaaaatgacccatctatggctgcttaatacggacattgagggatccttccccagaaaatccacctgtttgttgctgcaattttcctctcctcagctgcgtcatttcctgcatgttgcctgccacttactcaccactggggtctttg

SEQ ID NO: 125138 - DNA, 1124 bp, Homo sapiens
  Payload ID: 4566
  Gene Symbol: DDHD2
  Gene Name: DDHD domain containing 2
  ENST ID: ENST00000527415
  CDS Start-End: 87-515
catcagtgcagtcacaacaggagcagttgtcccagtcagatccatctccgtcaccaaactcatgtagttcctttgagctaatagacatggatgctggcagcttgtatgaaccagtttctccccattggttttattgtaagataatagattctaaggagacatggattcctttcaactctgaggattcacagcagctggaagaggcatatagctctggaaaaggttgtaatgggagagttgttcctactgatgggggcagatatgatgttcatttgggggagaggatgcggtatgctgtatactgggatgaactggcatcggaagtgagacgatgtacgtggttttacaagggggacaaagacaataagtatgttccctactcggagagcttcagccaagttttagaggaaacttacatgcttgctgtaactttggatgaatggaaaaagaaactggaatctcccaacagagaaattattattttacacaatccaaaggagaacctttacaaatagatcacttggtttttgtagtccatgggattggaccagcttgtgatctccgctttcgaagcattgtacagtgtgttaatgattttcgcagtgtttccttgaacttgctacagacacattttaagaaagcccaagaaaatcagcagattgggagggtagaatttcttccagtcaactggcacagtcctttgcattctactggtgtggatgtagatctgcagcgaataaccctgcccagcattaaccgcctcaggcacttcaccaatgacacaattctggatgtcttcttctacaatagtcccacctactgtcagactattgtggacacagttgcttctgaaatgaaccgaatatacacactttttctacagaggaaccctgatttcaaagggggtgtatccattgctggtcatagtttaggttcgcttatattgtttgatatcctaacaaatcagaaagattctttgggggatattgacagtgaaaaggattcgctaaatattgtaatggatcaaggagatacacctacactagaggaagatttgaagaaacttcagctctctgaattctttgatatctttgagaaggagaaagtagataaggaagctctgg

SEQ ID NO: 125139 - DNA, 568 bp, Homo sapiens
  Payload ID: 4566
  Gene Symbol: DDHD2
  Gene Name: DDHD domain containing 2
  ENST ID: ENST00000527834
  CDS Start-End: 100-568
ttcttgctgctgccatgtgaagaaggacgtatttgcttccccttctgccacgatgggaagttttccgaggcctccgccactatgctgaactagagcgaaatgtcatcagtgcagtcacaacaggagcagttgtcccagtcagatccatctccgtcaccaaactcatgtagttcctttgagctaatagacatggatgctggcagcttgtatgaaccagtttctccccattggttttattgtaagataatagattctaaggagacatggattcctttcaactctgaggattcacagcagctggaagaggcatatagctctggaaaaggttgtaatgggagagttgttcctactgatgggggcagatatgatgttcatttgggggagaggatgcggtatgctgtatactgggatgaactggcatcggaagtgagacgatgtacgtggttttacaagggggacaaagacaataagtatgttccctactcggagagcttcagccaagttttagaggaaacttacatgcttgctgtaactttggatgaatggaaaaagaaactggaatctccca

SEQ ID NO: 125140 - DNA, 683 bp, Homo sapiens
  Payload ID: 4566
  Gene Symbol: DDHD2
  Gene Name: DDHD domain containing 2
  ENST ID: ENST00000533100
  CDS Start-End: 272-683
ctctcccccactgttagacctcagcagccagcagcccgccgcccggcgctgcagctccctgcccgcaggagccacgtctcgcgcgactccccccacctctcgcgacacttgccgcccgtgccctgcggccctgcacgccccacccgcggtcgcgcgccgcgctccccgccgcctcaccttttcgcctggcatccgggcccgctactcgcccactgggagcgccgtggcgcctggtgttcggcgcgagcccggcggggctgcagagagcgaaatgtcatcagtgcagtcacaacaggagcagttgtcccagtcagatccatctccgtcaccaaactcatgtagttcctttgagctaatagacatggatgctggcagcttgtatgaaccagtttctccccattggttttattgtaagataatagattctaaggagacatggattcctttcaactctgaggattcacagcagctggaagaggcatatagctctggaaaaggttgtaatgggagagttgttcctactgatgggggcagatatgatgttcatttgggggagaggatgcggtatgctgtatactgggatgaactggcatcggaagtgagacgatgtacgtggttttacaagggggacaaagacaataagtatgttccctactcggagagcttcagccaagttttagagg

SEQ ID NO: 125141 - DNA, 600 bp, Homo sapiens
  Payload ID: 4566
  Gene Symbol: DDHD2
  Gene Name: DDHD domain containing 2
  ENST ID: ENST00000528358
  CDS Start-End: 117-600
gccctgctccgccgcgccccgcccgggctggggtaaaggccgcggccgggccatgcagtgtcctcctcagggagggcaggagagcctgaggagtggcggggccgccagagagcgaaatgtcatcagtgcagtcacaacaggagcagttgtcccagtcagatccatctccgtcaccaaactcatgtagttcctttgagctaatagacatggatgctggcagcttgtatgaaccagtttctccccattggttttattgtaagataatagattctaaggagacatggattcctttcaactctgaggattcacagcagctggaagaggcatatagctctggttgtaatgggagagttgttcctactgatgggggcagatatgatgttcatttgggggagaggatgcggtatgctgtatactgggatgaactggcatcggaagtgagacgatgtacgtggttttacaagggggacaaagacaataagtatgttccctactcggagagcttcagccaagttttagaggaaacttacatgcttgctgtaactttggatgaatggaaaaagaaactggaatctcccaacagagaaattattattttac

SEQ ID NO: 125142 - DNA, 696 bp, Homo sapiens
  Payload ID: 4566
  Gene Symbol: DDHD2
  Gene Name: DDHD domain containing 2
  ENST ID: ENST00000532222
  CDS Start-End: 30-696
gaggagtggcggggccgccagagagcgaaatgtcatcagtgcagtcacaacaggagcagttgtcccagtcagatccatctccgtcaccaaactcatgtagttcctttgagctaatagacatggatgctggcagcttgtatgaaccagtttctccccattggttttattgtaagataatagattctaaggagacatggattcctttcaactctgaggattcacagcagctggaagaggcatatagctctggaaaaggttgtaatgggagagttgttcctactgatgggggcagatatgatgttcatttgggggagaggatgcggtatgctgtatactgggatgaactggcatcggaagtgagacgatgtacgtggttttacaagggggacaaagacaataagtatgttccctactcggagagcttcagccaagttttagaggaaacttacatgcttgctgtaactttggatgaatggaaaaagaaactggaatctcccaacagagaaattattattttacacaatccaaagcttatggtgcattaccagccagttgcagggtctgatgattggggttcaacacccacggagcagggtcgaccaagaactgtgaagagaggagttgagaacatctctgttgacattcattgtgttaatgattttcgcagtgtttccttgaacttgctacagacacatt

SEQ ID NO: 125143 - DNA, 604 bp, Homo sapiens
  Payload ID: 4566
  Gene Symbol: DDHD2
  Gene Name: DDHD domain containing 2
  ENST ID: ENST00000528613
  CDS Start-End: 1-240
aacacagaagagacctctgtggcagttaaagaagaagtcctgcctatcaatgtggggatgctgaatggaggccaacgcattgactatgtgctacaggagaagcctattgaaagttttaatgagtatttatttgctttacaaagccatctatgctactgggagtctgaagatacagtattgctcgtcctcaaagagatctaccaaacccagggtatcttccttgatcagcctttacagtaaaaatgacccatctatggctgcttaatttgtgactgcagctcttctcccactttcttccctagacggacattgagggatccttccccagaaaatccacctgtttgttgctgcaattttcctctcctcagctgcgtcatttcctgcatgttgcctgccacttactcaccactggggtctttggaagataatcttcctctttggaaatgaatggaaaagcaaaaggccctattacttttaaccactggcttcatataaacacttgccatttttttctgcatagctgggggtggtttgtgtctttaattctttgatgatagtttatagttgccacactttattgattagtacttgacagggtgtaaag

SEQ ID NO: 125144 - DNA, 358 bp, Homo sapiens
  Payload ID: 4566
  Gene Symbol: DDHD2
  Gene Name: DDHD domain containing 2
  ENST ID: ENST00000529642
  CDS Start-End: 188-358
ctcagggagggcaggagagcctgaggagtggcggggccgccagataatagattctaaggagacatggattcctttcaactctgaggattcacagcagctggaagaggcatatagctctggaaaaggttgtaatgggagagttgttcctactgatgggggcagatatgatgttcatttgggggagaggatgcggtatgctgtatactgggatgaactggcatcggaagtgagacgatgtacgtggttttacaagggggacaaagacaataagtatgttccctactcggagagcttcagccaagttttagaggaaacttacatgcttgctgtaactttggatgaatggaaaaagaaactg

SEQ ID NO: 125145 - DNA, 697 bp, Homo sapiens
  Payload ID: 4566
  Gene Symbol: DDHD2
  Gene Name: DDHD domain containing 2
  ENST ID: ENST00000526237
  CDS Start-End: 174-425
actgggagcgccgtggcgcctggtgttcggcgcgagcccggcggggctgcaggttccgccctgctccgccgcgccccgcccgggctggggtaaaggccgcggccgggccatgcagtgtcctcctcagggagggcaggagagcctgaggagtggcggggccgccagagagcgaaatgtcatcagtgcagtcacaacaggagcagttgtcccagtcagatccatctccgtcaccaaactcatgtagttcctttgagctaatagacatggatgctggcagcttgtatgaaccagtttctccccattggttttattgtaagataatagattctaaggagacatggattcctttcaactctgaggattcacagcagctggaagaggcatatagctctggaaacttacatgcttgctgtaactttggatgaatggaaaaagaaactggaatctcccaacagagaaattattattttacacaatccaaagcttatggtgcattaccagccagttgcagggtctgatgattggggttcaacacccacggagcagggtcgaccaagaactgtgaagagaggagttgagaacatctctgttgacattcattgtggagaacctttacaaatagatcacttggtttttgtagtccatgggattggaccagcttgtgatctccgctttcgaagcattgtacagtgtggta

SEQ ID NO: 125146 - DNA, 774 bp, Homo sapiens
  Payload ID: 4566
  Gene Symbol: DDHD2
  Gene Name: DDHD domain containing 2
  ENST ID: ENST00000526144
  CDS Start-End: 1-641
cagagatattctttgcctttggatctcccattggaatgttccttactgtccgaggactaaaaagaattgatcccaactacagatttccaacgtgcaaaggtttcttcaatatttatcacccttttgatcctgtggcctataggattgaaccaatggtggtcccaggagtggaatttgagccaatgctgatcccacatcataaaggcaggaagcggatgcacttagaactgagagagggcttgaccaggatgagtatggaccttaagaacaacttgctaggttcgctgcggatggcctggaagtcttttaccagagctccataccctgccttacaagcttcagaaacaccagaagaaactgaagcagaacctgaatcaacttcagagaagcctagtgatgttaacacagaagagacctctgtggcagttaaagaagaagtcctgcctatcaatgtggggatgctgaatggaggccaacgcattgactatgtgctacaggagaagcctattgaaagttttaatgagtatttatttgctttacaaagccatctatgctactgggagtctgaagatacagtattgctcgtcctcaaagagatctaccaaacccagggtatcttccttgatcagcctttacagtaaaaatgacccatctatggctgcttaatgtaagttttaaaatgtcatatatatagtgtaattcttacatattaacatgttataatgaactatggagcctcaagctctttttaaatatactagctgttgcctgtca

SEQ ID NO: 125147 - DNA, 548 bp, Homo sapiens
  Payload ID: 4566
  Gene Symbol: DDHD2
  Gene Name: DDHD domain containing 2
  ENST ID: ENST00000532106
  CDS Start-End: 1-548
gagaacctttacaaatagatcacttggtttttgtagtccatgggattggaccagcttgtgatctccgctttcgaagcattgtacagtgtgttaatgattttcgcagtgtttccttgaacttgctacagacacattttaagaaagcccaagaaaatcagcagattgggagggtagaatttcttccagtcaactggcacagtcctttgcattctactggtgtggatgtagatctgcagcgaataaccctgcccagcattaaccgcctcaggcacttcaccaatgacacaattctggatgtcttcttctacaatagtcccacctactgtcagactattgtggacacagttgcttctgaaatgaaccgaatatacacactttttctacagaggaaccctgatttcaaagggggtgtatccattgctggtcatagtttaggttcgcttatattgtttgatatcctaacaaatcagaaagattctttgggggatattgacagtgaaaagggtattaagagaccagccccgcagcctgcttcaggggcaaacatc

SEQ ID NO: 125148 - DNA, 671 bp, Homo sapiens
  Payload ID: 4567
  Gene Symbol: DDT
  Gene Name: D-dopachrome tautomerase
  Uniprot ID: P30046
  ENST ID: ENST00000350608
  CDS Start-End: 129-485
gatcccggtgccagggaccctgcccagttccaggcgtcgccctgacccagaaacgactgggcgccgccgtcctggaaaggccccagcgcacggacatctgaggagctgtttccgttcctctgcccgccatgccgttcctggagctggacacgaatttgcccgccaaccgagtgcccgcggggctggagaaacgactctgcgccgccgctgcctccatcctgggcaaacctgcggaccgcgtgaacgtgacggtacggccgggcctggccatggcgctgagcgggtccaccgagccctgcgcgcagctgtccatctcctccatcggcgtagtgggcaccgccgaggacaaccgcagccacagcgcccacttctttgagtttctcaccaaggagctagccctgggccaggaccggatacttatccgctttttccccttggagtcctggcagattggcaagatagggacggtcatgacttttttatgattgggcacggagggatccagggcatctgtgaactggctgcttcttccagagagatctcttggcagagtgagggcctggagataaccagctttggattatcccgcatgcaacattcctgtgatcacataatcctcttcttcatcctcatatgaaataaatgaagagagcttcctcattcaaacatga

SEQ ID NO: 125149 - DNA, 713 bp, Homo sapiens
  Payload ID: 4567
  Gene Symbol: DDT
  Gene Name: D-dopachrome tautomerase
  Uniprot ID: P30046
  ENST ID: ENST00000398344
  CDS Start-End: 171-527
gtttgcagaagcgggaggtaccctaggcagccaatcggggagcgccgagtctctgtccagccaatgagaagccaggttgctgtggcgcctcgcccctcctccctggtccgcgagccttgggtacccccagcttttcttccgccagagctgtttccgttcctctgcccgccatgccgttcctggagctggacacgaatttgcccgccaaccgagtgcccgcggggctggagaaacgactctgcgccgccgctgcctccatcctgggcaaacctgcggaccgcgtgaacgtgacggtacggccgggcctggccatggcgctgagcgggtccaccgagccctgcgcgcagctgtccatctcctccatcggcgtagtgggcaccgccgaggacaaccgcagccacagcgcccacttctttgagtttctcaccaaggagctagccctgggccaggaccggatacttatccgctttttccccttggagtcctggcagattggcaagatagggacggtcatgacttttttatgattgggcacggagggatccagggcatctgtgaactggctgcttcttccagagagatctcttggcagagtgagggcctggagataaccagctttggattatcccgcatgcaacattcctgtgatcacataatcctcttcttcatcctcatatgaaataaatgaagagagcttcctcattcaaacatga

SEQ ID NO: 125150 - DNA, 569 bp, Homo sapiens
  Payload ID: 4567
  Gene Symbol: DDT
  Gene Name: D-dopachrome tautomerase
  ENST ID: ENST00000403754
  CDS Start-End: 46-546
cccagcttttcttccgccagagctgtttccgttcctctgcccgccatgccgttcctggagctggacacgaatttgcccgccaaccgagtgcccgcggggctggagaaacgactctgcgccgccgctgcctccatcctgggcaaacctgcggaccgcgtgaacgtgacggtacggccgggcctggccatggcgctgagcgggtccaccgagccctgcgcgcagctgtccatctcctccatcggcgtagtgggcaccgccgaggacaaccgcagccacagcgcccacttctttgagtttctcaccaaggagctagccctgggccaggaccggttccaggtgaagttcacgggagactcacagagtagtgaaagaccattggcctggatgtctagacatctgctttctgggtcctgcatagctgggggaccccagacaaacttggaaatgaaccatctccagttggcaacctcctcttctgtgaatacaggggaaaagacctccctcccccacaagaagcgtctgcaacccaaacctggcgttctgtgaccgagttaaagtttcctcttggg

SEQ ID NO: 125151 - DNA, 805 bp, Homo sapiens
  Payload ID: 4567
  Gene Symbol: DDT
  Gene Name: D-dopachrome tautomerase
  ENST ID: ENST00000404092
  CDS Start-End: 234-632
atcccttcaaggccactcagtccacagcattctctggtggcagacgctgcaggaggagcccatcagtgctggctgctgagtctttgaaagcagacccacggtggcagcatggtgcccaacacgtggaggctgcagtgcgggaggacttcttccaggaggccctcccagctgtcctgaaggccaaggacctgcctccagtagaacctgctgttaaagagaatctgaagaccttaatgcagcttttcttgctagctgtttccgttcctctgcccgccatgccgttcctggagctggacacgaatttgcccgccaaccgagtgcccgcggggctggagaaacgactctgcgccgccgctgcctccatcctgggcaaacctgcggaccgcgtgaacgtgacggtacggccgggcctggccatggcgctgagcgggtccaccgagccctgcgcgcagctgtccatctcctccatcggcgtagtgggcaccgccgaggacaaccgcagccacagcgcccacttctttgagtttctcaccaaggagctagccctgggccaggaccggatacttatccgctttttccccttggagtcctggcagattggcaagatagggacggtcatgacttttttatgattgggcacggagggatccagggcatctgtgaactggctgcttcttccagagagatctcttggcagagtgagggcctggagataaccagctttggattatcccgcatgcaacattcctgtgatcacataatcctcttcttcatcctcatatgaaataaatgaagagagcttcct

SEQ ID NO: 125152 - DNA, 573 bp, Homo sapiens
  Payload ID: 4567
  Gene Symbol: DDT
  Gene Name: D-dopachrome tautomerase
  Uniprot ID: P30046
  ENST ID: ENST00000430101
  CDS Start-End: 46-369
cccagcttttcttccgccagagctgtttccgttcctctgcccgccatgccgttcctggagctggacacgaatttgcccgccaaccgagtgcccgcggggctggagaaacgactctgcgccgccgctgcctccatcctgggcaaacctgcggaccgcgtgaacgtgacggtacggccgggcctggccatggcgctgagcgggtccaccgagccctgcgcgcagctgtccatctcctccatcggcgtagtgggcaccgccgaggacaaccgcagccacagcgcccacttctttgagtttctcaccaaggagctagccctgggccaggaccgccaggttccaggtgaagttcacgggagactcacagagtagtgaaagaccattggcctggatgtctagacatctgctttctgggtcctgcatagctgggggaccccagacaaacttggaaatgaaccatctccagttggcaacctcctcttctgtgaatacaggggaaaagacctccctcccccacaagaagcgtctgcaacccaaacctggcgttctgtgaccgagttaaagtttcctcttggg

SEQ ID NO: 125153 - DNA, 333 bp, Homo sapiens
  Payload ID: 4567
  Gene Symbol: DDT
  Gene Name: D-dopachrome tautomerase
  ENST ID: ENST00000428792
  CDS Start-End: 1-152
gaaaagacctccctcccccacaagaagcgtctgcaacccaaacctggcgttctgtgaccgagttaaagtttcctcttgggatacttatccgctttttccccttggagtcctggcagattggcaagatagggacggtcatgacttttttatgattgggcacggagggatccagggcatctgtgaactggctgcttcttccagagagatctcttggcagagtgagggcctggagataaccagctttggattatcccgcatgcaacattcctgtgatcacataatcctcttcttcatcctcatatgaaataaatgaagagagcttcctcattcaaa

SEQ ID NO: 125154 - DNA, 671 bp, Homo sapiens; identical to SEQ ID NO: 125148
  Payload ID: 4567
  Gene Symbol: DDT
  Gene Name: D-dopachrome tautomerase
  Uniprot ID: P30046
  ENST ID: ENST00000615721
  CDS Start-End: 129-485

SEQ ID NO: 125155 - DNA, 569 bp, Homo sapiens; identical to SEQ ID NO: 125150
  Payload ID: 4567
  Gene Symbol: DDT
  Gene Name: D-dopachrome tautomerase
  ENST ID: ENST00000626838
  CDS Start-End: 46-546

SEQ ID NO: 125156 - DNA, 576 bp, Homo sapiens
  Payload ID: 4567
  Gene Symbol: DDT
  Gene Name: D-dopachrome tautomerase
  Uniprot ID: P30046
  ENST ID: ENST00000629401
  CDS Start-End: 20-343
ttccgttcctctgcccgccatgccgttcctggagctggacacgaatttgcccgccaaccgagtgcccgcggggctggagaaacgactctgcgccgccgctgcctccatcctgggcaaacctgcggaccgcgtgaacgtgacggtacggccgggcctggccatggcgctgagcgggtccaccgagccctgcgcgcagctgtccatctcctccatcggcgtagtgggcaccgccgaggacaaccgcagccacagcgcccacttctttgagtttctcaccaaggagctagccctgggccaggaccgccaggttccaggtgaagttcacgggagactcacagagtagtgaaagaccattggcctggatgtctagacatctgctttctgggtcctgcatagctgggggaccccagacaaacttggaaatgaaccatctccagttggcaacctcctcttctgtgaatacaggggaaaagacctccctcccccacaagaagcgtctgcaacccaaacctggcgttctgtgaccgagttaaagtttcctcttgggtaaaagatattcttgagccacatccatgt

SEQ ID NO: 125157 - DNA, 333 bp, Homo sapiens; identical to SEQ ID NO: 125153
  Payload ID: 4567
  Gene Symbol: DDT
  Gene Name: D-dopachrome tautomerase
  ENST ID: ENST00000629936
  CDS Start-End: 1-152

SEQ ID NO: 125158 - DNA, 713 bp, Homo sapiens; identical to SEQ ID NO: 125149
  Payload ID: 4567
  Gene Symbol: DDT
  Gene Name: D-dopachrome tautomerase
  Uniprot ID: P30046
  ENST ID: ENST00000626871
  CDS Start-End: 171-527

SEQ ID NO: 125159 - DNA, 805 bp, Homo sapiens
  Payload ID: 4567
  Gene Symbol: DDT
  Gene Name: D-dopachrome tautomerase
  ENST ID: ENST00000626046
  CDS Start-End: 234-632
atcccttcaaggccactcagtccacagcattctctggtggcagacgctgcaggaggagcccatcagtgctggctgctgagtctttgaaagcggacccacggtggcagcatggtgcccaacacgtggaggctgcagtgcgggaggacctcttccaggaggccctcccagctgtcctgaaggccaaggacctgcctccagtagaacctgctgttaaagagaatctgaagaccttaatgcagcttttcttgctagctgtttccgttcctctgcccgccatgccgttcctggagctggacacgaatttgcccgccaaccgagtgcccgcggggctggagaaacgactctgcgccgccgctgcctccatcctgggcaaacctgcggaccgcgtgaacgtgacggtacggccgggcctggccatggcgctgagcgggtccaccgagccctgcgcgcagctgtccatctcctccatcggcgtagtgggcaccgccgaggacaaccgcagccacagcgcccacttctttgagtttctcaccaaggagctagccctgggccaggaccggatacttatccgctttttccccttggagtcctggcagattggcaagatagggacggtcatgacttttttatgattgggcacggagggatccagggcatctgtgaactggctgcttcttccagagagatctcttggcagagtgagggcctggagataaccagctttggattatcccgcatgcaacattcctgtgatcacataatcctcttcttcatcctcatatgaaataaatgaagagagcttcct

SEQ ID NO: 125160 - DNA, 1545 bp, Homo sapiens
  Payload ID: 4568
  Gene Symbol: DDTL
  Gene Name: D-dopachrome tautomerase-like
  Uniprot ID: A6NHG4
  ENST ID: ENST00000215770
  CDS Start-End: 15-419
ttcctctgcccgccatgccgttcctggagctggacacgaatttgcccgccaaccgagtgcccgcggggctggagaaacgactctgcgccgccgctgcctccatcctgggcaaacctgcggaccgcgtgaacgtgacggtacggccgggcctggccatggcgctgagcgggtccaccgagccctgcgcgcagctgtccatctcctccatcggcgtagtgggcaccgccgaggacaaccgcagccacagcgcccacttctttgagtttctcaccaaggagctagccctgggccaggaccggttccctacggtcttatccaccagccctgctgcccatggtggccccagatgcccaggagagataatagaaggtaagaagtcatgtttgaatgaggaagctctcttcatttatttcatatgaggatgaagaagaggattatgtgatcacaggaatgttgcatgcgggataatccaaagctggttatctccaggccctcactctgccaagagatctctctggaagaagcagccagttcacagatgccctggatccctccgtgcccaatcataaaaaagtcatgaccgtccctatcttgccaatctgccaggactccaaggggaaaaagcggataagtatccttcaggagacagagaaaaagatatcatcagctccttggctaataccacatcttgcaagacccctgccaggtactcccactgtgggtactcaggacagcctgcctcagtccaccaggcattttgcaaacctgctcatcccaataatgattttccccaacccccagcagggcagtgggacactcaggtgtgggaggtagccgcacatcatgacccagctaggacagacacacaatacagtagcctcggtgtgtgtgccgtacactctatcatctccatcagtttgtgtactgaggggtaccctgcctcctaattgcaggctccctaagggcacagtacctcagccacctgttttctcaaaggctgagcacagggtgaccccccaccccaccaaccccgccactaatgtctgggccataagtgaacatgcccctctcagaggtaacagcaagtttccagtgaggaaaaccagaacttgggacagcctggttggggcgggcgggagtatgaacagcctgtcttctcatcataaaattggcataatggagattatctacctcatggggatagcatgtcttgtctgagcaaagggagagtggatagggattgtaaggatcaaatgggatcatgagtgtaaagtacctgtagaggacctagcacatggtaagtgtataacacttgttgttagagtaacagttttccctgagtatccgtgggagatttgttctagaatccccagaggaaaccagaatctacatttgctcaagtcccttacataaaatggtgtaatatttgcatgtaacctacacacatcctctcatatactttaaataatctctgggttacttataatacctaatataatgtacgtactatgtaaatagttgtattgtttagggaataatgacaag

SEQ ID NO: 125161 - DNA, 1545 bp, Homo sapiens; identical to SEQ ID NO: 125160
  Payload ID: 4568
  Gene Symbol: DDTL
  Gene Name: D-dopachrome tautomerase-like
  Uniprot ID: A6NHG4
  ENST ID: ENST00000621454
  CDS Start-End: 15-419

SEQ ID NO: 125162 - DNA, 1306 bp, Homo sapiens
  Payload ID: 4569
  Gene Symbol: DDRGK1
  Gene Name: DDRGK domain containing 1
  Uniprot ID: Q96HY6
  ENST ID: ENST00000354488
  CDS Start-End: 59-1003
ggcctatgagatcccggcctcagggtggacgcagtggttctgcactgaggccctcgtcatggtggcgcctgtgtggtacttggtagcggcggctctgctagtcggctttatcctcttcctgactcgcagccggggccgggcggcatcagccggccaagagccactgcacaatgaggagctggcaggagcaggccgggtggcccagcctgggcccctggagcctgaggagccgagagctggaggcaggcctcggcgccggagggacctgggcagccgcctacaggcccagcgtcgagcccagcgggtggcctgggcagaagcagatgagaacgaggaggaagctgtcatcctagcccaggaggaggaaggtgtcgagaagccagcggaaactcacctgtcggggaaaattggagctaagaaactgcggaagctggaggagaaacaagcgcgaaaggcccagcgtgaggcagaggaggctgaacgtgaggagcggaaacgactcgagtcccagcgcgaagctgagtggaagaaggaggaggagcggcttcgcctggaggaggagcagaaggaggaggaggagaggaaggcccgcgaggagcaggcccagcgggagcatgaggagtacctgaaactgaaggaggcctttgtggtggaggaggaaggcgtaggagagaccatgactgaggaacagtcccagagcttcctgacagagttcatcaactacatcaagcagtccaaggttgtgctcttggaagacctggcttcccaggtgggcctacgcactcaggacaccataaatcgcatccaggacctgctggctgaggggactataacaggtgtgattgacgaccggggcaagttcatctacataaccccagaggaactggccgccgtggccaacttcatccgacagcggggccgggtgtccatcgccgagcttgcccaagccagcaactccctcatcgcctggggccgggagtcccctgcccaagccccagcctgaccccagtccttccctcttggactcagagttggtgtggcctacctggctatacatcttcatccctccccaccatcctggggaagtgatggtgtggccaggcagttatagattaaaggcctgtgagtactgctgagcttggtgtggcttggtgtggcagaaggcctggcctaggatcctagataagcaggtgaaatttaggcttcagaatatatccgagaggtggggagggtcccttggaagctggtgaagtcctgttcttattatgaatccattcattcaagaaaatagcctgttgcacattta

SEQ ID NO: 125163 - DNA, 1128 bp, Homo sapiens
  Payload ID: 4569
  Gene Symbol: DDRGK1
  Gene Name: DDRGK domain containing 1
  ENST ID: ENST00000380201
  CDS Start-End: 59-955
ggcctatgagatcccggcctcagggtggacgcagtggttctgcactgaggccctcgtcatggtggcgcctgtgtggtacttggtagcggcggctctgctagtcggctttatcctcttcctgactcgcagccggggccgggcggcatcagccggccaagagccactgcacaatgaggagctggcaggagcaggccgggtggcccagcctgggcccctggagcctgaggagccgagagctggaggcaggcctcggcgccggagggacctgggcagccgcctacaggcccagcgtcgagcccagcgggtggcctgggcagaagcagatgagaacgaggaggaagctgtcatcctagcccaggaggaggaaggtgtcgagaagccagcggaaactcacctgtcggggaaaattggagctaagaaactgcggaagctggaggagaaacaagcgcgaaaggcccagcgtgaggcagaggaggctgaacgtgaggagcggaaacgactcgagtcccagcgcgaagctgagtggaagaaggaggaggagcggcttcgcctggaggaggagcagaaggaggaggaggagaggaaggcccgcgaggagcaggcccagcgggagcatgaggagtacctgaaactgaaggaggcctttgtggtggaggaggaaggcgtaggagagaccatgactgaggaacagtcccagagcttcctgacagagttcatcaactacatcaagcagtccaaggttgtgctcttggaagacctggcttcccaggtgggcctacgcactcaggtaagccctggaacgtggcctgctgtgtgcagtgtggccaggggtctgtggctagcagagaggacctgccctaaagatagagtcttgatgcaccgtctaccttgtccccaaccaagagtgagtagtgcacagaagtctcctggcaccctgggaatcctgcatttttaatggacgaacaggcaggaaagaaaaaaaaaacccaaaccccatcactctgccagcccctgtgaccaaagcagcccaaatcagttaccttgacaactctcatgcacagactgcaccagcctgtgttgcaaacatcactgccccgcttctaacaggaagagatactcttttggggg

SEQ ID NO: 125164 - DNA, 2739 bp, Homo sapiens
  Payload ID: 4570
  Gene Symbol: DDX1
  Gene Name: DEAD (Asp-Glu-Ala-Asp) box helicase 1
  Uniprot ID: Q92499
  ENST ID: ENST00000233084
  CDS Start-End: 314-2536
ctaatcaccaaacatctgcttccttctctgtagctgtgaccctgataccgcgtggtgtgctccgaacacatggtgcccagaacgaaggcggcgtccagaagccctaggtcccagaggtccgctcagcggcaggcgcataaggcggggccggcgcgggcctttccttccatcggaaccgttctcccggggctgagtccctgcccggactccgaacgccgaagaccaggggccggaagcgcgcgccgccactgccacgccgtgtcagtcgggagggagggagcgagcaggcgaagccgcggaggacggggtgaagatggcggccttctccgagatgggtgtaatgcctgagattgcacaagctgtggaagagatggattggctcctcccaactgatatccaggctgaatctatcccattgatcttaggaggaggtgatgtacttatggctgcagaaacaggaagtggcaaaactggtgcttttagtattccagttatccagatagtttatgaaactctgaaagaccaacaggaaggcaaaaaaggaaaaacaacaattaaaactggtgcttcagtgctgaacaaatggcagatgaacccatatgacagaggatctgcttttgcaattgggtcagatggtctttgttgtcaaagcagagaagtaaaggaatggcatgggtgtagagctactaaaggattaatgaaagggaaacactactatgaagtatcctgtcatgaccaagggttatgcagggtcgggtggtctaccatgcaggcctctttggacctaggtactgacaagtttggatttggctttggtggaacaggaaagaaatcccataacaaacaatttgataattatggagaggaattcactatgcatgataccattggatgttacctggatatagataagggacatgtcaagttctccaaaaatggaaaagatcttggtctggcatttgaaataccaccacatatgaaaaaccaagccctctttcctgcctgtgttttgaagaatgctgaactgaaatttaacttcggtgaagaggaatttaagtttccaccaaaagatggctttgttgctctttccaaggcaccggatggttacattgtcaaatcacagcactcaggtaatgcacaggtgacacaaacaaagtttctccccaatgctccgaaagctctcattgttgaaccttcccgggagttagctgaacaaactttgaacaacatcaagcagtttaagaaatacattgataatcctaaattaagggagcttctgataattggaggtgttgcagcccgggatcagctctctgttttggaaaatggagtagatatagttgtaggtactccgggaagactagatgacttggtgtcaactggaaagctgaacttatctcaagttagattcctggtcctggatgaagctgatgggcttctttctcaaggttattctgattttataaataggatgcacaatcagattcctcaggttacctctgatggaaaaagacttcaggtgattgtttgctctgccactttgcattctttcgatgtaaagaaactgtccgagaagataatgcattttcctacatgggttgacttaaaaggagaagactctgttccagatactgtacaccatgttgttgtcccagtaaatcccaaaactgacagactctgggaaaggcttggaaagagccacattagaactgatgatgtacatgcaaaagataacacaagacctggtgctaatagtccagagatgtggtctgaagctattaaaatcctgaaaggggagtatgctgtccgggcaatcaaggaacataagatggatcaagcaattatcttctgtagaaccaaaattgactgtgataacttggagcagtactttatacaacaaggaggaggacctgataaaaaaggacaccagttctcatgtgtttgtcttcatggtgacagaaagcctcatgagagaaagcaaaacttggaaagatttaagaaaggagatgtaagattcttgatttgcacagatgtagctgctagaggaattgatatccacggtgttccttatgttataaatgtcactctgcccgatgaaaagcaaaactacgtacatcgaattggcagagtaggaagagctgaaaggatgggtctggcaatttccctggtggcaacagaaaaagaaaaggtttggtaccatgtatgtagcagccgtggaaaagggtgttataacacaagactcaaggaagatggaggctgtaccatatggtacaacgagatgcagttactatctgagatagaagaacacctgaactgtaccatttctcaggttgagccggatataaaggtaccagtggatgaatttgatgggaaagttacctacggtcagaaaagggctgctggtggtggaagctataaaggccatgtggatattttggcacctactgttcaagagttggctgcccttgaaaaggaggcgcagacatctttcctgcatcttggctaccttcctaaccagctgttcagaaccttctgatttttacatttactgaataagatttgagtaatgaaagtctgtagtcttaaaactctaaaacagttgtactgcttccaagcagcagtatttatagtaacgtaagctattaatgctaactcttgcatgtcaagaaacattagtcttaggaattcttcaaaaaatggcatcccaatgaaaataaatttgatgactatattttcatg

SEQ ID NO: 125165 - DNA, 2817 bp, Homo sapiens
  Payload ID: 4570
  Gene Symbol: DDX1
  Gene Name: DEAD (Asp-Glu-Ala-Asp) box helicase 1
  Uniprot ID: Q92499
  ENST ID: ENST00000381341
  CDS Start-End: 390-2612
ggctcagatcccacgctgccattcggtagatatgtgtctttagataagtgacttaactttcccgaattttagagtcctcatctaaagattctaataccttcctgacagactgtgaccctgataccgcgtggtgtgctccgaacacatggtgcccagaacgaaggcggcgtccagaagccctaggtcccagaggtccgctcagcggcaggcgcataaggcggggccggcgcgggcctttccttccatcggaaccgttctcccggggctgagtccctgcccggactccgaacgccgaagaccaggggccggaagcgcgcgccgccactgccacgccgtgtcagtcgggagggagggagcgagcaggcgaagccgcggaggacggggtgaagatggcggccttctccgagatgggtgtaatgcctgagattgcacaagctgtggaagagatggattggctcctcccaactgatatccaggctgaatctatcccattgatcttaggaggaggtgatgtacttatggctgcagaaacaggaagtggcaaaactggtgcttttagtattccagttatccagatagtttatgaaactctgaaagaccaacaggaaggcaaaaaaggaaaaacaacaattaaaactggtgcttcagtgctgaacaaatggcagatgaacccatatgacagaggatctgcttttgcaattgggtcagatggtctttgttgtcaaagcagagaagtaaaggaatggcatgggtgtagagctactaaaggattaatgaaagggaaacactactatgaagtatcctgtcatgaccaagggttatgcagggtcgggtggtctaccatgcaggcctctttggacctaggtactgacaagtttggatttggctttggtggaacaggaaagaaatcccataacaaacaatttgataattatggagaggaattcactatgcatgataccattggatgttacctggatatagataagggacatgtcaagttctccaaaaatggaaaagatcttggtctggcatttgaaataccaccacatatgaaaaaccaagccctctttcctgcctgtgttttgaagaatgctgaactgaaatttaacttcggtgaagaggaatttaagtttccaccaaaagatggctttgttgctctttccaaggcaccggatggttacattgtcaaatcacagcactcaggtaatgcacaggtgacacaaacaaagtttctccccaatgctccgaaagctctcattgttgaaccttcccgggagttagctgaacaaactttgaacaacatcaagcagtttaagaaatacattgataatcctaaattaagggagcttctgataattggaggtgttgcagcccgggatcagctctctgttttggaaaatggagtagatatagttgtaggtactccgggaagactagatgacttggtgtcaactggaaagctgaacttatctcaagttagattcctggtcctggatgaagctgatgggcttctttctcaaggttattctgattttataaataggatgcacaatcagattcctcaggttacctctgatggaaaaagacttcaggtgattgtttgctctgccactttgcattctttcgatgtaaagaaactgtccgagaagataatgcattttcctacatgggttgacttaaaaggagaagactctgttccagatactgtacaccatgttgttgtcccagtaaatcccaaaactgacagactctgggaaaggcttggaaagagccacattagaactgatgatgtacatgcaaaagataacacaagacctggtgctaatagtccagagatgtggtctgaagctattaaaatcctgaaaggggagtatgctgtccgggcaatcaaggaacataagatggatcaagcaattatcttctgtagaaccaaaattgactgtgataacttggagcagtactttatacaacaaggaggaggacctgataaaaaaggacaccagttctcatgtgtttgtcttcatggtgacagaaagcctcatgagagaaagcaaaacttggaaagatttaagaaaggagatgtaagattcttgatttgcacagatgtagctgctagaggaattgatatccacggtgttccttatgttataaatgtcactctgcccgatgaaaagcaaaactacgtacatcgaattggcagagtaggaagagctgaaaggatgggtctggcaatttccctggtggcaacagaaaaagaaaaggtttggtaccatgtatgtagcagccgtggaaaagggtgttataacacaagactcaaggaagatggaggctgtaccatatggtacaacgagatgcagttactatctgagatagaagaacacctgaactgtaccatttctcaggttgagccggatataaaggtaccagtggatgaatttgatgggaaagttacctacggtcagaaaagggctgctggtggtggaagctataaaggccatgtggatattttggcacctactgttcaagagttggctgcccttgaaaaggaggcgcagacatctttcctgcatcttggctaccttcctaaccagctgttcagaaccttctgatttttacatttactgaataagatttgagtaatgaaagtctgtagtcttaaaactctaaaacagttgtactgcttccaagcagcagtatttatagtaacgtaagctattaatgctaactcttgcatgtcaagaaacattagtcttaggaattcttcaaaaaatggcatcccaatgaaaataaatttgatgactatattttcatgaa

SEQ ID NO: 125166 - DNA, 500 bp, Homo sapiens
  Payload ID: 4570
  Gene Symbol: DDX1
  Gene Name: DEAD (Asp-Glu-Ala-Asp) box helicase 1
  ENST ID: ENST00000434671
  CDS Start-End: 452-500
ggcattggtgctcagggcaatgaatccagtccatctctccgggtcattcacacaccaaggccctgctcacctttggaaagctgggggactgagtggggagggcacggtgtggtgtcagcctgagcccactggatgaccctaatcaccaaacatctgcttccttctctgtagctgtgaccctgataccgcgtggtgtgctccgaacacatggtgcccagaacgaaggcggcgtccagaagccctaggtcccagaggtccgctcagcggcaggcgcataaggcggggccggcgcgggcctttccttccatcggaaccgttctcccggggctgagtccctgcccggactccgaacgccgaagaccaggggccggaagcgcgcgccgccactgccacgccgtgtcagtcgggagggagggagcgagcaggcgaagccgcggaggacggggtgaagatggcggccttctccgagatgggtgtaatgcctgagattgcacaagctg

SEQ ID NO: 125167 - DNA, 2257 bp, Homo sapiens
  Payload ID: 4570
  Gene Symbol: DDX1
  Gene Name: DEAD (Asp-Glu-Ala-Asp) box helicase 1
  ENST ID: ENST00000617198
  CDS Start-End: 84-2063
cggaagcgcgcgccgccactgccacgccgtgtcagtcgggagggagggagcgagcaggcgaagccgcggaggacggggtgaagatggcggccttctccgtgctgaacaaatggcagatgaacccatatgacagaggatctgcttttgcaattgggtcagatggtctttgttgtcaaagcagagaagtaaaggaatggcatgggtgtagagctactaaaggattaatgaaagggaaacactactatgaagtatcctgtcatgaccaagggttatgcagggtcgggtggtctaccatgcaggcctctttggacctaggtactgacaagtttggatttggctttggtggaacaggaaagaaatcccataacaaacaatttgataattatggagaggaattcactatgcatgataccattggatgttacctggatatagataagggacatgtcaagttctccaaaaatggaaaagatcttggtctggcatttgaaataccaccacatatgaaaaaccaagccctctttcctgcctgtgttttgaagaatgctgaactgaaatttaacttcggtgaagaggaatttaagtttccaccaaaagatggctttgttgctctttccaaggcaccggatggttacattgtcaaatcacagcactcaggtaatgcacaggtgacacaaacaaagtttctccccaatgctccgaaagctctcattgttgaaccttcccgggagttagctgaacaaactttgaacaacatcaagcagtttaagaaatacattgataatcctaaattaagggagcttctgataattggaggtgttgcagcccgggatcagctctctgttttggaaaatggagtagatatagttgtaggtactccgggaagactagatgacttggtgtcaactggaaagctgaacttatctcaagttagattcctggtcctggatgaagctgatgggcttctttctcaaggttattctgattttataaataggatgcacaatcagattcctcaggttacctctgatggaaaaagacttcaggtgattgtttgctctgccactttgcattctttcgatgtaaagaaactgtccgagaagataatgcattttcctacatgggttgacttaaaaggagaagactctgttccagatactgtacaccatgttgttgtcccagtaaatcccaaaactgacagactctgggaaaggcttggaaagagccacattagaactgatgatgtacatgcaaaagataacacaagacctggtgctaatagtccagagatgtggtctgaagctattaaaatcctgaaaggggagtatgctgtccgggcaatcaaggaacataagatggatcaagcaattatcttctgtagaaccaaaattgactgtgataacttggagcagtactttatacaacaaggaggaggacctgataaaaaaggacaccagttctcatgtgtttgtcttcatggtgacagaaagcctcatgagagaaagcaaaacttggaaagatttaagaaaggagatgtaagattcttgatttgcacagatgtagctgctagaggaattgatatccacggtgttccttatgttataaatgtcactctgcccgatgaaaagcaaaactacgtacatcgaattggcagagtaggaagagctgaaaggatgggtctggcaatttccctggtggcaacagaaaaagaaaaggtttggtaccatgtatgtagcagccgtggaaaagggtgttataacacaagactcaaggaagatggaggctgtaccatatggtacaacgagatgcagttactatctgagatagaagaacacctgaactgtaccatttctcaggttgagccggatataaaggtaccagtggatgaatttgatgggaaagttacctacggtcagaaaagggctgctggtggtggaagctataaaggccatgtggatattttggcacctactgttcaagagttggctgcccttgaaaaggaggcgcagacatctttcctgcatcttggctaccttcctaaccagctgttcagaaccttctgatttttacatttactgaataagatttgagtaatgaaagtctgtagtcttaaaactctaaaacagttgtactgcttccaagcagcagtatttatagtaacgtaagctattaatgctaactcttgcatgtcaagaaacattagtcttaggaattcttcaaaaaatggcatcccaatgaaaataaatttgatgactat

SEQ ID NO: 125168 - DNA, 2183 bp, Homo sapiens
  Payload ID: 4570
  Gene Symbol: DDX1
  Gene Name: DEAD (Asp-Glu-Ala-Asp) box helicase 1
  ENST ID: ENST00000621973
  CDS Start-End: 1-1980
atgtctgatttttcagtgctgaacaaatggcagatgaacccatatgacagaggatctgcttttgcaattgggtcagatggtctttgttgtcaaagcagagaagtaaaggaatggcatgggtgtagagctactaaaggattaatgaaagggaaacactactatgaagtatcctgtcatgaccaagggttatgcagggtcgggtggtctaccatgcaggcctctttggacctaggtactgacaagtttggatttggctttggtggaacaggaaagaaatcccataacaaacaatttgataattatggagaggaattcactatgcatgataccattggatgttacctggatatagataagggacatgtcaagttctccaaaaatggaaaagatcttggtctggcatttgaaataccaccacatatgaaaaaccaagccctctttcctgcctgtgttttgaagaatgctgaactgaaatttaacttcggtgaagaggaatttaagtttccaccaaaagatggctttgttgctctttccaaggcaccggatggttacattgtcaaatcacagcactcaggtaatgcacaggtgacacaaacaaagtttctccccaatgctccgaaagctctcattgttgaaccttcccgggagttagctgaacaaactttgaacaacatcaagcagtttaagaaatacattgataatcctaaattaagggagcttctgataattggaggtgttgcagcccgggatcagctctctgttttggaaaatggagtagatatagttgtaggtactccgggaagactagatgacttggtgtcaactggaaagctgaacttatctcaagttagattcctggtcctggatgaagctgatgggcttctttctcaaggttattctgattttataaataggatgcacaatcagattcctcaggttacctctgatggaaaaagacttcaggtgattgtttgctctgccactttgcattctttcgatgtaaagaaactgtccgagaagataatgcattttcctacatgggttgacttaaaaggagaagactctgttccagatactgtacaccatgttgttgtcccagtaaatcccaaaactgacagactctgggaaaggcttggaaagagccacattagaactgatgatgtacatgcaaaagataacacaagacctggtgctaatagtccagagatgtggtctgaagctattaaaatcctgaaaggggagtatgctgtccgggcaatcaaggaacataagatggatcaagcaattatcttctgtagaaccaaaattgactgtgataacttggagcagtactttatacaacaaggaggaggacctgataaaaaaggacaccagttctcatgtgtttgtcttcatggtgacagaaagcctcatgagagaaagcaaaacttggaaagatttaagaaaggagatgtaagattcttgatttgcacagatgtagctgctagaggaattgatatccacggtgttccttatgttataaatgtcactctgcccgatgaaaagcaaaactacgtacatcgaattggcagagtaggaagagctgaaaggatgggtctggcaatttccctggtggcaacagaaaaagaaaaggtttggtaccatgtatgtagcagccgtggaaaagggtgttataacacaagactcaaggaagatggaggctgtaccatatggtacaacgagatgcagttactatctgagatagaagaacacctgaactgtaccatttctcaggttgagccggatataaaggtaccagtggatgaatttgatgggaaagttacctacggtcagaaaagggctgctggtggtggaagctataaaggccatgtggatattttggcacctactgttcaagagttggctgcccttgaaaaggaggcgcagacatctttcctgcatcttggctaccttcctaaccagctgttcagaaccttctgatttttacatttactgaataagatttgagtaatgaaagtctgtagtcttaaaactctaaaacagttgtactgcttccaagcagcagtatttatagtaacgtaagctattaatgctaactcttgcatgtcaagaaacattagtcttaggaattcttcaaaaaatggcatcccaatgaaaataaatttgatgactatattttcatg

SEQ ID NO: 125169 - DNA, 4791 bp, Homo sapiens
  Payload ID: 4571
  Gene Symbol: DDX17
  Gene Name: DEAD (Asp-Glu-Ala-Asp) box helicase 17
  ENST ID: ENST00000396821
  CDS Start-End: 101-2296
aagttggagccgactcagcggcggccgccattttgtgcagtcgctgggaaggaaggagacgcctaaaccgcggcactgcccggtttgagcgtagccaaacctgcccaccggctttgtagccccgattctctgtgttttgctcccgtctccgacgagagaggcggcgacggtggcgtctgcgacgggagacagcgcgtcggagcgagagagcgctgcgcctgccgccgccccaacagcggaggcgccgccgccatcggtcgtcaccagaccggagccgcaggccctcccgagcccggccatccgtgccccgctcccagatctctatccttttgggaccatgcgcggaggaggctttggggaccgggaccgggatcgtgaccgtggaggatttggagcaagaggtggtggtggccttcccccgaagaaatttggtaatcctggggagcgtttgcgtaaaaaaaagtgggatttgagtgagctccccaagtttgagaaaaatttttatgtggaacatccggaagtagcaaggctgacaccatatgaggttgatgagctacgccgaaagaaggagattacagtgagggggggagatgtttgtcctaaacccgtgtttgccttccatcatgctaacttcccacaatatgtaatggatgtgttgatggatcagcactttacagaaccaactccaattcagtgccagggatttccgttggctcttagtggccgggatatggtgggcattgctcagactggctctgggaagacgttggcgtatctcctgcctgcaattgttcatattaaccaccagccatacttggaaaggggagatggcccaatctgtctagttctggctcctaccagagagcttgcccagcaagtacagcaggtggccgatgactatggcaaatgttctagattgaagagtacttgtatttatggaggtgctcctaaaggtccccagattcgagacttggaaagaggtgttgagatctgcatagccactcctggacgtctgatagatttcctggagtcaggaaagacaaatcttcgccgatgtacttaccttgtattggacgaagctgacagaatgcttgatatggggtttgaaccccagatccgtaaaattgttgaccaaatcaggcctgataggcagacactgatgtggagtgcaacctggccaaaagaagtaagacagcttgcagaggatttccttcgtgattacacccagatcaacgtaggcaatctggagttgagtgccaaccacaacatcctccagatagtggatgtctgcatggaaagtgaaaaagaccacaagttgatccaactaatggaagaaataatggctgaaaaggaaaacaaaacaataatatttgtggagacaaagagacgctgtgatgatctgactcgaaggatgcgcagagatggttggccagctatgtgtatccatggagacaagagtcaaccagaaagagattgggtacttaatgagttccgttctggaaaggcacccatccttattgctacagatgtagcctcccgtgggctagatgtggaagatgtcaagtttgtgatcaactatgactatccaaacagctcagaggattatgtgcaccgtattggccgaacagcccgtagcaccaacaagggtaccgcctataccttcttcaccccagggaacctaaaacaggccagagagcttatcaaagtgctggaagaggccaatcaggctatcaatccaaaactgatgcagcttgtggaccacagaggaggcggcggaggcgggggtaagggtggtcgttctcgttaccggaccacttcttcagccaacaatcccaatctgatgtatcaggatgagtgtgaccgaaggcttcgaggagtcaaggatggtggccggagagactctgcaagctatcgggatcgtagtgaaaccgatagagctggttatgctaatggcagtggctatggaagtccaaattctgcctttggagcacaagcaggccaatacacctatggtcaaggcacctatggggcagctgcttatggcaccagtagctatacagctcaagaatatggtgctggcacttatggagctagtagcaccacctcaactgggagaagttcacagagctctagccagcagtttagtgggataggccggtctgggcagcagccacagccactgatgtcacaacagtttgcacagcctccgggagctaccaatatgataggttacatggggcagactgcctaccaataccctcctcctcctccccctcctcctccttcacgtaaatgaaaccactcaagtggtagtgactccagcagacttaattacattttaaggaacactgtctttcctttttttttcctcttcgccttttctttttttttccttttttctttttttttttttaatttttccccccaaccatcgtgatttgtcttttcatgcagattagttagaattcactgccaggtttcttctgcccaccaaaatgatccagtctggaataacattttgtaaaaaaaaaaaaaatatatatatatatatatagctgactggaagagattaatttcttcccccaacttcttgcatgttgaagatatttgagctatttttcatctaaaagagtaaggtattaggcccttttgtgggagccccatgttttgtttttctgagttggtggggagggagggagggggagggctgaattgttttgcagaggaagatggcatctgtgctttaaatttctcattactgggttagaaaacaaagagggattgccctgcacattttcttttgtgcttttaaatgtttcttaagttggaacaggtttcctcgggcctgttttgactgattgctggagtgcatttgatagttaaaaattactaattggttttatttcccttcacactctgcctccccacttctccccccgttactgaaaaataaccattttagtgtcaggctagaaattgaattgctgagttttgtgtatcctttaaattaaaaaccacaagtgtttattgtagtggttaaactgtagcatctcagcatctgggtggaagctgcctatatttcttcccagtttaactggggaccatctgtgaaattaattttccatccagacagctgctgtgagcaaatgaacataaatgctcgctggaaatttactaaccagtttttatattgacctgcagtgtaaaaagcacatttaattataaacaatatattcaaaatgggcaaattttattttcaaatgcagtgtagagctagattaaaagcaactctttgccacctactctgcccttttggcaaagttaccttgaacaaagaatcttaagggtttattaagaactctttattttcttcataccctgttctctgcagtgctttctaacagcttctgggtgcagattttcttcggcatccttttgcactcagcttattacaggtaggtagtgcttaagaaaagtcatggaggactaaagcctaagtccttttcacttttcctccatctgaaggtaggtgagttcatcctcttcatggtaatgctgttttaccaagactttatagcagatggacccagaaagaattttctgctattgtgttcactacaacaggatagggacatcagacagccccagaaaccccttccagatctgatatgggactattaatttttatgctgttaattggtattcattcacaatgcagttgaagggggaaggctccactgcattctttggctaaggcctgaatgcttgctcatctgtaagatctatactcgaggttttgttttccttttaaaattctttagggagagagggatggtttctgaggggttctgaaagtatgattcaatgtgcaacatacaggtaggtcttcagcataagctgaaatatatgcatgtaaaaactttgacatctttttttttaattttccactttcttcttaactttacttctctttttgtcccccccccatcttacagaagttgaggccaagggagaatggtaggcacagaagaaacatggcaaactgctctgtgctttcaaaccaaagtgttccccccaaccccaaatttgtctaagcactggccagtctgttgtgggcattgttttctacaaccaaattctgggtttttttcttctttctttaaacatagaggtaccaccacaagggatgccctactctctcgcagctcttgaaagcatctgtttgagggaaaggtctctgggcaagcaagtggttatttggattgcttgcttccctttttccacctgggacattgtaatcataaaataacagtaaattccaaacctcaaaaactattatggcctgagcacagctgaaatctagcagagtttaactcttctgcctccatgtctgtcacttataattcaggttctgctgttggcttcagaacatgagcagaagaatcgttttatgctagttattgcattcatggttgaaactcaacttagggaaagggttccaatgtattaagcaatgggctgcttctccccaatcctccctaacaattcgttgtgtggacttctcatctaaaaggttagtggcttttgcttgggatcagtgctctctattgatgttcttgctggtctccagacacattcctgttgcattaagacttgaaagacttgtagatgtgtgatgttcaggcacaggatgctgaaagctatgttactattcttagtttgtaaattgtccttttgataccatcatcttgttttctttttgtaggtataaataaaaacactgttgacaat

SEQ ID NO: 125170 - DNA, 2322 bp, Homo sapiens
  Payload ID: 4571
  Gene Symbol: DDX17
  Gene Name: DEAD (Asp-Glu-Ala-Asp) box helicase 17
  Uniprot ID: Q92841
  ENST ID: ENST00000403230
  CDS Start-End: 76-2265
cgccattttgtgcagtcgctgggaaggaaggagacgcctaaaccgcggcactgcccggtttgagcgtagccaaacctgcccaccggctttgtagccccgattctctgtgttttgctcccgtctccgacgagagaggcggcgacggtggcgtctgcgacgggagacagcgcgtcggagcgagagagcgctgcgcctgccgccgccccaacagcggaggcgccgccgccatcggtcgtcaccagaccggagccgcaggccctcccgagcccggccatccgtgccccgctcccagatctctatccttttgggaccatgcgcggaggaggctttggggaccgggaccgggatcgtgaccgtggaggatttggagcaagaggtggtggtggccttcccccgaagaaatttggtaatcctggggagcgtttgcgtaaaaaaaagtgggatttgagtgagctccccaagtttgagaaaaatttttatgtggaacatccggaagtagcaaggctgacaccatatgaggttgatgagctacgccgaaagaaggagattacagtgagggggggagatgtttgtcctaaacccgtgtttgccttccatcatgctaacttcccacaatatgtaatggatgtgttgatggatcagcactttacagaaccaactccaattcagtgccagggatttccgttggctcttagtggccgggatatggtgggcattgctcagactggctctgggaagacgttggcgtatctcctgcctgcaattgttcatattaaccaccagccatacttggaaaggggagatggcccaatctgtctagttctggctcctaccagagagcttgcccagcaagtacagcaggtggccgatgactatggcaaatgttctagattgaagagtacttgtatttatggaggtgctcctaaaggtccccagattcgagacttggaaagaggtgttgagatctgcatagccactcctggacgtctgatagatttcctggagtcaggaaagacaaatcttcgccgatgtacttaccttgtattggacgaagctgacagaatgcttgatatggggtttgaaccccagatccgtaaaattgttgaccaaatcaggcctgataggcagacactgatgtggagtgcaacctggccaaaagaagtaagacagcttgcagaggatttccttcgtgattacacccagatcaacgtaggcaatctggagttgagtgccaaccacaacatcctccagatagtggatgtctgcatggaaagtgaaaaagaccacaagttgatccaactaatggaagaaataatggctgaaaaggaaaacaaaacaataatatttgtggagacaaagagacgctgtgatgatctgactcgaaggatgcgcagagatggttggccagctatgtgtatccatggagacaagagtcaaccagaaagagattgggtacttaatgagttccgttctggaaaggcacccatccttattgctacagatgtagcctcccgtgggctagatgtggaagatgtcaagtttgtgatcaactatgactatccaaacagctcagaggattatgtgcaccgtattggccgaacagcccgtagcaccaacaagggtaccgcctataccttcttcaccccagggaacctaaaacaggccagagagcttatcaaagtgctggaagaggccaatcaggctatcaatccaaaactgatgcagcttgtggaccacagaggaggcggcggaggcgggggtggtcgttctcgttaccggaccacttcttcagccaacaatcccaatctgatgtatcaggatgagtgtgaccgaaggcttcgaggagtcaaggatggtggccggagagactctgcaagctatcgggatcgtagtgaaaccgatagagctggttatgctaatggcagtggctatggaagtccaaattctgcctttggagcacaagcaggccaatacacctatggtcaaggcacctatggggcagctgcttatggcaccagtagctatacagctcaagaatatggtgctggcacttatggagctagtagcaccacctcaactgggagaagttcacagagctctagccagcagtttagtgggataggccggtctgggcagcagccacagccactgatgtcacaacagtttgcacagcctccgggagctaccaatatgataggttacatggggcagactgcctaccaataccctcctcctcctccccctcctcctccttcacgtaaatgaaaccactcaagtggtagtgactccagcagacttaattacattttaaggaacactgtc

SEQ ID NO: 125171 - DNA, 443 bp, Homo sapiens
  Payload ID: 4571
  Gene Symbol: DDX17
  Gene Name: DEAD (Asp-Glu-Ala-Asp) box helicase 17
  ENST ID: ENST00000475004
  CDS Start-End: 1-169
ttggccagctatgtgtatccatggagacaagagtcaaccagaaagagattgggtacttaatgagttccgttctggaaaggcacccatccttattgctacagatgtagcctcccgtgggctaggttctccggcgcttggcaaccaaatggggctacagagaagcatctaagccagttcacagagcgagcgtgtgtggggacttctcactgccacggacccttgatgcatgctccccgcgctccagtggtcccgtgtcagaaggcggagttttcgaaaggaggccgccaaaaataaaaggcaaagagacgggatcggctgcagcggtttcccaaaggaggagggagtgtgcatcgatgtggaagatgtcaagtttgtgatcaactatgactatccaaacagctcagaggattatgtgcaccgtattggccgaacagcccgtagca

SEQ ID NO: 125172 - DNA, 4711 bp, Homo sapiens
  Payload ID: 4572
  Gene Symbol: DDX21
  Gene Name: DEAD (Asp-Glu-Ala-Asp) box helicase 21
  Uniprot ID: Q9NR30
  ENST ID: ENST00000354185
  CDS Start-End: 99-2450
gggaagtgacgagagccgggtggacccagggtggggaactacctcttcctctccacgcggttgagaagaccggtcggcctgggcaacctgcgctgaagatgccgggaaaactccgtagtgacgctggtttggaatcagacaccgcaatgaaaaaaggggagacactgcgaaagcaaaccgaggagaaagagaaaaaagagaagccaaaatctgataagactgaagagatagcagaagaggaagaaactgttttccccaaagctaaacaagttaaaaagaaagcagagccttctgaagttgacatgaattctcctaaatccaaaaaggcaaaaaagaaagaggagccatctcaaaatgacatttctcctaaaaccaaaagtttgagaaagaaaaaggagcccattgaaaagaaagtggtttcttctaaaaccaaaaaagtgacaaaaaatgaggagccttctgaggaagaaatagatgctcctaagcccaagaagatgaagaaagaaaaggaaatgaatggagaaactagagagaaaagccccaaactgaagaatggatttcctcatcctgaaccggactgtaaccccagtgaagctgccagtgaagaaagtaacagtgagatagagcaggaaatacctgtggaacaaaaagaaggcgctttctctaattttcccatatctgaagaaactattaaacttctcaaaggccgaggagtgaccttcctatttcctatacaagcaaagacattccatcatgtttacagcgggaaggacttaattgcacaggcacggacaggaactgggaagacattctcctttgccatccctttgattgagaaacttcatggggaactgcaagacaggaagagaggccgtgcccctcaggtactggttcttgcacctacaagagagttggcaaatcaagtaagcaaagacttcagtgacatcacaaaaaagctgtcagtggcttgtttttatggtggaactccctatggaggtcaatttgaacgcatgaggaatgggattgatatcctggttggaacaccaggtcgtatcaaagaccacatacagaatggcaaactagatctcaccaaacttaagcatgttgtcctggatgaagtggaccagatgttggatatgggatttgctgatcaagtggaagagattttaagtgtggcatacaagaaagattctgaagacaatccccaaacattgcttttttctgcaacttgccctcattgggtatttaatgttgccaagaaatacatgaaatctacatatgaacaggtggacctgattggtaaaaagactcagaaaacggcaataactgtggagcatctggctattaagtgccactggactcagagggcagcagttattggggatgtcatccgagtatatagtggtcatcaaggacgcactatcatcttttgtgaaaccaagaaagaagcccaggagctgtcccagaattcagctataaagcaggatgctcagtccttgcatggagacattccacagaagcaaagggaaatcaccctgaaaggttttagaaatggtagttttggagttttggtggcaaccaatgttgctgcacgtgggttagacatccctgaggttgatttggttatacaaagctctccaccaaaggatgtagagtcctacattcatcgatccgggcggacaggcagagctggaaggacgggggtgtgcatctgcttttatcagcacaaggaagaatatcagttagtacaagtggagcaaaaagcgggaattaagttcaaacgaataggtgttccttctgcaacagaaataataaaagcttccagcaaagatgccatcaggcttttggattccgtgcctcccactgccattagtcacttcaaacaatcagctgagaagctgatagaggagaagggagctgtggaagctctggcagcagcactggcccatatttcaggtgccacgtccgtagaccagcgctccttgatcaactcaaatgtgggttttgtgaccatgatcttgcagtgctcaattgaaatgccaaatattagttatgcttggaaagaacttaaagagcagctgggcgaggagattgattccaaagtgaagggaatggtttttctcaaaggaaagctgggtgtttgctttgatgtacctaccgcatcagtaacagaaatacaggagaaatggcatgattcacgacgctggcagctctctgtggccacagagcaaccagaactggaaggaccacgggaaggatatggaggcttcaggggacagcgggaaggcagtcgaggcttcaggggacagcgggacggaaacagaagattcagaggacagcgggaaggcagtagaggcccgagaggacagcgatcaggaggtggcaacaaaagtaacagatcccaaaacaaaggccagaagcggagtttcagtaaagcatttggtcaataattagaaatagaagatttatatagcaaaaagagaatgatgtttggcaatatagaactgaacattatttttcatgcaaagttaaaagcacattgtgcctccttttgaccacttgccaagtccctgtctctttcagacacagacaagcttcatttaaattatttcatctgatcattatcatttataactttattgttacttcttcatcagtttttccttttgaaaggtgtatgaattcattacatttttattctaatgtattatctgtagattagaagataaaatcaagcatgtatctgcctatactttgtgagttcacctgtctttatactcaaaagtgtcccttaatagtgtccttccctgaaataaatacctaagggagtgtaacagtctctggaggaccactttgagcctttggaagttaaggtttcctcagccacctgccgaacagtttctcatgtggtcctattatttgtctactgagacttaatactgagcaatgttttgaaacaagatttcaaactaatctgggttgtaatacagtttataccagtgtatgctctagacttggaagatgtagtatgtttgatgtggattacctatacttatgttcgttttgatacatttttagcttctcattataaggtgattcatgctttagtgaattcttcatagatagtatatataaaagtacattttaatagaaagccagggttttaaggaatttcacatgtataaggtggctccatagctttatttgtaagtaggctggataaatggtgcttaaatggtaatgtactccacttcttcctattggaagattaacattatttaccaagaaggacttaagggagtagggggcgcagattagcattgctcaagagtatgtaaaaaaaaaaaaaaaaaaaaagaaccaaaccactggaaataatcaaatgcaaaaaggtaacaaattcataactggaaagcaaagagaagaacaagtatgatttggatgataaagcattgttttaatggtgaaaacttcacagatcactaatgtttctagaggttaacttcaagtgggcaagctggggtttttaggtagtcagtggcctagttcctaaagccacagtataggatctgttaaactgaatgtctgttgaaagtttgttttagctgcttggaggcttccttttaagacaaactgtatgtgattaagttgttttgagggaactgaagaacctgatgtagcccctggccagataactgcctgatttctcagatattatttctctgggaaacattctacatagcacaggagcttaagagtggcattatcttctcgccttaatttccagagattatttctgtactgagaatcctggaactactatgctaggaaatttaaagctgcatggtctgtcttgttttcatttaattattgtgaatacctagaatctttcttggtcctgatttctcttgcttaatccagtctttatctctaactgccccttatttgatcaccatgtactaggagctctgatagccagctcagctcctaatccttgaggcaacattctttttctatttgaacttcagttctgtccttgaatcccgactagatatttcttgccctctggtctcagaattctcttggcttttattccttgatccacttgccagttttatcactttacccttgttcctcatggcttcccatcaagccatgggtattaggtgacagtgtaatttattagattctggttttgcccaaatactgggcatgctttaataataactgaaccatttcattatttggataggcatgggtaccttatcaagcagattaaaaggatatggtacccgtcctttagaaaagaacagctaaaaccttgttgtggattatggatttagcctaaagaaaaataatctggcataaattaagagtaagagagaagattaatagaaatttcacttcacataacttaaaacatggctatttcaataaaggactaaagtttctcctggatcccagaattcaacctgtatttataaatgtataatgtatttagctactttttggtttaaatgaacttgttgggttagcttggtaaatgttataatttttactattttctacaaagaaaatattttctaatttaagttggagctatctgtgcagcagtttctctacagttgtgcataaatgtttttactataaaatgagctaatgtataaaatactgctgtataccataataaagatagtaatacttgatttta

SEQ ID NO: 125173 - DNA, 4829 bp, Homo sapiens
  Payload ID: 4572
  Gene Symbol: DDX21
  Gene Name: DEAD (Asp-Glu-Ala-Asp) box helicase 21
  Uniprot ID: Q9NR30
  ENST ID: ENST00000620315
  CDS Start-End: 427-2574
gggtcttggcgggcggtcgcccaggagtggtgcgctccccgggcagtggacgcgtcgtttgcccgaccgagccaggtccgccgtgcgctgacctcttcctctgagcttataggcatccacaggtcggaactctggtagagaggccctgttggagctcgggagagggccgggtgtcccacgtggtccccggcgacttgggcgcgcctcacacagtgcgcagagttggaccttcagtcaggctccacgttgttggctaagacagaactcccggcatgagcgtgcgcgaaggaagttacacgtcaagtcaaaaaagagaaaaaagagaagccaaaatctgataagactgaagagatagcagaagaggaagaaactgttttccccaaagctaaacaagttaaaaagaaagcagagccttctgaagttgacatgaattctcctaaatccaaaaaggcaaaaaagaaagaggagccatctcaaaatgacatttctcctaaaaccaaaagtttgagaaagaaaaaggagcccattgaaaagaaagtggtttcttctaaaaccaaaaaagtgacaaaaaatgaggagccttctgaggaagaaatagatgctcctaagcccaagaagatgaagaaagaaaaggaaatgaatggagaaactagagagaaaagccccaaactgaagaatggatttcctcatcctgaaccggactgtaaccccagtgaagctgccagtgaagaaagtaacagtgagatagagcaggaaatacctgtggaacaaaaagaaggcgctttctctaattttcccatatctgaagaaactattaaacttctcaaaggccgaggagtgaccttcctatttcctatacaagcaaagacattccatcatgtttacagcgggaaggacttaattgcacaggcacggacaggaactgggaagacattctcctttgccatccctttgattgagaaacttcatggggaactgcaagacaggaagagaggccgtgcccctcaggtactggttcttgcacctacaagagagttggcaaatcaagtaagcaaagacttcagtgacatcacaaaaaagctgtcagtggcttgtttttatggtggaactccctatggaggtcaatttgaacgcatgaggaatgggattgatatcctggttggaacaccaggtcgtatcaaagaccacatacagaatggcaaactagatctcaccaaacttaagcatgttgtcctggatgaagtggaccagatgttggatatgggatttgctgatcaagtggaagagattttaagtgtggcatacaagaaagattctgaagacaatccccaaacattgcttttttctgcaacttgccctcattgggtatttaatgttgccaagaaatacatgaaatctacatatgaacaggtggacctgattggtaaaaagactcagaaaacggcaataactgtggagcatctggctattaagtgccactggactcagagggcagcagttattggggatgtcatccgagtatatagtggtcatcaaggacgcactatcatcttttgtgaaaccaagaaagaagcccaggagctgtcccagaattcagctataaagcaggatgctcagtccttgcatggagacattccacagaagcaaagggaaatcaccctgaaaggttttagaaatggtagttttggagttttggtggcaaccaatgttgctgcacgtgggttagacatccctgaggttgatttggttatacaaagctctccaccaaaggatgtagagtcctacattcatcgatccgggcggacaggcagagctggaaggacgggggtgtgcatctgcttttatcagcacaaggaagaatatcagttagtacaagtggagcaaaaagcgggaattaagttcaaacgaataggtgttccttctgcaacagaaataataaaagcttccagcaaagatgccatcaggcttttggattccgtgcctcccactgccattagtcacttcaaacaatcagctgagaagctgatagaggagaagggagctgtggaagctctggcagcagcactggcccatatttcaggtgccacgtccgtagaccagcgctccttgatcaactcaaatgtgggttttgtgaccatgatcttgcagtgctcaattgaaatgccaaatattagttatgcttggaaagaacttaaagagcagctgggcgaggagattgattccaaagtgaagggaatggtttttctcaaaggaaagctgggtgtttgctttgatgtacctaccgcatcagtaacagaaatacaggagaaatggcatgattcacgacgctggcagctctctgtggccacagagcaaccagaactggaaggaccacgggaaggatatggaggcttcaggggacagcgggaaggcagtcgaggcttcaggggacagcgggacggaaacagaagattcagaggacagcgggaaggcagtagaggcccgagaggacagcgatcaggaggtggcaacaaaagtaacagatcccaaaacaaaggccagaagcggagtttcagtaaagcatttggtcaataattagaaatagaagatttatatagcaaaaagagaatgatgtttggcaatatagaactgaacattatttttcatgcaaagttaaaagcacattgtgcctccttttgaccacttgccaagtccctgtctctttcagacacagacaagcttcatttaaattatttcatctgatcattatcatttataactttattgttacttcttcatcagtttttccttttgaaaggtgtatgaattcattacatttttattctaatgtattatctgtagattagaagataaaatcaagcatgtatctgcctatactttgtgagttcacctgtctttatactcaaaagtgtcccttaatagtgtccttccctgaaataaatacctaagggagtgtaacagtctctggaggaccactttgagcctttggaagttaaggtttcctcagccacctgccgaacagtttctcatgtggtcctattatttgtctactgagacttaatactgagcaatgttttgaaacaagatttcaaactaatctgggttgtaatacagtttataccagtgtatgctctagacttggaagatgtagtatgtttgatgtggattacctatacttatgttcgttttgatacatttttagcttctcattataaggtgattcatgctttagtgaattcttcatagatagtatatataaaagtacattttaatagaaagccagggttttaaggaatttcacatgtataaggtggctccatagctttatttgtaagtaggctggataaatggtgcttaaatggtaatgtactccacttcttcctattggaagattaacattatttaccaagaaggacttaagggagtagggggcgcagattagcattgctcaagagtatgtaaaaaaaaaaaaaaaaaaaaagaaccaaaccactggaaataatcaaatgcaaaaaggtaacaaattcataactggaaagcaaagagaagaacaagtatgatttggatgataaagcattgttttaatggtgaaaacttcacagatcactaatgtttctagaggttaacttcaagtgggcaagctggggtttttaggtagtcagtggcctagttcctaaagccacagtataggatctgttaaactgaatgtctgttgaaagtttgttttagctgcttggaggcttccttttaagacaaactgtatgtgattaagttgttttgagggaactgaagaacctgatgtagcccctggccagataactgcctgatttctcagatattatttctctgggaaacattctacatagcacaggagcttaagagtggcattatcttctcgccttaatttccagagattatttctgtactgagaatcctggaactactatgctaggaaatttaaagctgcatggtctgtcttgttttcatttaattattgtgaatacctagaatctttcttggtcctgatttctcttgcttaatccagtctttatctctaactgccccttatttgatcaccatgtactaggagctctgatagccagctcagctcctaatccttgaggcaacattctttttctatttgaacttcagttctgtccttgaatcccgactagatatttcttgccctctggtctcagaattctcttggcttttattccttgatccacttgccagttttatcactttacccttgttcctcatggcttcccatcaagccatgggtattaggtgacagtgtaatttattagattctggttttgcccaaatactgggcatgctttaataataactgaaccatttcattatttggataggcatgggtaccttatcaagcagattaaaaggatatggtacccgtcctttagaaaagaacagctaaaaccttgttgtggattatggatttagcctaaagaaaaataatctggcataaattaagagtaagagagaagattaatagaaatttcacttcacataacttaaaacatggctatttcaataaaggactaaagtttctcctggatcccagaattcaacctgtatttataaatgtataatgtatttagctactttttggtttaaatgaacttgttgggttagcttggtaaatgttataatttttactattttctacaaagaaaatattttctaatttaagttggagctatctgtgcagcagtttctctacagttgtgcataaatgtttttactataaaatgagctaatgtataaaatactgctgtataccataataaagatagtaatacttg

SEQ ID NO: 125174 - DNA, 2738 bp, Homo sapiens
  Payload ID: 4573
  Gene Symbol: DDX24
  Gene Name: DEAD (Asp-Glu-Ala-Asp) box helicase 24
  Uniprot ID: Q9GZR7
  ENST ID: ENST00000330836
  CDS Start-End: 71-2485
gtacagcggcggtttctgaggttcttcactcgcgactgacggagctgcggtggcgtctccacacgcaaccatgaagttgaaggacacaaaatcaaggccaaagcagtcaagctgtggcaaatttcagacaaagggaatcaaagttgtgggaaaatggaaggaagtgaagattgacccaaatatgtttgcagatggacagatggatgacttggtgtgctttgaggaattgacagattaccagttggtctcccctgccaagaatccctccagtctcttctcaaaggaagcacccaagagaaaggcacaagctgtttcagaagaagaggaggaggaggagggaaagtctagctcaccaaagaaaaagatcaagttgaagaaaagtaaaaatgtagcaactgaaggaaccagtacccagaaagaatttgaagtgaaagatcctgagctggaggcccagggagatgacatggtttgtgatgatccggaggctggggagatgacatcagaaaacctggtccaaactgctccaaaaaagaagaaaaataaagggaaaaaagggttggagccttctcagagcactgctgccatccgtgacaaactggacatccttggggctgctgagacaggaagtgggaaaactcttgcctttgccatcccaatgattcatgcggtgttgcagtggcagaagaggaatgctgcccctcctccaagtaacaccgaagcaccacctggagagaccagaactgaggccggagctgagactagatcaccaggcaaggctgaagctgagtctgatgcattgcctgacgatactgtaattgagagtgaagcactgcccagtgatattgcagccgaggccagagccaagactggaggcactgtctcagaccaggcgttgctctttggtgacgatgatgctggtgaagggccttcttccctgatcagggagaaacctgttcccaaacagaatgagaatgaggaggaaaatcttgataaagagcagactggaaatctaaaacaggagttggatgacaaaagcgccacctgtaaggcatatccaaagcgtcctctgcttggactggttctgactcccactcgagagctggccgtccaggtcaaacagcacattgatgctgtggccaggtttacaggaattaaaactgctattttggttggtggaatgtccacgcagaaacagcagaggatgctgaaccgtcgtcctgagattgtggttgctactccaggccggctgtgggaattaattaaagaaaagcattatcatttgaggaaccttcggcagctcaggtgcctggtagtggatgaggctgaccggatggttgagaaaggccattttgctgagctctcacagctgctagagatgctcaatgactcccaatacaacccaaagagacaaacgcttgttttttctgccacactcaccctggtgcatcaggctcctgctcgaatccttcataagaagcacaccaagaaaatggataaaacagccaaacttgacctccttatgcagaaaattggcatgaggggcaagcccaaggtcattgacctcacaaggaatgaggccacggtggagacgctaacagagaccaagatccattgtgagactgatgagaaagacttctacttgtactacttcctgatgcagtatccaggccgcagcttagtgtttgccaacagtatctcctgcatcaaacgcctctctgggctcctcaaagtccttgatatcatgcccttgaccctgcatgcctgtatgcaccagaagcagaggctcagaaacctggagcagtttgcccgtctggaagactgtgttctcttggcaacagatgtggcagctcggggtctggatattcctaaagtccagcatgtcatccattaccaggtcccacgtacctcggagatttatgtccaccgaagtggtcgaactgctcgagctaccaatgaaggcctcagtctgatgctcattgggcctgaggatgtgatcaactttaagaagatttacaaaacgctcaagaaagatgaggatatcccactgttccccgtgcagacaaaatacatggatgtggtcaaggagcgaatccgtttagctcgacagattgagaaatctgagtatcggaacttccaggcttgcctgcacaactcttggattgagcaggcagcagctgccctggagattgagctggaagaagacatgtataagggaggaaaagctgaccagcaagaagaacgtcggagacaaaagcagatgaaggttctgaagaaggagctgcgccacctgctgtcccagccactgtttacggagagccagaaaaccaagtatcccactcagtctggcaagccgcccctgcttgtgtctgccccaagtaagagcgagtctgctttgagctgtctctccaagcagaagaagaagaagacaaagaagccgaaggagccacagccggaacagccacagccaagtacaagtgcaaattaactggtcaagtgtgtcagtgactgcacattggtttctgttctctggctatttgcaaaacctctcccacccttgtgtttcactccaccaccaaccccaggtaaaaaagtctccctctcttccactcacacccatagcgggagagacctcatgcagatttgcattgttttggagtaagaattcaatgcagcagcttaatttttctgtattgcagtgtttataggcttcttgtgtgttaaacttgatttcataaatt

SEQ ID NO: 125175 - DNA, 2214 bp, Homo sapiens
  Payload ID: 4573
  Gene Symbol: DDX24
  Gene Name: DEAD (Asp-Glu-Ala-Asp) box helicase 24
  ENST ID: ENST00000544005
  CDS Start-End: 117-1946
agttgctgctgcagctgaggtacagcggcggtttctgaggttcttcactcgcgactgacggagctgcggtggcgtctccacacggaagtgggaaaactcttgcctttgccatcccaatgattcatgcggtgttgcagtggcagaagaggaatgctgcccctcctccaagtaacaccgaagcaccacctggagagaccagaactgaggccggagctgagactagatcaccaggcaaggctgaagctgagtctgatgcattgcctgacgatactgtaattgagagtgaagcactgcccagtgatattgcagccgaggccagagccaagactggaggcactgtctcagaccaggcgttgctctttggtgacgatgatgctggtgaagggccttcttccctgatcagggagaaacctgttcccaaacagaatgagaatgaggaggaaaatcttgataaagagcagactggaaatctaaaacaggagttggatgacaaaagcgccacctgtaaggcatatccaaagcgtcctctgcttggactggttctgactcccactcgagagctggccgtccaggtcaaacagcacattgatgctgtggccaggtttacaggaattaaaactgctattttggttggtggaatgtccacgcagaaacagcagaggatgctgaaccgtcgtcctgagattgtggttgctactccaggccggctgtgggaattaattaaagaaaagcattatcatttgaggaaccttcggcagctcaggtgcctggtagtggatgaggctgaccggatggttgagaaaggccattttgctgagctctcacagctgctagagatgctcaatgactcccaatacaacccaaagagacaaacgcttgttttttctgccacactcaccctggtgcatcaggctcctgctcgaatccttcataagaagcacaccaagaaaatggataaaacagccaaacttgacctccttatgcagaaaattggcatgaggggcaagcccaaggtcattgacctcacaaggaatgaggccacggtggagacgctaacagagaccaagatccattgtgagactgatgagaaagacttctacttgtactacttcctgatgcagtatccaggccgcagcttagtgtttgccaacagtatctcctgcatcaaacgcctctctgggctcctcaaagtccttgatatcatgcccttgaccctgcatgcctgtatgcaccagaagcagaggctcagaaacctggagcagtttgcccgtctggaagactgtgttctcttggcaacagatgtggcagctcggggtctggatattcctaaagtccagcatgtcatccattaccaggtcccacgtacctcggagatttatgtccaccgaagtggtcgaactgctcgagctaccaatgaaggcctcagtctgatgctcattgggcctgaggatgtgatcaactttaagaagatttacaaaacgctcaagaaagatgaggatatcccactgttccccgtgcagacaaaatacatggatgtggtcaaggagcgaatccgtttagctcgacagattgagaaatctgagtatcggaacttccaggcttgcctgcacaactcttggattgagcaggcagcagctgccctggagattgagctggaagaagacatgtataagggaggaaaagctgaccagcaagaagaacgtcggagacaaaagcagatgaaggttctgaagaaggagctgcgccacctgctgtcccagccactgtttacggagagccagaaaaccaagtatcccactcagtctggcaagccgcccctgcttgtgtctgccccaagtaagagcgagtctgctttgagctgtctctccaagcagaagaagaagaagacaaagaagccgaaggagccacagccggaacagccacagccaagtacaagtgcaaattaactggtcaagtgtgtcagtgactgcacattggtttctgttctctggctatttgcaaaacctctcccacccttgtgtttcactccaccaccaaccccaggtaaaaaagtctccctctcttccactcacacccatagcgggagagacctcatgcagatttgcattgttttggagtaagaattcaatgcagcagcttaatttttctgtattgcagtgtttataggcttcttgtgtgttaaacttgatttcataaattaaaaacaatggtcag

SEQ ID NO: 125176 - DNA, 2769 bp, Homo sapiens
  Payload ID: 4573
  Gene Symbol: DDX24
  Gene Name: DEAD (Asp-Glu-Ala-Asp) box helicase 24
  ENST ID: ENST00000555054
  CDS Start-End: 93-2543
agttgctgctgcagctgaggtacagcggcggtttctgaggttcttcactcgcgactgacggagctgcggtggcgtctccacacgatggacagatggatgacttggtgtgctttgaggaattgacagattaccagttggtctcccctgccaagaatccctccagtctcttctcaaaggaagcacccaagagaaaggcacaagctgtttcagaagaagaggaggaggaggagggaaagtctagctcaccaaagaaaaagatcaagttgaagaaaagtaaaaatgtagcaactgaaggaaccagtacccagaaagaatttgaagtgaaagatcctgagctggaggcccagggagatgacatggtttgtgatgatccggaggctggggagatgacatcagaaaacctggtccaaactgctccaaaaaagaagaaaaataaagggaaaaaagggttggagccttctcagagcactgctgccaaggtgcccaaaaaagcgaagacatggattcctgaagttcatgatcagaaagcagatgtgtcagcttggaaggacctgtttgttcccaggccggttctccgagcactcagctttctaggcttctctgcacccacaccaatccaagccctgaccttggcacctgccatccgtgacaaactggacatccttggggctgctgagacaggaagtgggaaaactcttgcctttgccatcccaatgattcatgcggtgttgcagtggcagaagaggaatgctgcccctcctccaagtaacaccgaagcaccacctggagagaccagaactgaggccggagctgagactagatcaccaggcaaggctgaagctgagtctgatgcattgcctgacgatactgtaattgagagtgaagcactgcccagtgatattgcagccgaggccagagccaagactggaggcactgtctcagaccaggcgttgctctttggtgacgatgatgctggtgaagggccttcttccctgatcagggagaaacctgttcccaaacagaatgagaatgaggaggaaaatcttgataaagagcagactggaaatctaaaacaggagttggatgacaaaagcgccacctgtaaggcatatccaaagcgtcctctgcttggactggttctgactcccactcgagagctggccgtccaggtcaaacagcacattgatgctgtggccaggtttacaggaattaaaactgctattttggttggtggaatgtccacgcagaaacagcagaggatgctgaaccgtcgtcctgagattgtggttgctactccaggccggctgtgggaattaattaaagaaaagcattatcatttgaggaaccttcggcagctcaggtgcctggtagtggatgaggctgaccggatggttgagaaaggccattttgctgagctctcacagctgctagagatgctcaatgactcccaatacaacccaaagagacaaacgcttgttttttctgccacactcaccctggtgcatcaggctcctgctcgaatccttcataagaagcacaccaagaaaatggataaaacagccaaacttgacctccttatgcagaaaattggcatgaggggcaagcccaaggtcattgacctcacaaggaatgaggccacggtggagacgctaacagagaccaagatccattgtgagactgatgagaaagacttctacttgtactacttcctgatgcagtatccaggccgcagcttagtgtttgccaacagtatctcctgcatcaaacgcctctctgggctcctcaaagtccttgatatcatgcccttgaccctgcatgcctgtatgcaccagaagcagaggctcagaaacctggagcagtttgcccgtctggaagactgtgttctcttggcaacagatgtggcagctcggggtctggatattcctaaagtccagcatgtcatccattaccaggtcccacgtacctcggagatttatgtccaccgaagtggtcgaactgctcgagctaccaatgaaggcctcagtctgatgctcattgggcctgaggatgtgatcaactttaagaagatttacaaaacgctcaagaaagatgaggatatcccactgttccccgtgcagacaaaatacatggatgtggtcaaggagcgaatccgtttagctcgacagattgagaaatctgagtatcggaacttccaggcttgcctgcacaactcttggattgagcaggcagcagctgccctggagattgagctggaagaagacatgtataagggaggaaaagctgaccagcaagaagaacgtcggagacaaaagcagatgaaggttctgaagaaggagctgcgccacctgctgtcccagccactgtttacggagagccagaaaaccaagtatcccactcagtctggcaagccgcccctgcttgtgtctgccccaagtaagagcgagtctgctttgagctgtctctccaagcagaagaagaagaagacaaagaagccgaaggagccacagccggaacagccacagccaagtacaagtgcaaattaactggtcaagtgtgtcagtgactgcacattggtttctgttctctggctatttgcaaaacctctcccacccttgtgtttcactccaccaccaaccccaggtaaaaaagtctccctctcttccactcacacccatagcgggagagacctcatgcagatttgcattgttttggagtaagaattcaatgcagcagcttaatttttctgtattgcagtgtttataggcttct

SEQ ID NO: 125177 - DNA, 2738 bp, Homo sapiens; identical to SEQ ID NO: 125174
  Payload ID: 4573
  Gene Symbol: DDX24
  Gene Name: DEAD (Asp-Glu-Ala-Asp) box helicase 24
  Uniprot ID: Q9GZR7
  ENST ID: ENST00000618456
  CDS Start-End: 71-2485

SEQ ID NO: 125178 - DNA, 2769 bp, Homo sapiens; identical to SEQ ID NO: 125176
  Payload ID: 4573
  Gene Symbol: DDX24
  Gene Name: DEAD (Asp-Glu-Ala-Asp) box helicase 24
  ENST ID: ENST00000614817
  CDS Start-End: 93-2543

SEQ ID NO: 125179 - DNA, 1730 bp, Homo sapiens
  Payload ID: 4573
  Gene Symbol: DDX24
  Gene Name: DEAD (Asp-Glu-Ala-Asp) box helicase 24
  ENST ID: ENST00000622786
  CDS Start-End: 35-1492
aaagagcagactggaaatctaaaacaggagttggatgacaaaagcgccatgtaaggcatatccaaagcgtcctctgcttggactggttctgactcccactcgagagctggccgtccaggtcaaacagcacattgatgctgtggccaggtttacaggaattaaaactgctattttggttggtggaatgtccacgcagaaacagcagaggatgctgaaccgtcgtcctgagattgtggttgctactccaggccggctgtgggaattaattaaagaaaagcattatcatttgaggaaccttcggcagctcaggtgcctggtagtggatgaggctgaccggatggttgagaaaggccattttgctgagctctcacagctgctagagatgctcaatgactcccaatacaacccaaagagacaaacgcttgttttttctgccacactcaccctggtgcatcaggctcctgctcgaatccttcataagaagcacaccaagaaaatggataaaacagccaaacttgacctccttatgcagaaaattggcatgaggggcaagcccaaggtcattgacctcacaaggaatgaggccacggtggagacgctaacagagaccaagatccattgtgagactgatgagaaagacttctacttgtactacttcctgatgcagtatccaggccgcagcttagtgtttgccaacagtatctcctgcatcaaacgcctctctgggctcctcaaagtccttgatatcatgcccttgaccctgcatgcctgtatgcaccagaagcagaggctcagaaacctggagcagtttgcccgtctggaagactgtgttctcttggcaacagatgtggcagctcggggtctggatattcctaaagtccagcatgtcatccattaccaggtcccacgtacctcggagatttatgtccaccgaagtggtcgaactgctcgagctaccaatgaaggcctcagtctgatgctcattgggcctgaggatgtgatcaactttaagaagatttacaaaacgctcaagaaagatgaggatatcccactgttccccgtgcagacaaaatacatggatgtggtcaaggagcgaatccgtttagctcgacagattgagaaatctgagtatcggaacttccaggcttgcctgcacaactcttggattgagcaggcagcagctgccctggagattgagctggaagaagacatgtataagggaggaaaagctgaccagcaagaagaacgtcggagacaaaagcagatgaaggttctgaagaaggagctgcgccacctgctgtcccagccactgtttacggagagccagaaaaccaagtatcccactcagtctggcaagccgcccctgcttgtgtctgccccaagtaagagcgagtctgctttgagctgtctctccaagcagaagaagaagaagacaaagaagccgaaggagccacagccggaacagccacagccaagtacaagtgcaaattaactggtcaagtgtgtcagtgactgcacattggtttctgttctctggctatttgcaaaacctctcccacccttgtgtttcactccaccaccaaccccaggtaaaaaagtctccctctcttccactcacacccatagcgggagagacctcatgcagatttgcattgttttggagtaagaattcaatgcagcagcttaatttttctgtattgcagtgtttataggcttcttgtgtgttaaac

SEQ ID NO: 125180 - DNA, 5612 bp, Homo sapiens
  Payload ID: 4573
  Gene Symbol: DDX24
  Gene Name: DEAD (Asp-Glu-Ala-Asp) box helicase 24
  Uniprot ID: Q9GZR7
  ENST ID: ENST00000621632
  CDS Start-End: 133-2712
agcgcgcacgagtacgtgcgtggaggtcccgccccggaactgcagttgctgctgcagctgaggtacagcggcggtttctgaggttcttcactcgcgactgacggagctgcggtggcgtctccacacgcaaccatgaagttgaaggacacaaaatcaaggccaaagcagtcaagctgtggcaaatttcagacaaagggaatcaaagttgtgggaaaatggaaggaagtgaagattgacccaaatatgtttgcagatggacagatggatgacttggtgtgctttgaggaattgacagattaccagttggtctcccctgccaagaatccctccagtctcttctcaaaggaagcacccaagagaaaggcacaagctgtttcagaagaagaggaggaggaggagggaaagtctagctcaccaaagaaaaagatcaagttgaagaaaagtaaaaatgtagcaactgaaggaaccagtacccagaaagaatttgaagtgaaagatcctgagctggaggcccagggagatgacatggtttgtgatgatccggaggctggggagatgacatcagaaaacctggtccaaactgctccaaaaaagaagaaaaataaagggaaaaaagggttggagccttctcagagcactgctgccaaggtgcccaaaaaagcgaagacatggattcctgaagttcatgatcagaaagcagatgtgtcagcttggaaggacctgtttgttcccaggccggttctccgagcactcagctttctaggcttctctgcacccacaccaatccaagccctgaccttggcacctgccatccgtgacaaactggacatccttggggctgctgagacaggaagtgggaaaactcttgcctttgccatcccaatgattcatgcggtgttgcagtggcagaagaggaatgctgcccctcctccaagtaacaccgaagcaccacctggagagaccagaactgaggccggagctgagactagatcaccaggcaaggctgaagctgagtctgatgcattgcctgacgatactgtaattgagagtgaagcactgcccagtgatattgcagccgaggccagagccaagactggaggcactgtctcagaccaggcgttgctctttggtgacgatgatgctggtgaagggccttcttccctgatcagggagaaacctgttcccaaacagaatgagaatgaggaggaaaatcttgataaagagcagactggaaatctaaaacaggagttggatgacaaaagcgccacctgtaaggcatatccaaagcgtcctctgcttggactggttctgactcccactcgagagctggccgtccaggtcaaacagcacattgatgctgtggccaggtttacaggaattaaaactgctattttggttggtggaatgtccacgcagaaacagcagaggatgctgaaccgtcgtcctgagattgtggttgctactccaggccggctgtgggaattaattaaagaaaagcattatcatttgaggaaccttcggcagctcaggtgcctggtagtggatgaggctgaccggatggttgagaaaggccattttgctgagctctcacagctgctagagatgctcaatgactcccaatacaacccaaagagacaaacgcttgttttttctgccacactcaccctggtgcatcaggctcctgctcgaatccttcataagaagcacaccaagaaaatggataaaacagccaaacttgacctccttatgcagaaaattggcatgaggggcaagcccaaggtcattgacctcacaaggaatgaggccacggtggagacgctaacagagaccaagatccattgtgagactgatgagaaagacttctacttgtactacttcctgatgcagtatccaggccgcagcttagtgtttgccaacagtatctcctgcatcaaacgcctctctgggctcctcaaagtccttgatatcatgcccttgaccctgcatgcctgtatgcaccagaagcagaggctcagaaacctggagcagtttgcccgtctggaagactgtgttctcttggcaacagatgtggcagctcggggtctggatattcctaaagtccagcatgtcatccattaccaggtcccacgtacctcggagatttatgtccaccgaagtggtcgaactgctcgagctaccaatgaaggcctcagtctgatgctcattgggcctgaggatgtgatcaactttaagaagatttacaaaacgctcaagaaagatgaggatatcccactgttccccgtgcagacaaaatacatggatgtggtcaaggagcgaatccgtttagctcgacagattgagaaatctgagtatcggaacttccaggcttgcctgcacaactcttggattgagcaggcagcagctgccctggagattgagctggaagaagacatgtataagggaggaaaagctgaccagcaagaagaacgtcggagacaaaagcagatgaaggttctgaagaaggagctgcgccacctgctgtcccagccactgtttacggagagccagaaaaccaagtatcccactcagtctggcaagccgcccctgcttgtgtctgccccaagtaagagcgagtctgctttgagctgtctctccaagcagaagaagaagaagacaaagaagccgaaggagccacagccggaacagccacagccaagtacaagtgcaaattaactggtcaagtgtgtcagtgactgcacattggtttctgttctctggctatttgcaaaacctctcccacccttgtgtttcactccaccaccaaccccaggtaaaaaagtctccctctcttccactcacacccatagcgggagagacctcatgcagatttgcattgttttggagtaagaattcaatgcagcagcttaatttttctgtattgcagtgtttataggcttcttgtgtgttaaacttgatttcataaattaaaaacaatggtcagagccattgtgtcatcctgattttttttttttttttttagatagaagatgggggtggtggtgtagtttgtttcattattaacttagtgattctcctgggccagcacagtgctaagcccttgaaaggacaggaatagtgtcaggcctctggctgcaggccaagattggacagtgtgaatggagcaagaggctggaatgttcaagaggtgcatgttcctgctttacccagagcagcaccctaatagctccttagctctctccactctcctgggtattgtctgagccaccgtgggaggtgggcagggatgaggttgctgtcttcaggcttccctcacatcacagagccaacagtaacagtcgctaggtctggcgtgtgaagccctcaggatctagccccagccttgtctccactccctcctgtttgacagagcaggctcctgcccacggttccatgcaccccttctcttgtcctgagcctttgtgcagaataggcttttccctcggtctggattgccttttggccttctccatcctggagcactgccatgggtcctctagtcctgagcctctaaggggaagcagtgcttctcctggggctcccttagtgtcccgtgcttaccctcttcatagcacttgccatgctgtgttcccttagctgagctccttgggagaagaggaactcaaggcttggtcagcctggtataaatatgtgctcagggaactagggacttcctgatgctgccccagctttgtctggatcagtgtaggtgagtatccacaactcccacaaccatgggagaagcatagatgatttctgcacagctgtctggcttccaaacaggtattcgtcggggcacaatacaatacagctgtttagttcaaggggtgctagggaattgaagaggatacacaaagggaccaagataccccaagatctaagtagctagcctctctcagcctcatggttggcacttttatctaattagcatttagtcttgaaggtcctgagaaataattttcttttttttttgagacagggtcttgctccattgcccaggttggagtgcaatggcacaatcacagctcactgcaacctcacactcctgggcccaggcagtcctcccgcctcagcctcccaagtagctgggactacaggcacacaccaccacacctggctgaattttttttttttagtagagatggggtctcactatgttggcgtaggctggtctcaaaactcctgccctcaagtgatcctcttgcctcagcctcccaaagtactgagattacaggtgtgagccactgtgcccatctataagtctttattagtgttttttgtacttgagcatatagacacccagtgattgagacttgcccagggccacacagcagccaagtagcagaggtgggattagtatcttccttctgggcccaggacaagttcagaaaactacttcagtctcagaagtgttgccaaggaatggcctcccatcccccagtgtcaccagtgaccggaataggaggggaaattgcccgtctgtgaggtcagctcctgactgacagctatcagagaatggcagggagactctccattttccaaatgatgcagtggtggtcagtggggttagtaagcgggcttaatatcccctaatggcacctgagccgtgggagtgaagccacttgccataagccaaacatagatcccctgatgactgtccgtgtcctgccctagccatctaacagcaaattcttttccttggtggaggagctaatacgtagacaggctttaaaaggcaggagcagccttccaagcagtgctactctcgcctggtaaggtgaagttggtgggcagagcttccggagtgtcctggatctgccattaaacaaggaatatccctccccagctaatctacttaatacataagcaccacggaaaagcagagttcttggctgcatgccaggtacccagtattaagaagccaggacaaaagtagttatggaaaccattttaatgctaggagaatgtttttacttactgcctagggaagctgtagggcttggcccacatccagcagggcctggggcccctggaagccactcactgagttacagccccctccccactcctgtatctgctcagggtggtgatgtgtttgctcctagactctctctcatggttcccctgacactcctgcttgggaagccaccgagtcactgccaaggtgacatgcttccccatctgcagtgccctatgcttcctgtcaggaaggacaggttggggaatatccctttgcagagcccatacgatgagtgtgtcaggtataatagctattttcacacaaggaatctcattctgttttaaccaataatccagtgacacataggtattgttgccatttcacaaacttgggaattggggctcagggaggtgaagtgacttggccaagatcatacagctagtaagtgaatgctgaagttagaaccctggcattctggctccagagctctcatttgtgcttaaaataggaacccagtcaaaagcagggactgtgctctttctgttgctaattgttcccattgatttaaaagtttcctttggagagaaagtatcataataaacatgcagttgtaaaa

SEQ ID NO: 125181 - DNA, 2981 bp, Homo sapiens
  Payload ID: 4573
  Gene Symbol: DDX24
  Gene Name: DEAD (Asp-Glu-Ala-Asp) box helicase 24
  Uniprot ID: Q9GZR7
  ENST ID: ENST00000613280
  CDS Start-End: 133-2712
agcgcgcacgagtacgtgcgtggaggtcccgccccggaactgcagttgctgctgcagctgaggtacagcggcggtttctgaggttcttcactcgcgactgacggagctgcggtggcgtctccacacgcaaccatgaagttgaaggacacaaaatcaaggccaaagcagtcaagctgtggcaaatttcagacaaagggaatcaaagttgtgggaaaatggaaggaagtgaagattgacccaaatatgtttgcagatggacagatggatgacttggtgtgctttgaggaattgacagattaccagttggtctcccctgccaagaatccctccagtctcttctcaaaggaagcacccaagagaaaggcacaagctgtttcagaagaagaggaggaggaggagggaaagtctagctcaccaaagaaaaagatcaagttgaagaaaagtaaaaatgtagcaactgaaggaaccagtacccagaaagaatttgaagtgaaagatcctgagctggaggcccagggagatgacatggtttgtgatgatccggaggctggggagatgacatcagaaaacctggtccaaactgctccaaaaaagaagaaaaataaagggaaaaaagggttggagccttctcagagcactgctgccaaggtgcccaaaaaagcgaagacatggattcctgaagttcatgatcagaaagcagatgtgtcagcttggaaggacctgtttgttcccaggccggttctccgagcactcagctttctaggcttctctgcacccacaccaatccaagccctgaccttggcacctgccatccgtgacaaactggacatccttggggctgctgagacaggaagtgggaaaactcttgcctttgccatcccaatgattcatgcggtgttgcagtggcagaagaggaatgctgcccctcctccaagtaacaccgaagcaccacctggagagaccagaactgaggccggagctgagactagatcaccaggcaaggctgaagctgagtctgatgcattgcctgacgatactgtaattgagagtgaagcactgcccagtgatattgcagccgaggccagagccaagactggaggcactgtctcagaccaggcgttgctctttggtgacgatgatgctggtgaagggccttcttccctgatcagggagaaacctgttcccaaacagaatgagaatgaggaggaaaatcttgataaagagcagactggaaatctaaaacaggagttggatgacaaaagcgccacctgtaaggcatatccaaagcgtcctctgcttggactggttctgactcccactcgagagctggccgtccaggtcaaacagcacattgatgctgtggccaggtttacaggaattaaaactgctattttggttggtggaatgtccacgcagaaacagcagaggatgctgaaccgtcgtcctgagattgtggttgctactccaggccggctgtgggaattaattaaagaaaagcattatcatttgaggaaccttcggcagctcaggtgcctggtagtggatgaggctgaccggatggttgagaaaggccattttgctgagctctcacagctgctagagatgctcaatgactcccaatacaacccaaagagacaaacgcttgttttttctgccacactcaccctggtgcatcaggctcctgctcgaatccttcataagaagcacaccaagaaaatggataaaacagccaaacttgacctccttatgcagaaaattggcatgaggggcaagcccaaggtcattgacctcacaaggaatgaggccacggtggagacgctaacagagaccaagatccattgtgagactgatgagaaagacttctacttgtactacttcctgatgcagtatccaggccgcagcttagtgtttgccaacagtatctcctgcatcaaacgcctctctgggctcctcaaagtccttgatatcatgcccttgaccctgcatgcctgtatgcaccagaagcagaggctcagaaacctggagcagtttgcccgtctggaagactgtgttctcttggcaacagatgtggcagctcggggtctggatattcctaaagtccagcatgtcatccattaccaggtcccacgtacctcggagatttatgtccaccgaagtggtcgaactgctcgagctaccaatgaaggcctcagtctgatgctcattgggcctgaggatgtgatcaactttaagaagatttacaaaacgctcaagaaagatgaggatatcccactgttccccgtgcagacaaaatacatggatgtggtcaaggagcgaatccgtttagctcgacagattgagaaatctgagtatcggaacttccaggcttgcctgcacaactcttggattgagcaggcagcagctgccctggagattgagctggaagaagacatgtataagggaggaaaagctgaccagcaagaagaacgtcggagacaaaagcagatgaaggttctgaagaaggagctgcgccacctgctgtcccagccactgtttacggagagccagaaaaccaagtatcccactcagtctggcaagccgcccctgcttgtgtctgccccaagtaagagcgagtctgctttgagctgtctctccaagcagaagaagaagaagacaaagaagccgaaggagccacagccggaacagccacagccaagtacaagtgcaaattaactggtcaagtgtgtcagtgactgcacattggtttctgttctctggctatttgcaaaacctctcccacccttgtgtttcactccaccaccaaccccaggtaaaaaagtctccctctcttccactcacacccatagcgggagagacctcatgcagatttgcattgttttggagtaagaattcaatgcagcagcttaatttttctgtattgcagtgtttataggcttcttgtgtgttaaacttgatttcataaattaaaaacaatggtcaga

SEQ ID NO: 125182 - DNA, 1730 bp, Homo sapiens; identical to SEQ ID NO: 125179
  Payload ID: 4573
  Gene Symbol: DDX24
  Gene Name: DEAD (Asp-Glu-Ala-Asp) box helicase 24
  ENST ID: ENST00000619833
  CDS Start-End: 35-1492

SEQ ID NO: 125183 - DNA, 2214 bp, Homo sapiens; identical to SEQ ID NO: 125175
  Payload ID: 4573
  Gene Symbol: DDX24
  Gene Name: DEAD (Asp-Glu-Ala-Asp) box helicase 24
  ENST ID: ENST00000626330
  CDS Start-End: 117-1946

SEQ ID NO: 125184 - DNA, 7555 bp, Homo sapiens
  Payload ID: 4574
  Gene Symbol: DDX25
  Gene Name: DEAD (Asp-Glu-Ala-Asp) box helicase 25
  Uniprot ID: Q9UHL0
  ENST ID: ENST00000263576
  CDS Start-End: 156-1607
agccttccagcgcctgcgcgccgcaccgcggtggtcgcgggcgcggacgcggacgcctgccccctaaggaagcccattggccagcggatggggccagcaccgcctcgcgccggtggtggaagcacgtgctgggggcgggagcagcaatcgcagccatggcgtcgttactgtggggaggcgacgcaggggcggcggagagcgagcggctgaacagccacttttcaaacctcagccaaccccggaagaacctttggggtattaagagtactgcagtccgaaacatagatggttctattaataacatcaatgaagatgatgaagaagatgtagtggatttggcagctaattcactcttaaacaagttaatccatcaatccttagtagaatccagtcaccgtgtggaagttttacagaaggatcccagctctccactttactcagtaaagacatttgaagagctgcggctaaaggaagagttactaaaaggaatctatgcaatgggatttaataggccatctaaaatccaagagatggctctccctatgatgctggcacatccaccccagaacctcatagcacagagccagtctggaacaggaaagacagcggcatttgtgttggcaatgttaagcagagttaatgccttggaattgttcccacagtgcctctgcctagctcctacttatgaattggctctgcaaactggccgtgtggttgagcagatgggaaaattctgtgtggatgttcaagtgatgtatgccattcgagggaatcgaattcccagaggcaccgacatcactaaacagattataattggcactcctgggactgtcctagattggtgttttaaactaaaattgattgatttgactaagattcgtgtgtttgtcctggatgaagcagatgtgatgattgacactcaaggattctcagatcatagtattcgtattcaaagagctctaccctccgaatgccaaatgctcctcttttcagcaacctttgaggactctgtgtggcactttgctgagcgaatcatccctgaccctaatgttatcaagttacgcaaagaggagctcacactgaacaacatccggcaatattacgtgctgtgtgagcacaggaaagacaaataccaagctctgtgcaacatttatggcagcatcaccattggtcaggccatcatcttctgccagactcgtcgaaacgctaagtggttgaccgtggagatgatacaggatggccaccaggtgtctttgttaagcggggagctgaccgtggagcagcgagcttccatcattcagaggtttcgggatgggaaagagaaggttctcataacaactaatgtttgtgcccgagggattgatgtgaagcaggtcacaattgttgtgaactttgatctccctgtaaaacaaggagaggagccggactatgagacctacctccaccgcatagggcggacggggcgctttgggaaaaaaggccttgccttcaacatgattgaagtagatgagctgccctcgctcatgaaaatccaggaccactttaacagcagtattaagcaactcaacgctgaagacatggatgaaattgaaaagattgactattgaagaaagaactttattgtttgtgcagtatcctagtttatgtgagaatgtctcagtgggttttgaaggtaatttttttatgttgaggctttttcgacgtgaaactgtcacagatggcaaaataaatgtcacggtacttagttttaagacatgaggtctttttgaagccaaattgatgtgaagcttgtgatccttttgaataaaaaaaaggcaagattatttcttattctaatctttgtacaggtaatgtctcaatgtgggctatgggggtgtttttggatttggttgatacaatctgagcagatcgtgcctcttgggagcatcttactgtgtcacaagagggcggtagagcttcgctgattttggaagcggagcgagtaggaaaaagcccatgtcttcagacctcactcacaggtgccctttccagccatttatgcctttccccgctccccgccttaaactcccccatgcatgcacatgcatgttcttaagtgaaagtacagattaaaacttttaaaaagtgaaaccatttgaaagaaagagtattttacttctttaatgtttcaagggacatacagaatttcagagtatttttctattttgcttctcttcaaattaaagatttactccctcatcagttatttcatagtctctaaaagtgtggctgtattatgggcatttcttaaaagcagtcgggagggtaaaaaaaaaacccacataccctattaaagaagtaacattttagagagcaaaagttttttgcttttaagaatttaaaggtatgtcagaatcctggacattttcccacaagacccattgagatactttttaatttttcatatttcctactcaaaagtaaagtgtagtgagcttgagaagatggggtaaatggagagtcccccagaaagccggagcggatcttgtaaccagagcgccggtaccagctctgtcacggcaccaaactgcaccagtggctgcagtgagtggccctgtcatcggtggcatggtggttcctggcatatctattttgatatccctcttccatgtcaccctgcccatgttttctcccggagagcagggctcagaaatacataaaaatcatcacgtggctgggcacagtggctcacacctgtaatcctagcactttgggaggccaaggagggcggatcacgaggtcaggagttaagaccagccttaccaacatggtgaaaccccttctctactaaaaatataaaaattagctgggcgtggtggtacgcgtgcctgtaatcccagctactcaggaggctgaggcaggagaatcacttgaacccaggaggccgagattgcagtgagccgagatcgtgccactgcattccagcctgggcgacagagtgagactctatctcaaaaaaaacgcgctcccctccctcatttagcaacagatatttattgtataccctttatgccaaacaccagggaaaaggaggtgagtgagatacaacagccatgttggaattcagagcctaatggcagagacctagaataagccagcatgataacagactgtgctaaagcaagcgggcccagatcactagtgtagcacagaggagggaccctaacaccatctaggctggctcccagaggagaggacactcaggatctcctacaggagagcaggatgtattcaactgtgccttctcagcatggactttgtaccacccagcaactttctaacctgagtctacgagaggaagtgttccagacccagcttaccataattacctggagagcccggggaaaaaaatacagatttccttccccatgcagatgaaagcagactctccgagggcagagcccagaaatacccacttccataagggagccgcaagtgcaggtagagcagtggtaacgaagatggccgtcccagcgggagaccctcaggcagagaggcccttggggacagaacttgtaacacatggaactcctgctgctcggtgtccatcctggttctccttatcctacatctgcccttctctctggactggaagctggtgatcactcttgtccactcaatacccctaacacagtgcccagtgcattctaagtgcccaaggaacctttgtctttgttgagtaaatttttttttcttttgccacttcctcattcactaataatttttttttaggttttccatcctagttttgaaccccaattacatggcacaggatgaatgagcatgagaagtgtatccagatactttgttctcttactattcgagaatcgagttggaccttccaccgtgctcagctccgccttggggtgtcctaaataaaactttaccactttcctttacagttcaaatctctggtaagatctccgccagttaccctcacaaatgtcctcagtaatttttgtttggcagctgttcccacaggtctgcatgaaccaggtatttttctgcgttcccttttgccccctcctcacgtccctttgtctcaccacctaggaggcagcaaagccatcctgtgtcacagctgcattaacacgaactggctagtttggtgagtcaacaatccaaaggctgttttttgcagggtgcagctcctgtcagagctgtaagcaattttcccgtcttcctgcatggcctggccaaggtcatctctctcagtgcctgcctgaggacagagtagatagagaggcaaggaaacaccaggtgatttcagtgcaactgtgagctgggttcatcagctgtatgtttcttggcaccaaatactaaaccaaatccgttaagtttatcttggccagcttaatactgttagcatattgaaattcatgattacgtagagcaggactgtgatttccagtgggtaagtgaacacctcgcatggaacacggctgctatgatgttaggtgctggatctaaggcaaccattaataataggaaaggcaaataagttggtcatagtctggtaggatgtgtgacagccgcttttcaagagacattattgcttttggtcatgagaaagtgttgatcctcctcagcaaagctcggtcaccatgaaagctgctggcagtctctgcacatatgaccaacagtggaaaatcttagaggagtgatgggggtggtgggtggtgggcagtacctttccagacagcagagagagagaggctggttttgtcaagccttggcttggttcctggtcctctgagaggctcagtctccttccttttgattcaaggcaggacctagattagaaagagaacccctgcagagacagtccagctgttgggatgggcctgcactttgctctctgaaccggggggcattactatgttctcacccacattgtacagacagcccatcatgctcagccttgcaggagggtcttcaggagcccagccatctggcacatactgcttttcccaagggagtaacagaaaggtcagatcctcttcaatcctaaccctctcacttcaactctccactacttctggggaataatgatgtattatccaagaccctcatatcatattaacccacagactatgaaatcatcacagtcttgttctatgctacagggaatacgaactttttgccctagaaagcatccaagaggcactcaaccccaacattttctatacttttgctaatccgtggctgagagaatttgacattttcccttctcttttttttttttttgagatggagtctcactgtgttgcccaggctggagtgcagtggcgtgatctcggctcactgcaaactctgcctccccggttcaagcaattctcctgtctcagcctcccgagtagctggggctacaggcacatgccaccacgcctggcttatttttgtatgttattttagtagcgatggggtttcaccgtattggtcaggctggtctcgaactcgtgacctcaggtgatccacacgccttggcttcccaaagtgctgggattacaggcatcagccacggcgcccagcctccccttctcatttctgtctgctgactcctcttcccgttctgctgctcacatccgcaggttgatgttttcaccctcggggttctgccttatcccctgccaccctcctgtgctgcctgggtccctcagaaggatgggtctggacttcccacaccctccttcgctgcccctcactgtgttgcctggtgtctgcctgaagagatgcagtttgagccattggctggtttctcttactgctttgcaaactatcagttttaaatgtgggtggggctgaagcaccattctccatttttaatgtggattttccatccccctttaaacattaaacttttagattcttctagtgaaatacagaaaacacacgtgaactgggatgattcttggctgagagatgtcccatggtgtttggcaaacccacggaggggcccacaggcccatgtctggaactgcctggccctcctttaccagtttatcagccttccatctctgctgaggtagaaacagccagaggctctgatataataaagatgagctctgaagaggggctctctctccctcttgtattcagaagaactgaaagttttcataagtctctagagaagcgtggcaactatctgtagcatttttctttgggaattaacctttgcccataattatttctgttcagtagaataaccatgggtttctctattccagtttctagaatataattttcataaatgaggatggtctcctattttgagcttaacatttttctattgctagaaagaatggtactgcctcactccagctccttagtgtgtgatcatggcttgaaatctctgctttctgttatattcggaggtaacatgtataggtcatgtataatggcctcaggcatgatttagaaggcacagactgagcaggctgctttgtgaggtggtgaactccccattcatgagagcattcaatcaatcagaagatgaatagttaatcagatgctgtagttctggttcttgaataaccaggagttcagaataaaatgatctcggagactctgtccattctaagataccatgtttccatgaccctacacacaatagctacacaggtggagcaacatgagtctgagaagctttgcacaaaagaagattgttttccacaaatgaaaatggggtggttaacttctaattgtaccctgtcttagcgttcagatgcattggttccttccccatgtgaccatctcttcattcaaagcttaggctgaatgtggattatttttaatttaatgttcatattataaaagcaatgaaacagcaaagtagagcaaaatatcaacaatccaatgactttatcataaaaattatcagcttgatatagtcctgttcttaatataaacatctgtggttaattatagtattatatctttttatttgaaacattcaagttttttttcatgttaccacacagtgtttgggattatattttcaaaataataattgaccagattgtcctatctagtgaatatgcatatagctgactttgttgaacatttataggatgtccatttttccaaagctttaattataaatcatgctgcagtaaatatcttctcgcccaatattccgaattatttcttaagattagagacattaagtgcgagtaccaggtcgaaaactagaagcactttaacagcatttaacagattttgttagagctacattgcattcagtagactggctataccaatatatagttgcacagcaaattcacctcaccttaccagcaagggatattttcattttaaaattgcttggtaacttttctggtttatgtttctcttagtacaagcaagattatattttttaaagtggttcatcatttgaaaagcatctgtagtgttctttgcccatttatcttgtgggatgttaatggtttccttgtcaagttgtgtgaaatatatgtgtgaatttatttttccaaataaaataaagacattaaccttc

SEQ ID NO: 125185 - DNA, 574 bp, Homo sapiens
  Payload ID: 4574
  Gene Symbol: DDX25
  Gene Name: DEAD (Asp-Glu-Ala-Asp) box helicase 25
  ENST ID: ENST00000530129
  CDS Start-End: 1-574
gcgagcgttcgaagtggggcgtcagatgctggaggggagatgcgggaagggtttggaagagggccacagagggagaccccgtccccacccccacgagagttttcaaacctcagccaaccccggaagaacctttggggtattaagagtactgcagtccgaaacatagatggttctattaataacatcaatgaagatgatgaagaagatgtagtggatttggcagctaattcactcttaaacaagttaatccatcaatccttagtagaatccagtcaccgtgtggaagttttacagaaggatcccagctctccactttactcagtaaagacatttgaagagctgcggctaaaggaagagttactaaaaggaatctatgcaatgggatttaataggccatctaaaatccaagagatggctctccctatgatgctggcacatccaccccagaacctcatagcacagagccagtctggaacaggaaagacagcggcatttgtgttggcaatgttaagcagagttaatgccttggaattgttcccacagtgcctctgcctagctcctacttatgaattgg

SEQ ID NO: 125186 - DNA, 1445 bp, Homo sapiens
  Payload ID: 4574
  Gene Symbol: DDX25
  Gene Name: DEAD (Asp-Glu-Ala-Asp) box helicase 25
  ENST ID: ENST00000526875
  CDS Start-End: 1-1222
tctagtggatttggcagctaattcactcttaaacaagttaatccatcaatccttagtagaatccagtcaccgtgtggaagttttacagaaggatcccagctctccactttactcagtaaagacatttgaagagctgcggctaaaggaagagttactaaaaggaatctatgcaatgggatttaataggccatctaaaatccaagagatggctctccctatgatgctggcacatccaccccagaacctcatagcacagagccagtctggaacaggaaagacagcggcatttgtgttggcaatgttaagcagagttaatgccttggaattgttcccacagtgcctctgcctagctcctacttatgaattggctctgcaaactggccgtgtggttgagcagatgggaaaattctgtgtggatgttcaagtgatgtatgccattcgagggaatcgaaattggtgttttaaactaaaattgattgatttgactaagattcgtgtgtttgtcctggatgaagcagatgtgatgattgacactcaaggattctcagatcatagtattcgtattcaaagagctctaccctccgaatgccaaatgctcctcttttcagcaacctttgaggactctgtgtggcactttgctgagcgaatcatccctgaccctaatgttatcaagttacgcaaagaggagctcacactgaacaacatccggcaatattacgtgctgtgtgagcacaggaaagacaaataccaagctctgtgcaacatttatggcagcatcaccattggtcaggccatcatcttctgccagactcgtcgaaacgctaagtggttgaccgtggagatgatacaggatggccaccaggtgtctttgttaagcggggagctgaccgtggagcagcgagcttccatcattcagaggtttcgggatgggaaagagaaggttctcataacaactaatgtttgtgcccgagggattgatgtgaagcaggtcacaattgttgtgaactttgatctccctgtaaaacaaggagaggagccggactatgagacctacctccaccgcatagggcggacggggcgctttgggaaaaaaggccttgccttcaacatgattgaagtagatgagctgccctcgctcatgaaaatccaggaccactttaacagcagtattaagcaactcaacgctgaagacatggatgaaattgaaaagattgactattgaagaaagaactttattgtttgtgcagtatcctagtttatgtgagaatgtctcagtgggttttgaaggtaatttttttatgttgaggctttttcgacgtgaaactgtcacagatggcaaaataaatgtcacggtacttagttttaagacatgaggtctttttgaagccaaattgatgtgaagcttgtgatccttttgaataaaaaaaaggcaagattatttctta

SEQ ID NO: 125187 - DNA, 2276 bp, Homo sapiens
  Payload ID: 4574
  Gene Symbol: DDX25
  Gene Name: DEAD (Asp-Glu-Ala-Asp) box helicase 25
  ENST ID: ENST00000530414
  CDS Start-End: 1-1407
atcgcagccatggcgtcgttactgtggggaggcgacgcaggggcggcggagagcgagcggctgaacagccacttttcaaacctcagccaaccccggaagaacctttggggtattaagagtactgcagtccgaaacatagatggttctattaataacatcaatgaagatgatgaagaagatgtagtggatttggcagctaattcactcttaaacaagttaatccatcaatccttagtagaatccagtcaccgtgtggaagttttacagaaggatcccagctctccactttactcagtaaagacatttgaagagctgcggctaaaggaagagttactaaaaggaatctatgcaatgggatttaataggccatctaaaatccaagagatggctctccctatgatgctggcacatccaccccagaacctcatagcacagagccagtctggaacaggaaagacagcggcatttgtgttggcaatgttaagcagagttaatgccttggaattgttcccacagtgcctctgcctagctcctacttatgaattggctctgcaaactggccgtgtggttgagcagatgggaaaattctgtgtggatgttcaagtgatgtatgccattcgagggaatcgaattcccagaggcaccgacatcactaaacagattataattggcactcctgggactgtcctagattggtgttttaaactaaaattgattgatttgactaagattcgtgtgtttgtcctggatgaagcagatgtgatgattgacactcaaggattctcagatcatagtattcgtattcaaagagctctaccctccgaatgccaaatgctcctcttttcagcaacctttgaggactctgtgtggcactttgctgagcgaatcatccctgaccctaatgttatcaagttacgcaaagaggagctcacactgaacaacatccggcaatattacgtgctgtgtgagcacaggaaagacaaataccaagctctgtgcaacatttatggcagcatcaccattggtcaggccatcatcttctgccagactcgtcgaaacgctaagtggttgaccgtggagatgatacaggatggccaccaggtgtctttgttaagcggggagctgaccgtggagcagcgagcttccatcattcagaggtttcgggatgggaaagagaaggttctcataacaactaatgtttgtgcccgagggattgatgtgaagcaggtcacaattgttgtgaactttgatctccctgtaaaacaaggagaggagccggactatgagacctacctccaccgcatagggcggacggggcgctttgggaaaaaaggccttgccttcaacatgattgaagtagatgagctgccctcgctcatgaaaatccaggaccactttagtaagtagcaccaccctcacaatatgaactacagacctgccggtctgacagtgatgatgtgtgctggagagctggagtccaggggctcatgagagtagtagaagcagaatgcatgagctggaaggcttctaattcacaggaccagggttctaatatgagacagatgattaaataatgcttatatggtaattaaaaattattttgatcaagcagaattaatatgagctcaggccgggtgtggcagctcacacctgtaatcccagcactttgggaggccgaggtggtcagatcatgaggtcaggaaatccagaccatcctggccaacatggtaaaaccccatctctactaacaatacaaaaattagctgggcgtggtggcacatgcctgtagtctcagctgctggagaggctgaggcaggagaatcgcttgaacccaggaggcggaggttgcagtgagctgaggtcgcacaactgcactccagcctggcgaaagagtgagactgcgtctcaaaaaaataaaatttgagctcagatttacatgttataactcattctggagtcagaatttcacatcttgtgaaggcagagcagattacagaagcagattttcgtatcttataaagaaattccctaagcaaagtagtaacatcctttaagattctcttcagttctcctcttttacttacgctttttccctcctcttgcccaccctcccaaacaggaaagtcctaaattctgaagtccgcgacctttcctccagccccccatctaaacaaggcaggctctgatgatggcctgctggaactctggactggcagatttctctgatggaaactcaaaaggtcccatggttcaaattgtcctgtgccccaaagccc

SEQ ID NO: 125188 - DNA, 460 bp, Homo sapiens
  Payload ID: 4574
  Gene Symbol: DDX25
  Gene Name: DEAD (Asp-Glu-Ala-Asp) box helicase 25
  ENST ID: ENST00000584970
  CDS Start-End: 1-202
agggattgatgtgaagcaggtcacaattgttgtgaactttgatctccctgtaaaacaaggagaggagccggactatgagacctacctccaccgcatagggcggacggggcgctttgggaaaaaaggccttgccttcaacatgattgaagtagatgagctgccctcgctcatgaaaatccaggaccactttagaaagtcctaaattctgaagtccgcgacctttcctccagccccccatctaaacaaggcaggctctgatgatggcctgctggaactctggactggcagatttctctgatggaaactcaaaaggtcccatggttcaaattgtcctgtgccccaaagcccatggatgtggctggggagcaggggagaaggaacaccttccaggacagtgacagcagtattaagcaactcaacgctgaagacatggatgaaattgaaaagattgactattgaa

SEQ ID NO: 125189 - DNA, 5399 bp, Homo sapiens
  Payload ID: 4575
  Gene Symbol: DDX3X
  Gene Name: DEAD (Asp-Glu-Ala-Asp) box helicase 3, X-linked
  Uniprot ID: O00571
  ENST ID: ENST00000399959
  CDS Start-End: 856-2844
ctttccccttactccgctcccctcttttccctccctctcctccccttccctctgttctctcctcctcttcccctcccctcccccgtccggagcactctatattcaagccaccgtttcctgcttcacaaaatggccaccgcacgcgacacctacggtcacgtggcctgccgccctctcagtttcgggaatctgcctagctcccactaaggggaggctacccgcggaagagcgagggcagattagaccggagaaatcccaccacatctccaagcccgggaactgagagaggaagaagagtgaaggccagtgttaggaaaaaaaaaacaaaaacaaaaaaaacgaaaaacgaaagctgagtgcatagagttggaaaggggagcgaatgcgtaaggttggaaaggggggcgaagaggcctaggttaacattttcaggcgtcttagccggtggaaagcgggagacgcaagttctcgcgagatctcgagaactccgaggctgagactagggttttagcggagagcacgggaagtgtagctcgagagaactgggacagcatttcgcaccctaagctccaaggcaggactgctaggggcgacaggactaagtaggaaatcccttgagcttagacctgagggagcgcgcagtagccgggcagaagtcgccgcgacagggaattgcggtgtgagagggagggcacacgttgtacgtgctgacgtagccggctttccagcgggtatattagatccgtggccgcgcggtgcgctccagagccgcagttctcccgtgagagggccttcgcggtggaacaaacactcgcttagcagcggaagactccgagttctcggtactcttcagggatgagtcatgtggcagtggaaaatgcgctcgggctggaccagcagtttgctggcctagacctgaactcttcagataatcagagtggaggaagtacagccagcaaagggcgctatattcctcctcatttaaggaaccgagaagctactaaaggtttctacgataaagacagttcagggtggagttctagcaaagataaggatgcgtatagcagttttggatctcgtagtgattcaagagggaagtctagcttcttcagtgatcgtggaagtggatcaaggggaaggtttgatgatcgtggacggagtgattacgatggcattggcagccgtggtgacagaagtggctttggcaaatttgaacgtggtggaaacagtcgctggtgtgacaaatcagatgaagatgattggtcaaaaccactcccaccaagtgaacgcttggaacaggaactcttttctggaggcaacactgggattaattttgagaaatacgatgacattccagttgaggcaacaggcaacaactgtcctccacatattgaaagtttcagtgatgttgagatgggagaaattatcatgggaaacattgagcttactcgttatactcgcccaactccagtgcaaaagcatgctattcctattatcaaagagaaaagagacttgatggcttgtgcccaaacagggtctggaaaaactgcagcatttctgttgcccatcttgagtcagatttattcagatggtccaggcgaggctttgagggccatgaaggaaaatggaaggtatgggcgccgcaaacaatacccaatctccttggtattagcaccaacgagagagttggcagtacagatctacgaggaagccagaaaattttcataccgatctagagttcgtccttgcgtggtttatggtggtgccgatattggtcagcagattcgagacttggaacgtggatgccatttgttagtagccactccaggacgtctagtggatatgatggaaagaggaaagattggattagacttttgcaaatacttggtgttagatgaagctgatcggatgttggatatggggtttgagcctcagattcgtagaatagtcgaacaagatactatgcctccaaagggtgtccgccacactatgatgtttagtgctacttttcctaaggaaatacagatgctggctcgtgatttcttagatgaatatatcttcttggctgtaggaagagttggctctacctctgaaaacatcacacagaaagtagtttgggtggaagaatcagacaaacggtcatttctgcttgacctcctaaatgcaacaggcaaggattcactgaccttagtgtttgtggagaccaaaaagggtgcagattctctggaggatttcttataccatgaaggatacgcatgtaccagcatccatggagaccgttctcagagggatagagaagaggcccttcaccagttccgctcaggaaaaagcccaattttagtggctacagcagtagcagcaagaggactggacatttcaaatgtgaaacatgttatcaattttgacttgccaagtgatattgaagaatatgtacatcgtattggtcgtacgggacgtgtaggaaaccttggcctggcaacctcattctttaacgagaggaacataaatattactaaggatttgttggatcttcttgttgaagctaaacaagaagtgccgtcttggttagaaaacatggcttatgaacaccactacaagggtagcagtcgtggacgttctaagagtagcagatttagtggagggtttggtgccagagactaccgacaaagtagcggtgccagcagttccagcttcagcagcagccgcgcaagcagcagccgcagtggcggaggtggccacggtagcagcagaggatttggtggaggtggctatggaggcttttacaacagtgatggatatggaggaaattataactcccagggggttgactggtggggtaactgagcctgctttgcagtaggtcaccctgccaaacaagctaatatggaaaccacatgtaacttagccagactataccttgtgtagcttcaagaactcgcagtacattaccagctgtgattctccactgaaattttttttttaagggagctcaaggtcacaagaagaaatgaaaggaacaatcagcagccctgttcagaaggtggtttgaagacttcattgctgtagtttggattaactcccctcccgcctacccccatcccaaactgcatttataattttgtgactgaggatcatttgtttgttaatgtactgtgcctttaactttagacaactttttattttgatgtcctgttggctcagtaatgctcaagatatcaattgttttgacaaaataaatttactgaacttgggctaaaatcaaaccttggcacacaggtgtgatacaacttaacaggaatcatcgattcatccataaataatataaggaaaaacttatgcggtagcctgcattagggctttttgatacttgcagattgggggaaaacaacaaatgtcttgaagcatattaatggaattagtttctaatgtggcaaactgtattaagttaaagttctgatttgctcactctatcctggataggtatttagaacctgatagtctttaagccattccagtcatgatgaggtgatgtatgaatacatgcatacattcaaagcactgttttcaaagttaatgcaagtaaatacagcaattcctctttcaacgtttaggcagatcattaattatgagctagccaaatgtgggcatactattacagggaaagtttaaaggtctgataacttgaaataggtttttaggagaattcatctacttagactttttaaatgcctgccataaatgaaattgaaatggtagaatggctgaccacagcaatgaccagccctcattagggccctggatgatttttggtctaataacgcatgctagtgttgatgttttttggtcaagagggtatgaacaggaagaattaaatgcagcaggctttattttaaatgccgattcacattactctgttcaagctgcgttgagatgttaaactggcttactatagacttcgtaaaaatggctccagaagagtaacaaactgaaatctttgagatcacacaggttggaaatatgtacataactgcacaaggtgtcaattctgctctacagtgcagttttagtcagttttagttgcataggtttccattgtatttatagtctgtttatgctaaatctggccaaagatgagcattgtccaccactaaaatgcctctgccactttgaattctgtgctaattttgtggccagaatgcggtgatcaaaacgctccatctttttacagtggcataggaagacggcaaaaatttcctaaagtgcaatagattttcaagtgtattgtgccttgttctaaaacttttattaagtaggtgcacttgacagtattgaggtcatttgttatggtgctatttcaattagtctaggtttaggcccttgtacattttgcccataactttttacaaagtacttcttttattgcacattcagagaattttatatatatgtcttgtgtgcgtgtccttaaacttccaatcttactttgtctcttggagattgttgaacgcagcttgtctaggaaggggatgggactagattctaaaatttatttgggaccatgggaatgatagttgggaagaaaactatttgcacacgacagatttctagatactttttgctgctagttttatgtaatatttattgaacattttgacaaatatttatttttgtaagcctaaaagtgattctttgaaagtttaaagaaacttgaccaaaagacagtacaaaaacactggcacttgaatgttgaatgtcaccgtatgcgtgaaattatatatttcggggtagtgtgagcttttaatgtttaagtcatattaaactcttaagtcaaattaagcagacccggcgttggcagtgtagccataactttctgatgttagtaaaaacaaaattggcgacttgaaattaaatcatgccaaggttttgatacacttgtcttaagatattaatgaaacacttcaaaacactgatgtgaagtgtccagattctcagatgtttgttgtgtggattttgtttagttgtgtgtttttttttttttttcagtgaatgtctggcacattgcaatcctcaaacatgtggttatctttgttgtattggcataatcagtgacttgtacattcagcaatagcatttgagcaagttttatcagcaagcaatattttcagttaataaggtttcaaaaatcatgtaaggatttaaacttgctgaatgtaaagattgaacctcaagtcactgtagctttagtaattgcttattgtattagtttagatgctagcactgcatgtgctgtgcatattctgattttattaaaataaaaagttgaactgcacagtctcctttgttgttgtcaattgtggtttattttcagaggtgtaaataaagtgctcttgcctgaaaaa

SEQ ID NO: 125190 - DNA, 5346 bp, Homo sapiens
  Payload ID: 4575
  Gene Symbol: DDX3X
  Gene Name: DEAD (Asp-Glu-Ala-Asp) box helicase 3, X-linked
  Uniprot ID: O00571
  ENST ID: ENST00000457138
  CDS Start-End: 856-2796
ctttccccttactccgctcccctcttttccctccctctcctccccttccctctgttctctcctcctcttcccctcccctcccccgtccggagcactctatattcaagccaccgtttcctgcttcacaaaatggccaccgcacgcgacacctacggtcacgtggcctgccgccctctcagtttcgggaatctgcctagctcccactaaggggaggctacccgcggaagagcgagggcagattagaccggagaaatcccaccacatctccaagcccgggaactgagagaggaagaagagtgaaggccagtgttaggaaaaaaaaaacaaaaacaaaaaaaacgaaaaacgaaagctgagtgcatagagttggaaaggggagcgaatgcgtaaggttggaaaggggggcgaagaggcctaggttaacattttcaggcgtcttagccggtggaaagcgggagacgcaagttctcgcgagatctcgagaactccgaggctgagactagggttttagcggagagcacgggaagtgtagctcgagagaactgggacagcatttcgcaccctaagctccaaggcaggactgctaggggcgacaggactaagtaggaaatcccttgagcttagacctgagggagcgcgcagtagccgggcagaagtcgccgcgacagggaattgcggtgtgagagggagggcacacgttgtacgtgctgacgtagccggctttccagcgggtatattagatccgtggccgcgcggtgcgctccagagccgcagttctcccgtgagagggccttcgcggtggaacaaacactcgcttagcagcggaagactccgagttctcggtactcttcagggatgagtcatgtggcagtggaaaatgcgctcgggctggaccagcagtttgctggcctagacctgaactcttcagataatcagagtggaggaagtacagccagcagtttctacgataaagacagttcagggtggagttctagcaaagataaggatgcgtatagcagttttggatctcgtagtgattcaagagggaagtctagcttcttcagtgatcgtggaagtggatcaaggggaaggtttgatgatcgtggacggagtgattacgatggcattggcagccgtggtgacagaagtggctttggcaaatttgaacgtggtggaaacagtcgctggtgtgacaaatcagatgaagatgattggtcaaaaccactcccaccaagtgaacgcttggaacaggaactcttttctggaggcaacactgggattaattttgagaaatacgatgacattccagttgaggcaacaggcaacaactgtcctccacatattgaaagtttcagtgatgttgagatgggagaaattatcatgggaaacattgagcttactcgttatactcgcccaactccagtgcaaaagcatgctattcctattatcaaagagaaaagagacttgatggcttgtgcccaaacagggtctggaaaaactgcagcatttctgttgcccatcttgagtcagatttattcagatggtccaggcgaggctttgagggccatgaaggaaaatggaaggtatgggcgccgcaaacaatacccaatctccttggtattagcaccaacgagagagttggcagtacagatctacgaggaagccagaaaattttcataccgatctagagttcgtccttgcgtggtttatggtggtgccgatattggtcagcagattcgagacttggaacgtggatgccatttgttagtagccactccaggacgtctagtggatatgatggaaagaggaaagattggattagacttttgcaaatacttggtgttagatgaagctgatcggatgttggatatggggtttgagcctcagattcgtagaatagtcgaacaagatactatgcctccaaagggtgtccgccacactatgatgtttagtgctacttttcctaaggaaatacagatgctggctcgtgatttcttagatgaatatatcttcttggctgtaggaagagttggctctacctctgaaaacatcacacagaaagtagtttgggtggaagaatcagacaaacggtcatttctgcttgacctcctaaatgcaacaggcaaggattcactgaccttagtgtttgtggagaccaaaaagggtgcagattctctggaggatttcttataccatgaaggatacgcatgtaccagcatccatggagaccgttctcagagggatagagaagaggcccttcaccagttccgctcaggaaaaagcccaattttagtggctacagcagtagcagcaagaggactggacatttcaaatgtgaaacatgttatcaattttgacttgccaagtgatattgaagaatatgtacatcgtattggtcgtacgggacgtgtaggaaaccttggcctggcaacctcattctttaacgagaggaacataaatattactaaggatttgttggatcttcttgttgaagctaaacaagaagtgccgtcttggttagaaaacatggcttatgaacaccactacaagggtagcagtcgtggacgttctaagagtagcagatttagtggagggtttggtgccagagactaccgacaaagtagcggtgccagcagttccagcttcagcagcagccgcgcaagcagcagccgcagtggcggaggtggccacggtagcagcagaggatttggtggaggtggctatggaggcttttacaacagtgatggatatggaggaaattataactcccagggggttgactggtggggtaactgagcctgctttgcagtaggtcaccctgccaaacaagctaatatggaaaccacatgtaacttagccagactataccttgtgtagcttcaagaactcgcagtacattaccagctgtgattctccactgaaattttttttttaagggagctcaaggtcacaagaagaaatgaaaggaacaatcagcagccctgttcagaaggtggtttgaagacttcattgctgtagtttggattaactcccctcccgcctacccccatcccaaactgcatttataattttgtgactgaggatcatttgtttgttaatgtactgtgcctttaactttagacaactttttattttgatgtcctgttggctcagtaatgctcaagatatcaattgttttgacaaaataaatttactgaacttgggctaaaatcaaaccttggcacacaggtgtgatacaacttaacaggaatcatcgattcatccataaataatataaggaaaaacttatgcggtagcctgcattagggctttttgatacttgcagattgggggaaaacaacaaatgtcttgaagcatattaatggaattagtttctaatgtggcaaactgtattaagttaaagttctgatttgctcactctatcctggataggtatttagaacctgatagtctttaagccattccagtcatgatgaggtgatgtatgaatacatgcatacattcaaagcactgttttcaaagttaatgcaagtaaatacagcaattcctctttcaacgtttaggcagatcattaattatgagctagccaaatgtgggcatactattacagggaaagtttaaaggtctgataacttgaaataggtttttaggagaattcatctacttagactttttaaatgcctgccataaatgaaattgaaatggtagaatggctgaccacagcaatgaccagccctcattagggccctggatgatttttggtctaataacgcatgctagtgttgatgttttttggtcaagagggtatgaacaggaagaattaaatgcagcaggctttattttaaatgccgattcacattactctgttcaagctgcgttgagatgttaaactggcttactatagacttcgtaaaaatggctccagaagagtaacaaactgaaatctttgagatcacacaggttggaaatatgtacataactgcacaaggtgtcaattctgctctacagtgcagttttagtcagttttagttgcataggtttccattgtatttatagtctgtttatgctaaatctggccaaagatgagcattgtccaccactaaaatgcctctgccactttgaattctgtgctaattttgtggccagaatgcggtgatcaaaacgctccatctttttacagtggcataggaagacggcaaaaatttcctaaagtgcaatagattttcaagtgtattgtgccttgttctaaaacttttattaagtaggtgcacttgacagtattgaggtcatttgttatggtgctatttcaattagtctaggtttaggcccttgtacattttgcccataactttttacaaagtacttcttttattgcacattcagagaattttatatatatgtcttgtgtgcgtgtccttaaacttccaatcttactttgtctcttggagattgttgaacgcagcttgtctaggaaggggatgggactagattctaaaatttatttgggaccatgggaatgatagttgggaagaaaactatttgcacacgacagatttctagatactttttgctgctagttttatgtaatatttattgaacattttgacaaatatttatttttgtaagcctaaaagtgattctttgaaagtttaaagaaacttgaccaaaagacagtacaaaaacactggcacttgaatgttgaatgtcaccgtatgcgtgaaattatatatttcggggtagtgtgagcttttaatgtttaagtcatattaaactcttaagtcaaattaagcagacccggcgttggcagtgtagccataactttctgatgttagtaaaaacaaaattggcgacttgaaattaaatcatgccaaggttttgatacacttgtcttaagatattaatgaaacacttcaaaacactgatgtgaagtgtccagattctcagatgtttgttgtgtggattttgtttagttgtgtgtttttttttttttttcagtgaatgtctggcacattgcaatcctcaaacatgtggttatctttgttgtattggcataatcagtgacttgtacattcagcaatagcatttgagcaagttttatcagcaagcaatattttcagttaataaggtttcaaaaatcatgtaaggatttaaacttgctgaatgtaaagattgaacctcaagtcactgtagctttagtaattgcttattgtattagtttagatgctagcactgcatgtgctgtgcatattctgattttattaaaataaaaagttgaactgcacagtctcctttgttgttgtcaattgtggtttattttcagaggtgtaaataaagtgctcttgcctg

SEQ ID NO: 125191 - DNA, 1051 bp, Homo sapiens
  Payload ID: 4575
  Gene Symbol: DDX3X
  Gene Name: DEAD (Asp-Glu-Ala-Asp) box helicase 3, X-linked
  ENST ID: ENST00000441189
  CDS Start-End: 92-511
agagccgcagttctcccgtgagagggccttcgcggtggaacaaacactcgcttagcagcggaagactccgagttctcggtactcttcagggatgagtcatgtggcagtggaaaatgcgctcgggctggaccagcagtttgctggcctagacctgaactcttcagataatcagagtggaggaagtacagccagcaaagggcgctatattcctcctcatttaaggaaccgagaagctactaaaggtttctacgataaagacagttcagggtggagttctagcaaagataaggatgcgtatagcagttttggatctcgtagtgattcaagagggaagtctagcttcttcagtgatcgtggaagtggatcaaggggaaggtttgatgatcgtggacggagtgattacgatggcattggcagccgtggtgacagaagtggctatggaggcttttacaacagtgatggatatggaggaaattataactcccagggggttgactggtggggtaactgagcctgctttgcagtaggtcaccctgccaaacaagctaatatggaaaccacatgtaacttagccagactataccttgtgtagcttcaagaactcgcagtacattaccagctgtgattctccactgaaattttttttttaagggagctcaaggtcacaagaagaaatgaaaggaacaatcagcagccctgttcagaaggtggtttgaagacttcattgctgtagtttggattaactcccctcccgcctacccccatcccaaactgcatttataattttgtgactgaggatcatttgtttgttaatgtactgtgcctttaactttagacaactttttattttgatgtcctgttggctcagtaatgctcaagatatcaattgttttgacaaaataaatttactgaacttgggctaaaatcaaaccttggcacacaggtgtgatacaacttaacaggaatcatcgattcatccataaataatataaggaaaaacttatgcggtagcctgcattagggctttttgatacttgcagattgggggaaa

SEQ ID NO: 125192 - DNA, 3397 bp, Homo sapiens
  Payload ID: 4575
  Gene Symbol: DDX3X
  Gene Name: DEAD (Asp-Glu-Ala-Asp) box helicase 3, X-linked
  Uniprot ID: O00571
  ENST ID: ENST00000478993
  CDS Start-End: 856-2844
ctttccccttactccgctcccctcttttccctccctctcctccccttccctctgttctctcctcctcttcccctcccctcccccgtccggagcactctatattcaagccaccgtttcctgcttcacaaaatggccaccgcacgcgacacctacggtcacgtggcctgccgccctctcagtttcgggaatctgcctagctcccactaaggggaggctacccgcggaagagcgagggcagattagaccggagaaatcccaccacatctccaagcccgggaactgagagaggaagaagagtgaaggccagtgttaggaaaaaaaaaacaaaaacaaaaaaaacgaaaaacgaaagctgagtgcatagagttggaaaggggagcgaatgcgtaaggttggaaaggggggcgaagaggcctaggttaacattttcaggcgtcttagccggtggaaagcgggagacgcaagttctcgcgagatctcgagaactccgaggctgagactagggttttagcggagagcacgggaagtgtagctcgagagaactgggacagcatttcgcaccctaagctccaaggcaggactgctaggggcgacaggactaagtaggaaatcccttgagcttagacctgagggagcgcgcagtagccgggcagaagtcgccgcgacagggaattgcggtgtgagagggagggcacacgttgtacgtgctgacgtagccggctttccagcgggtatattagatccgtggccgcgcggtgcgctccagagccgcagttctcccgtgagagggccttcgcggtggaacaaacactcgcttagcagcggaagactccgagttctcggtactcttcagggatgagtcatgtggcagtggaaaatgcgctcgggctggaccagcagtttgctggcctagacctgaactcttcagataatcagagtggaggaagtacagccagcaaagggcgctatattcctcctcatttaaggaaccgagaagctactaaaggtttctacgataaagacagttcagggtggagttctagcaaagataaggatgcgtatagcagttttggatctcgtagtgattcaagagggaagtctagcttcttcagtgatcgtggaagtggatcaaggggaaggtttgatgatcgtggacggagtgattacgatggcattggcagccgtggtgacagaagtggctttggcaaatttgaacgtggtggaaacagtcgctggtgtgacaaatcagatgaagatgattggtcaaaaccactcccaccaagtgaacgcttggaacaggaactcttttctggaggcaacactgggattaattttgagaaatacgatgacattccagttgaggcaacaggcaacaactgtcctccacatattgaaagtttcagtgatgttgagatgggagaaattatcatgggaaacattgagcttactcgttatactcgcccaactccagtgcaaaagcatgctattcctattatcaaagagaaaagagacttgatggcttgtgcccaaacagggtctggaaaaactgcagcatttctgttgcccatcttgagtcagatttattcagatggtccaggcgaggctttgagggccatgaaggaaaatggaaggtatgggcgccgcaaacaatacccaatctccttggtattagcaccaacgagagagttggcagtacagatctacgaggaagccagaaaattttcataccgatctagagttcgtccttgcgtggtttatggtggtgccgatattggtcagcagattcgagacttggaacgtggatgccatttgttagtagccactccaggacgtctagtggatatgatggaaagaggaaagattggattagacttttgcaaatacttggtgttagatgaagctgatcggatgttggatatggggtttgagcctcagattcgtagaatagtcgaacaagatactatgcctccaaagggtgtccgccacactatgatgtttagtgctacttttcctaaggaaatacagatgctggctcgtgatttcttagatgaatatatcttcttggctgtaggaagagttggctctacctctgaaaacatcacacagaaagtagtttgggtggaagaatcagacaaacggtcatttctgcttgacctcctaaatgcaacaggcaaggattcactgaccttagtgtttgtggagaccaaaaagggtgcagattctctggaggatttcttataccatgaaggatacgcatgtaccagcatccatggagaccgttctcagagggatagagaagaggcccttcaccagttccgctcaggaaaaagcccaattttagtggctacagcagtagcagcaagaggactggacatttcaaatgtgaaacatgttatcaattttgacttgccaagtgatattgaagaatatgtacatcgtattggtcgtacgggacgtgtaggaaaccttggcctggcaacctcattctttaacgagaggaacataaatattactaaggatttgttggatcttcttgttgaagctaaacaagaagtgccgtcttggttagaaaacatggcttatgaacaccactacaagggtagcagtcgtggacgttctaagagtagcagatttagtggagggtttggtgccagagactaccgacaaagtagcggtgccagcagttccagcttcagcagcagccgcgcaagcagcagccgcagtggcggaggtggccacggtagcagcagaggatttggtggaggtggctatggaggcttttacaacagtgatggatatggaggaaattataactcccagggggttgactggtggggtaactgagcctgctttgcagtaggtcaccctgccaaacaagctaatatggaaaccacatgtaacttagccagactataccttgtgtagcttcaagaactcgcagtacattaccagctgtgattctccactgaaattttttttttaagggagctcaaggtcacaagaagaaatgaaaggaacaatcagcagccctgttcagaaggatcatgctcctctgtggagcaagtgcctccatgaaatgccatattttgtgaagaaagtgcatgcaggaatattcaggagtccagcatgtagtcatggcagccttaggtatttgagaccgaccaaccctcctgatgaagacaaccataactcatgcagaacttggagcgtgatgcccagaagtgtgtgaactggtctgtgaccacaaagatgagaaccgcatgctgagattggtggaatggagacttcagtgagcctacatgcagatgacatggtgacacccgtgcccagcctgagctgttttcttctggccctcttattacatgagaaaaataaacacctatgcaccttggcctca

SEQ ID NO: 125193 - DNA, 630 bp, Homo sapiens
  Payload ID: 4575
  Gene Symbol: DDX3X
  Gene Name: DEAD (Asp-Glu-Ala-Asp) box helicase 3, X-linked
  ENST ID: ENST00000611968
  CDS Start-End: 1-416
gtgatattgaagaatatgtacatcgtattggtcgtacgggacgtgtaggaaaccttggcctggcaacctcattctttaacgagaggaacataaatattactaaggatttgttggatcttcttgttgaagctaaacaagaagtgccgtcttggttagaaaacatggcttatgaacaccactacaagggtagcagtcgtggacgttctaagagtagcagatttagtggagggtttggtgccagagactaccgacaaagtagcggtgccagcagttccagcttcagcagcagccgcgcaagcagcagccgcagtggcggaggtggccacggtagcagcagaggatttggtggagggagctcaaggtcacaagaagaaatgaaaggaacaatcagcagccctgttcagaaggtggtttgaagacttcattgctgtagtttggattaactcccctcccgcctacccccatcccaaactgcatttataattttgtgactgaggatcatttgtttgttaatgtactgtgcctttaactttagacaactttttattttgatgtcctgttggctcagtaatgctcaagatatcaattgttttgacaaaataaatttactgaacttgggctaaaatcaaa

SEQ ID NO: 125194 - DNA, 485 bp, Homo sapiens
  Payload ID: 4575
  Gene Symbol: DDX3X
  Gene Name: DEAD (Asp-Glu-Ala-Asp) box helicase 3, X-linked
  ENST ID: ENST00000615742
  CDS Start-End: 92-388
agagccgcagttctcccgtgagagggccttcgcggtggaacaaacactcgcttagcagcggaagactccgagttctcggtactcttcagggatgagtcatgtggcagtggaaaatgcgctcgggctggaccagcagtttgctggcctagacctgaactcttcagataatcagagtggaggaagtacagccagcaaagggcgctatattcctcctcatttaaggaaccgagaagctactaaaggtttctacgataaagacagttcagggtggagttctagcaaagataaggatgcgtatagcagttttggatctcgtagtgattcaagagggaagtctagcttcttcagtgatcgtggaagtggatcaaggggaagtgtggtgaactgaccccacgtgcctaatagctgtggttagtcctgtgtcctgatttttcgcaaacaggcctaaaactcttaaaaacatcttagttcaggtttgatgatcg

SEQ ID NO: 125195 - DNA, 3237 bp, Homo sapiens
  Payload ID: 4575
  Gene Symbol: DDX3X
  Gene Name: DEAD (Asp-Glu-Ala-Asp) box helicase 3, X-linked
  ENST ID: ENST00000625837
  CDS Start-End: 906-3107
atttccccccgactcccgccccggtcaccatcctaccctcctccctcctcctttccccttactccgctcccctcttttccctccctctcctccccttccctctgttctctcctcctcttcccctcccctcccccgtccggagcactctatattcaagccaccgtttcctgcttcacaaaatggccaccgcacgcgacacctacggtcacgtggcctgccgccctctcagtttcgggaatctgcctagctcccactaaggggaggctacccgcggaagagcgagggcagattagaccggagaaatcccaccacatctccaagcccgggaactgagagaggaagaagagtgaaggccagtgttaggaaaaaaaaaacaaaaacaaaaaaaacgaaaaacgaaagctgagtgcatagagttggaaaggggagcgaatgcgtaaggttggaaaggggggcgaagaggcctaggttaacattttcaggcgtcttagccggtggaaagcgggagacgcaagttctcgcgagatctcgagaactccgaggctgagactagggttttagcggagagcacgggaagtgtagctcgagagaactgggacagcatttcgcaccctaagctccaaggcaggactgctaggggcgacaggactaagtaggaaatcccttgagcttagacctgagggagcgcgcagtagccgggcagaagtcgccgcgacagggaattgcggtgtgagagggagggcacacgttgtacgtgctgacgtagccggctttccagcgggtatattagatccgtggccgcgcggtgcgctccagagccgcagttctcccgtgagagggccttcgcggtggaacaaacactcgcttagcagcggaagactccgagttctcggtactcttcagggatgagtcatgtggcagtggaaaatgcgctcgggctggaccagcagtttgctggcctagacctgaactcttcagataatcagagtggaggaagtacagccagcaaagggcgctatattcctcctcatttaaggaaccgagaagctactaaaggtttctacgataaagacagttcagggtggagttctagcaaagataaggatgcgtatagcagttttggatctcgtagtgattcaagagggaagtctagcttcttcagtgatcgtggaagtggatcaaggggaaggtttgatgatcgtggacggagtgattacgatggcattggcagccgtggtgacagaagtggctttggcaaatttgaacgtggtggaaacagtcgctggtgtgacaaatcagatgaagatgattggtcaaaaccactcccaccaagtgaacgcttggaacaggaactcttttctggaggcaacactgggattaattttgagaaatacgatgacattccagttgaggcaacaggcaacaactgtcctccacatattgaaagtttcagtgatgttgagatgggagaaattatcatgggaaacattgagcttactcgttatactcgcccaactccagtgcaaaagcatgctattcctattatcaaagagaaaagagacttgatggcttgtgcccaaacagggtctggaaaaactgcagcatttctgttgcccatcttgagtcagatttattcagatggtccaggcgaggctttgagggccatgaaggaaaatggaaggtatgggcgccgcaaacaatacccaatctccttggtattagcaccaacgagagagttggcagtacagatctacgaggaagccagaaaattttcataccgatctagagttcgtccttgcgtggtttatggtggtgccgatattggtcagcagattcgagacttggaacgtggatgccatttgttagtagccactccaggacgtctagtggatatgatggaaagaggaaagattggattagacttttgcaaatacttggtgttagatgaagctgatcggatgttggatatggggtttgagcctcagattcgtagaatagtcgaacaagatactatgcctccaaagggtgtccgccacactatgatgtttagtgctacttttcctaaggaaatacagatgctggctcgtgatttcttagatgaatatatcttcttggctgtaggaagagttggctctacctctgaaaacatcacacagaaagtagtttgggtggaagaatcagacaaacggtcatttctgcttgacctcctaaatgcaacaggcaaggattcactgaccttagtgtttgtggagaccaaaaagggtgcagattctctggaggatttcttataccatgaaggatacgcatgtaccagcatccatggagaccgttctcagagggatagagaagaggcccttcaccagttccgctcaggaaaaagcccaattttagtggctacagcagtagcagcaagaggactggacatttcaaatgtgaaacatgttatcaattttgacttgccaagtgatattgaagaatatgtacatcgtattggtcgtacgggacgtgtaggaaaccttggcctggcaacctcattctttaacgagaggaacataaatattactaaggatttgttggatcttcttgttgaagctaaacaagaagtgccgtcttggttagaaaacatggcttatgaacaccactacaagggtagcagtcgtggacgttctaagagtagcagatttagtggagggtttggtgccagagactaccgacaaagtagcggtgccagcagttccagcttcagcagcagccgcgcaagcagcagccgcagtggcggaggtggccacggtagcagcagaggatttggtggagggagctcaaggtcacaagaagaaatgaaaggaacaatcagcagccctgttcagaaggatcatgctcctctgtggagcaagtgcctccatgaaatgccatattttgtgaagaaagtgcatgcaggaatattcaggagtccagcatgtagtcatggcagccttaggtatttgagaccgaccaaccctcctgatgaagacaaccataactcatgcaggcatgagtctaacttggagcgtgatgcccagaagtgtgtgaactggtctgtgaccacaaagatgagaaccgcatgctgagattggtggaatggagacttcagtgagcctacatgcagatgacatggtgacacccgtgcccagcctgagctgttttcttctggccctcttattacatgagaaaaataaacacctatgcaccttggcctca

SEQ ID NO: 125196 - DNA, 3013 bp, Homo sapiens
  Payload ID: 4575
  Gene Symbol: DDX3X
  Gene Name: DEAD (Asp-Glu-Ala-Asp) box helicase 3, X-linked
  ENST ID: ENST00000626301
  CDS Start-End: 906-2828
atttccccccgactcccgccccggtcaccatcctaccctcctccctcctcctttccccttactccgctcccctcttttccctccctctcctccccttccctctgttctctcctcctcttcccctcccctcccccgtccggagcactctatattcaagccaccgtttcctgcttcacaaaatggccaccgcacgcgacacctacggtcacgtggcctgccgccctctcagtttcgggaatctgcctagctcccactaaggggaggctacccgcggaagagcgagggcagattagaccggagaaatcccaccacatctccaagcccgggaactgagagaggaagaagagtgaaggccagtgttaggaaaaaaaaaacaaaaacaaaaaaaacgaaaaacgaaagctgagtgcatagagttggaaaggggagcgaatgcgtaaggttggaaaggggggcgaagaggcctaggttaacattttcaggcgtcttagccggtggaaagcgggagacgcaagttctcgcgagatctcgagaactccgaggctgagactagggttttagcggagagcacgggaagtgtagctcgagagaactgggacagcatttcgcaccctaagctccaaggcaggactgctaggggcgacaggactaagtaggaaatcccttgagcttagacctgagggagcgcgcagtagccgggcagaagtcgccgcgacagggaattgcggtgtgagagggagggcacacgttgtacgtgctgacgtagccggctttccagcgggtatattagatccgtggccgcgcggtgcgctccagagccgcagttctcccgtgagagggccttcgcggtggaacaaacactcgcttagcagcggaagactccgagttctcggtactcttcagggatgagtcatgtggcagtggaaaatgcgctcgggctggaccagcagtttgctggcctagacctgaactcttcagataatcagagtggaggaagtacagccagcaaagggcgctatattcctcctcatttaaggaaccgagaagctactaaaggtttctacgataaagacagttcagggtggagttctagcaaagataaggatgcgtatagcagttttggatctcgtagtgattcaagagggaagtctagcttcttcagtgatcgtggaagtggatcaaggggaaggtttgatgatcgtggacggagtgattacgatggcattggcagccgtggtgacagaagtggctttggcaaatttgaacgtggtggaaacagtcgctggtgtgacaaatcagatgaagatgattggtcaaaaccactcccaccaagtgaacgcttggaacaggaactcttttctggaggcaacactgggattaattttgagaaatacgatgacattccagttgaggcaacaggcaacaactgtcctccacatattgaaagtttcagtgatgttgagatgggagaaattatcatgggaaacattgagcttactcgttatactcgcccaactccagtgcaaaagcatgctattcctattatcaaagagaaaagagacttgatggcttgtgcccaaacagggtctggaaaaactgcagcatttctgttgcccatcttgagtcagatttattcagatggtccaggcgaggctttgagggccatgaaggaaaatggaaggtatgggcgccgcaaacaatacccaatctccttggtattagcaccaacgagagagttggcagtacagatctacgaggaagccagaaaattttcataccgatctagagttcgtccttgcgtggtttatggtggtgccgatattggtcagcagattcgagacttggaacgtggatgccatttgttagtagccactccaggacgtctagtggatatgatggaaagaggaaagattggattagacttttgcaaatacttggtgttagatgaagctgatcggatgttggatatggggtttgagcctcagattcgtagaatagtcgaacaagatactatgcctccaaagggtgtccgccacactatgatgtttagtgctacttttcctaaggaaatacagatgctggctcgtgatttcttagatgaatatatcttcttggctgtaggaagagttggctctacctctgaaaacatcacacagaaagtagtttgggtggaagaatcagacaaacggtcatttctgcttgacctcctaaatgcaacaggcaaggattcactgaccttagtgtttgtggagaccaaaaagggtgcagattctctggaggatttcttataccatgaaggatacgcatgtaccagcatccatggagaccgttctcagagggatagagaagaggcccttcaccagttccgctcaggaaaaagcccaattttagtggctacagcagtagcagcaagaggactggacatttcaaatgtgaaacatgttatcaattttgacttgccaagtgatattgaagaatatgtacatcgtattggtcgtacgggacgtgtaggaaaccttggcctggcaacctcattctttaacgagaggaacataaatattactaaggatttgttggatcttcttgttgaagctaaacaagaagtgccgtcttggttagaaaacatggcttatgaacaccactacaagggtagcagtcgtggacgttctaagagtagcagatttagtggagggtttggtgccagagactaccgacaaagtagcggtgccagcagttccagcttcagcagcagccgcgcaagcagcagccgcagtggcggaggtggccacggtagcagcagaggatttggtggagaacttggagcgtgatgcccagaagtgtgtgaactggtctgtgaccacaaagatgagaaccgcatgctgagattggtggaatggagacttcagtgagcctacatgcagatgacatggtgacacccgtgcccagcctgagctgttttcttctggccctcttattacatgagaaaaataaacacctatgcaccttggcctca

SEQ ID NO: 125197 - DNA, 3181 bp, Homo sapiens
  Payload ID: 4575
  Gene Symbol: DDX3X
  Gene Name: DEAD (Asp-Glu-Ala-Asp) box helicase 3, X-linked
  ENST ID: ENST00000630858
  CDS Start-End: 906-2849
atttccccccgactcccgccccggtcaccatcctaccctcctccctcctcctttccccttactccgctcccctcttttccctccctctcctccccttccctctgttctctcctcctcttcccctcccctcccccgtccggagcactctatattcaagccaccgtttcctgcttcacaaaatggccaccgcacgcgacacctacggtcacgtggcctgccgccctctcagtttcgggaatctgcctagctcccactaaggggaggctacccgcggaagagcgagggcagattagaccggagaaatcccaccacatctccaagcccgggaactgagagaggaagaagagtgaaggccagtgttaggaaaaaaaaaacaaaaacaaaaaaaacgaaaaacgaaagctgagtgcatagagttggaaaggggagcgaatgcgtaaggttggaaaggggggcgaagaggcctaggttaacattttcaggcgtcttagccggtggaaagcgggagacgcaagttctcgcgagatctcgagaactccgaggctgagactagggttttagcggagagcacgggaagtgtagctcgagagaactgggacagcatttcgcaccctaagctccaaggcaggactgctaggggcgacaggactaagtaggaaatcccttgagcttagacctgagggagcgcgcagtagccgggcagaagtcgccgcgacagggaattgcggtgtgagagggagggcacacgttgtacgtgctgacgtagccggctttccagcgggtatattagatccgtggccgcgcggtgcgctccagagccgcagttctcccgtgagagggccttcgcggtggaacaaacactcgcttagcagcggaagactccgagttctcggtactcttcagggatgagtcatgtggcagtggaaaatgcgctcgggctggaccagcagtttgctggcctagacctgaactcttcagataatcagagtggaggaagtacagccagcaaagggcgctatattcctcctcatttaaggaaccgagaagctactaaaggtttctacgataaagacagttcagggtggagttctagcaaagataaggatgcgtatagcagttttggatctcgtagtgattcaagagggaagtctagcttcttcagtgatcgtggaagtggatcaaggggaaggtttgatgatcgtggacggagtgattacgatggcattggcagccgtggtgacagaagtggctttggcaaatttgaacgtggtggaaacagtcgctggtgtgacaaatcagatgaagatgattggtcaaaaccactcccaccaagtgaacgcttggaacaggaactcttttctggaggcaacactgggattaattttgagaaatacgatgacattccagttgaggcaacaggcaacaactgtcctccacatattgaaagtttcagtgatgttgagatgggagaaattatcatgggaaacattgagcttactcgttatactcgcccaactccagtgcaaaagcatgctattcctattatcaaagagaaaagagacttgatggcttgtgcccaaacagggtctggaaaaactgcagcatttctgttgcccatcttgagtcagatttattcagatggtccaggcgaggctttgagggccatgaaggaaaatggaaggtatgggcgccgcaaacaatacccaatctccttggtattagcaccaacgagagagttggcagtacagatctacgaggaagccagaaaattttcataccgatctagagttcgtccttgcgtggtttatggtggtgccgatattggtcagcagattcgagacttggaacgtggatgccatttgttagtagccactccaggacgtctagtggatatgatggaaagaggaaagattggattagacttttgcaaatacttggtgttagatgaagctgatcggatgttggatatggggtttgagcctcagattcgtagaatagtcgaacaagatactatgcctccaaagggtgtccgccacactatgatgtttagtgctacttttcctaaggaaatacagatgctggctcgtgatttcttagatgaatatatcttcttggctgtaggaagagttggctctacctctgaaaacatcacacagaaagtagtttgggtggaagaatcagacaaacggtcatttctgcttgacctcctaaatgcaacaggcaaggattcactgaccttagtgtttgtggagaccaaaaagggtgcagattctctggaggatttcttataccatgaaggatacgcatgtaccagcatccatggagaccgttctcagagggatagagaagaggcccttcaccagttccgctcaggaaaaagcccaattttagtggctacagcagtagcagcaagaggactggacatttcaaatgtgaaacatgttatcaattttgacttgccaagtgatattgaagaatatgtacatcgtattggtcgtacgggacgtgtaggaaaccttggcctggcaacctcattctttaacgagaggaacataaatattactaaggatttgttggatcttcttgttgaagctaaacaagaagtgccgtcttggttagaaaacatggcttatgaacaccactacaagggtagcagtcgtggacgttctaagagtagcagatttagtggagggtttggtgccagagactaccgacaaagtagcggtgccagcagttccagcttcagcagcagccgcgcaagcagcagccgcagtggcggaggtggccacggtagcagcagaggatttggtggaggatcatgctcctctgtggagcaagtgcctccatgaaatgccatattttgtgaagaaagtgcatgcaggaatattcaggagtccagcatgtagtcatggcagccttaggtatttgagaccgaccaaccctcctgatgaagacaaccataactcatgcaggcatgagtctaacttggagcgtgatgcccagaagtgtgtgaactggtctgtgaccacaaagatgagaaccgcatgctgagattggtggaatggagacttcagtgagcctacatgcagatgacatggtgacacccgtgcccagcctgagctgttttcttctggccctcttattacatgagaaaaataaacacctatgcaccttggcctca

SEQ ID NO: 125198 - DNA, 3457 bp, Homo sapiens
  Payload ID: 4575
  Gene Symbol: DDX3X
  Gene Name: DEAD (Asp-Glu-Ala-Asp) box helicase 3, X-linked
  Uniprot ID: O00571
  ENST ID: ENST00000629785
  CDS Start-End: 906-2894
atttccccccgactcccgccccggtcaccatcctaccctcctccctcctcctttccccttactccgctcccctcttttccctccctctcctccccttccctctgttctctcctcctcttcccctcccctcccccgtccggagcactctatattcaagccaccgtttcctgcttcacaaaatggccaccgcacgcgacacctacggtcacgtggcctgccgccctctcagtttcgggaatctgcctagctcccactaaggggaggctacccgcggaagagcgagggcagattagaccggagaaatcccaccacatctccaagcccgggaactgagagaggaagaagagtgaaggccagtgttaggaaaaaaaaaacaaaaacaaaaaaaacgaaaaacgaaagctgagtgcatagagttggaaaggggagcgaatgcgtaaggttggaaaggggggcgaagaggcctaggttaacattttcaggcgtcttagccggtggaaagcgggagacgcaagttctcgcgagatctcgagaactccgaggctgagactagggttttagcggagagcacgggaagtgtagctcgagagaactgggacagcatttcgcaccctaagctccaaggcaggactgctaggggcgacaggactaagtaggaaatcccttgagcttagacctgagggagcgcgcagtagccgggcagaagtcgccgcgacagggaattgcggtgtgagagggagggcacacgttgtacgtgctgacgtagccggctttccagcgggtatattagatccgtggccgcgcggtgcgctccagagccgcagttctcccgtgagagggccttcgcggtggaacaaacactcgcttagcagcggaagactccgagttctcggtactcttcagggatgagtcatgtggcagtggaaaatgcgctcgggctggaccagcagtttgctggcctagacctgaactcttcagataatcagagtggaggaagtacagccagcaaagggcgctatattcctcctcatttaaggaaccgagaagctactaaaggtttctacgataaagacagttcagggtggagttctagcaaagataaggatgcgtatagcagttttggatctcgtagtgattcaagagggaagtctagcttcttcagtgatcgtggaagtggatcaaggggaaggtttgatgatcgtggacggagtgattacgatggcattggcagccgtggtgacagaagtggctttggcaaatttgaacgtggtggaaacagtcgctggtgtgacaaatcagatgaagatgattggtcaaaaccactcccaccaagtgaacgcttggaacaggaactcttttctggaggcaacactgggattaattttgagaaatacgatgacattccagttgaggcaacaggcaacaactgtcctccacatattgaaagtttcagtgatgttgagatgggagaaattatcatgggaaacattgagcttactcgttatactcgcccaactccagtgcaaaagcatgctattcctattatcaaagagaaaagagacttgatggcttgtgcccaaacagggtctggaaaaactgcagcatttctgttgcccatcttgagtcagatttattcagatggtccaggcgaggctttgagggccatgaaggaaaatggaaggtatgggcgccgcaaacaatacccaatctccttggtattagcaccaacgagagagttggcagtacagatctacgaggaagccagaaaattttcataccgatctagagttcgtccttgcgtggtttatggtggtgccgatattggtcagcagattcgagacttggaacgtggatgccatttgttagtagccactccaggacgtctagtggatatgatggaaagaggaaagattggattagacttttgcaaatacttggtgttagatgaagctgatcggatgttggatatggggtttgagcctcagattcgtagaatagtcgaacaagatactatgcctccaaagggtgtccgccacactatgatgtttagtgctacttttcctaaggaaatacagatgctggctcgtgatttcttagatgaatatatcttcttggctgtaggaagagttggctctacctctgaaaacatcacacagaaagtagtttgggtggaagaatcagacaaacggtcatttctgcttgacctcctaaatgcaacaggcaaggattcactgaccttagtgtttgtggagaccaaaaagggtgcagattctctggaggatttcttataccatgaaggatacgcatgtaccagcatccatggagaccgttctcagagggatagagaagaggcccttcaccagttccgctcaggaaaaagcccaattttagtggctacagcagtagcagcaagaggactggacatttcaaatgtgaaacatgttatcaattttgacttgccaagtgatattgaagaatatgtacatcgtattggtcgtacgggacgtgtaggaaaccttggcctggcaacctcattctttaacgagaggaacataaatattactaaggatttgttggatcttcttgttgaagctaaacaagaagtgccgtcttggttagaaaacatggcttatgaacaccactacaagggtagcagtcgtggacgttctaagagtagcagatttagtggagggtttggtgccagagactaccgacaaagtagcggtgccagcagttccagcttcagcagcagccgcgcaagcagcagccgcagtggcggaggtggccacggtagcagcagaggatttggtggaggtggctatggaggcttttacaacagtgatggatatggaggaaattataactcccagggggttgactggtggggtaactgagcctgctttgcagtaggtcaccctgccaaacaagctaatatggaaaccacatgtaacttagccagactataccttgtgtagcttcaagaactcgcagtacattaccagctgtgattctccactgaaattttttttttaagggagctcaaggtcacaagaagaaatgaaaggaacaatcagcagccctgttcagaaggatcatgctcctctgtggagcaagtgcctccatgaaatgccatattttgtgaagaaagtgcatgcaggaatattcaggagtccagcatgtagtcatggcagccttaggtatttgagaccgaccaaccctcctgatgaagacaaccataactcatgcaggcatgagtctaacttggagcgtgatgcccagaagtgtgtgaactggtctgtgaccacaaagatgagaaccgcatgctgagattggtggaatggagacttcagtgagcctacatgcagatgacatggtgacacccgtgcccagcctgagctgttttcttctggccctcttattacatgagaaaaataaacacctatgcaccttggcctca

SEQ ID NO: 125199 - DNA, 3289 bp, Homo sapiens
  Payload ID: 4575
  Gene Symbol: DDX3X
  Gene Name: DEAD (Asp-Glu-Ala-Asp) box helicase 3, X-linked
  Uniprot ID: O00571
  ENST ID: ENST00000630255
  CDS Start-End: 906-2894
atttccccccgactcccgccccggtcaccatcctaccctcctccctcctcctttccccttactccgctcccctcttttccctccctctcctccccttccctctgttctctcctcctcttcccctcccctcccccgtccggagcactctatattcaagccaccgtttcctgcttcacaaaatggccaccgcacgcgacacctacggtcacgtggcctgccgccctctcagtttcgggaatctgcctagctcccactaaggggaggctacccgcggaagagcgagggcagattagaccggagaaatcccaccacatctccaagcccgggaactgagagaggaagaagagtgaaggccagtgttaggaaaaaaaaaacaaaaacaaaaaaaacgaaaaacgaaagctgagtgcatagagttggaaaggggagcgaatgcgtaaggttggaaaggggggcgaagaggcctaggttaacattttcaggcgtcttagccggtggaaagcgggagacgcaagttctcgcgagatctcgagaactccgaggctgagactagggttttagcggagagcacgggaagtgtagctcgagagaactgggacagcatttcgcaccctaagctccaaggcaggactgctaggggcgacaggactaagtaggaaatcccttgagcttagacctgagggagcgcgcagtagccgggcagaagtcgccgcgacagggaattgcggtgtgagagggagggcacacgttgtacgtgctgacgtagccggctttccagcgggtatattagatccgtggccgcgcggtgcgctccagagccgcagttctcccgtgagagggccttcgcggtggaacaaacactcgcttagcagcggaagactccgagttctcggtactcttcagggatgagtcatgtggcagtggaaaatgcgctcgggctggaccagcagtttgctggcctagacctgaactcttcagataatcagagtggaggaagtacagccagcaaagggcgctatattcctcctcatttaaggaaccgagaagctactaaaggtttctacgataaagacagttcagggtggagttctagcaaagataaggatgcgtatagcagttttggatctcgtagtgattcaagagggaagtctagcttcttcagtgatcgtggaagtggatcaaggggaaggtttgatgatcgtggacggagtgattacgatggcattggcagccgtggtgacagaagtggctttggcaaatttgaacgtggtggaaacagtcgctggtgtgacaaatcagatgaagatgattggtcaaaaccactcccaccaagtgaacgcttggaacaggaactcttttctggaggcaacactgggattaattttgagaaatacgatgacattccagttgaggcaacaggcaacaactgtcctccacatattgaaagtttcagtgatgttgagatgggagaaattatcatgggaaacattgagcttactcgttatactcgcccaactccagtgcaaaagcatgctattcctattatcaaagagaaaagagacttgatggcttgtgcccaaacagggtctggaaaaactgcagcatttctgttgcccatcttgagtcagatttattcagatggtccaggcgaggctttgagggccatgaaggaaaatggaaggtatgggcgccgcaaacaatacccaatctccttggtattagcaccaacgagagagttggcagtacagatctacgaggaagccagaaaattttcataccgatctagagttcgtccttgcgtggtttatggtggtgccgatattggtcagcagattcgagacttggaacgtggatgccatttgttagtagccactccaggacgtctagtggatatgatggaaagaggaaagattggattagacttttgcaaatacttggtgttagatgaagctgatcggatgttggatatggggtttgagcctcagattcgtagaatagtcgaacaagatactatgcctccaaagggtgtccgccacactatgatgtttagtgctacttttcctaaggaaatacagatgctggctcgtgatttcttagatgaatatatcttcttggctgtaggaagagttggctctacctctgaaaacatcacacagaaagtagtttgggtggaagaatcagacaaacggtcatttctgcttgacctcctaaatgcaacaggcaaggattcactgaccttagtgtttgtggagaccaaaaagggtgcagattctctggaggatttcttataccatgaaggatacgcatgtaccagcatccatggagaccgttctcagagggatagagaagaggcccttcaccagttccgctcaggaaaaagcccaattttagtggctacagcagtagcagcaagaggactggacatttcaaatgtgaaacatgttatcaattttgacttgccaagtgatattgaagaatatgtacatcgtattggtcgtacgggacgtgtaggaaaccttggcctggcaacctcattctttaacgagaggaacataaatattactaaggatttgttggatcttcttgttgaagctaaacaagaagtgccgtcttggttagaaaacatggcttatgaacaccactacaagggtagcagtcgtggacgttctaagagtagcagatttagtggagggtttggtgccagagactaccgacaaagtagcggtgccagcagttccagcttcagcagcagccgcgcaagcagcagccgcagtggcggaggtggccacggtagcagcagaggatttggtggaggtggctatggaggcttttacaacagtgatggatatggaggaaattataactcccagggggttgactggtggggtaactgagcctgctttgcagtaggtcaccctgccaaacaagctaatatggaaaccacatgtaacttagccagactataccttgtgtagcttcaagaactcgcagtacattaccagctgtgattctccactgaaattttttttttaagggagctcaaggtcacaagaagaaatgaaaggaacaatcagcagccctgttcagaagaacttggagcgtgatgcccagaagtgtgtgaactggtctgtgaccacaaagatgagaaccgcatgctgagattggtggaatggagacttcagtgagcctacatgcagatgacatggtgacacccgtgcccagcctgagctgttttcttctggccctcttattacatgagaaaaataaacacctatgcaccttggcctca

SEQ ID NO: 125200 - DNA, 3120 bp, Homo sapiens
  Payload ID: 4575
  Gene Symbol: DDX3X
  Gene Name: DEAD (Asp-Glu-Ala-Asp) box helicase 3, X-linked
  ENST ID: ENST00000630370
  CDS Start-End: 906-2849
atttccccccgactcccgccccggtcaccatcctaccctcctccctcctcctttccccttactccgctcccctcttttccctccctctcctccccttccctctgttctctcctcctcttcccctcccctcccccgtccggagcactctatattcaagccaccgtttcctgcttcacaaaatggccaccgcacgcgacacctacggtcacgtggcctgccgccctctcagtttcgggaatctgcctagctcccactaaggggaggctacccgcggaagagcgagggcagattagaccggagaaatcccaccacatctccaagcccgggaactgagagaggaagaagagtgaaggccagtgttaggaaaaaaaaaacaaaaacaaaaaaaacgaaaaacgaaagctgagtgcatagagttggaaaggggagcgaatgcgtaaggttggaaaggggggcgaagaggcctaggttaacattttcaggcgtcttagccggtggaaagcgggagacgcaagttctcgcgagatctcgagaactccgaggctgagactagggttttagcggagagcacgggaagtgtagctcgagagaactgggacagcatttcgcaccctaagctccaaggcaggactgctaggggcgacaggactaagtaggaaatcccttgagcttagacctgagggagcgcgcagtagccgggcagaagtcgccgcgacagggaattgcggtgtgagagggagggcacacgttgtacgtgctgacgtagccggctttccagcgggtatattagatccgtggccgcgcggtgcgctccagagccgcagttctcccgtgagagggccttcgcggtggaacaaacactcgcttagcagcggaagactccgagttctcggtactcttcagggatgagtcatgtggcagtggaaaatgcgctcgggctggaccagcagtttgctggcctagacctgaactcttcagataatcagagtggaggaagtacagccagcaaagggcgctatattcctcctcatttaaggaaccgagaagctactaaaggtttctacgataaagacagttcagggtggagttctagcaaagataaggatgcgtatagcagttttggatctcgtagtgattcaagagggaagtctagcttcttcagtgatcgtggaagtggatcaaggggaaggtttgatgatcgtggacggagtgattacgatggcattggcagccgtggtgacagaagtggctttggcaaatttgaacgtggtggaaacagtcgctggtgtgacaaatcagatgaagatgattggtcaaaaccactcccaccaagtgaacgcttggaacaggaactcttttctggaggcaacactgggattaattttgagaaatacgatgacattccagttgaggcaacaggcaacaactgtcctccacatattgaaagtttcagtgatgttgagatgggagaaattatcatgggaaacattgagcttactcgttatactcgcccaactccagtgcaaaagcatgctattcctattatcaaagagaaaagagacttgatggcttgtgcccaaacagggtctggaaaaactgcagcatttctgttgcccatcttgagtcagatttattcagatggtccaggcgaggctttgagggccatgaaggaaaatggaaggtatgggcgccgcaaacaatacccaatctccttggtattagcaccaacgagagagttggcagtacagatctacgaggaagccagaaaattttcataccgatctagagttcgtccttgcgtggtttatggtggtgccgatattggtcagcagattcgagacttggaacgtggatgccatttgttagtagccactccaggacgtctagtggatatgatggaaagaggaaagattggattagacttttgcaaatacttggtgttagatgaagctgatcggatgttggatatggggtttgagcctcagattcgtagaatagtcgaacaagatactatgcctccaaagggtgtccgccacactatgatgtttagtgctacttttcctaaggaaatacagatgctggctcgtgatttcttagatgaatatatcttcttggctgtaggaagagttggctctacctctgaaaacatcacacagaaagtagtttgggtggaagaatcagacaaacggtcatttctgcttgacctcctaaatgcaacaggcaaggattcactgaccttagtgtttgtggagaccaaaaagggtgcagattctctggaggatttcttataccatgaaggatacgcatgtaccagcatccatggagaccgttctcagagggatagagaagaggcccttcaccagttccgctcaggaaaaagcccaattttagtggctacagcagtagcagcaagaggactggacatttcaaatgtgaaacatgttatcaattttgacttgccaagtgatattgaagaatatgtacatcgtattggtcgtacgggacgtgtaggaaaccttggcctggcaacctcattctttaacgagaggaacataaatattactaaggatttgttggatcttcttgttgaagctaaacaagaagtgccgtcttggttagaaaacatggcttatgaacaccactacaagggtagcagtcgtggacgttctaagagtagcagatttagtggagggtttggtgccagagactaccgacaaagtagcggtgccagcagttccagcttcagcagcagccgcgcaagcagcagccgcagtggcggaggtggccacggtagcagcagaggatttggtggaggatcatgctcctctgtggagcaagtgcctccatgaaatgccatattttgtgaagaaagtgcatgcaggaatattcaggagtccagcatgtagtcatggcagccttagaacttggagcgtgatgcccagaagtgtgtgaactggtctgtgaccacaaagatgagaaccgcatgctgagattggtggaatggagacttcagtgagcctacatgcagatgacatggtgacacccgtgcccagcctgagctgttttcttctggccctcttattacatgagaaaaataaacacctatgcaccttggcctca

SEQ ID NO: 125201 - DNA, 5023 bp, Homo sapiens
  Payload ID: 4575
  Gene Symbol: DDX3X
  Gene Name: DEAD (Asp-Glu-Ala-Asp) box helicase 3, X-linked
  Uniprot ID: O00571
  ENST ID: ENST00000629496
  CDS Start-End: 480-2468
atttccccccgactcccgccccggtcaccatcctaccctcctccctcctcctttccccttactccgctcccctcttttccctccctctcctccccttccctctgttctctcctcctcttcccctcccctcccccgtccggagcactctatattcaagccaccgtttcctgcttcacaaaatggccaccgcacgcgacacctacggtcacgtggcctgccgccctctcagtttcgggaatctgcctagctcccactaaggggaggctacccgcggaagagcgagggcagattagaccggagaaatcccaccacatctccaagcccgggaactgagagaggaagaagagtgaagcgggtatattagatccgtggccgcgcggtgcgctccagagccgcagttctcccgtgagagggccttcgcggtggaacaaacactcgcttagcagcggaagactccgagttctcggtactcttcagggatgagtcatgtggcagtggaaaatgcgctcgggctggaccagcagtttgctggcctagacctgaactcttcagataatcagagtggaggaagtacagccagcaaagggcgctatattcctcctcatttaaggaaccgagaagctactaaaggtttctacgataaagacagttcagggtggagttctagcaaagataaggatgcgtatagcagttttggatctcgtagtgattcaagagggaagtctagcttcttcagtgatcgtggaagtggatcaaggggaaggtttgatgatcgtggacggagtgattacgatggcattggcagccgtggtgacagaagtggctttggcaaatttgaacgtggtggaaacagtcgctggtgtgacaaatcagatgaagatgattggtcaaaaccactcccaccaagtgaacgcttggaacaggaactcttttctggaggcaacactgggattaattttgagaaatacgatgacattccagttgaggcaacaggcaacaactgtcctccacatattgaaagtttcagtgatgttgagatgggagaaattatcatgggaaacattgagcttactcgttatactcgcccaactccagtgcaaaagcatgctattcctattatcaaagagaaaagagacttgatggcttgtgcccaaacagggtctggaaaaactgcagcatttctgttgcccatcttgagtcagatttattcagatggtccaggcgaggctttgagggccatgaaggaaaatggaaggtatgggcgccgcaaacaatacccaatctccttggtattagcaccaacgagagagttggcagtacagatctacgaggaagccagaaaattttcataccgatctagagttcgtccttgcgtggtttatggtggtgccgatattggtcagcagattcgagacttggaacgtggatgccatttgttagtagccactccaggacgtctagtggatatgatggaaagaggaaagattggattagacttttgcaaatacttggtgttagatgaagctgatcggatgttggatatggggtttgagcctcagattcgtagaatagtcgaacaagatactatgcctccaaagggtgtccgccacactatgatgtttagtgctacttttcctaaggaaatacagatgctggctcgtgatttcttagatgaatatatcttcttggctgtaggaagagttggctctacctctgaaaacatcacacagaaagtagtttgggtggaagaatcagacaaacggtcatttctgcttgacctcctaaatgcaacaggcaaggattcactgaccttagtgtttgtggagaccaaaaagggtgcagattctctggaggatttcttataccatgaaggatacgcatgtaccagcatccatggagaccgttctcagagggatagagaagaggcccttcaccagttccgctcaggaaaaagcccaattttagtggctacagcagtagcagcaagaggactggacatttcaaatgtgaaacatgttatcaattttgacttgccaagtgatattgaagaatatgtacatcgtattggtcgtacgggacgtgtaggaaaccttggcctggcaacctcattctttaacgagaggaacataaatattactaaggatttgttggatcttcttgttgaagctaaacaagaagtgccgtcttggttagaaaacatggcttatgaacaccactacaagggtagcagtcgtggacgttctaagagtagcagatttagtggagggtttggtgccagagactaccgacaaagtagcggtgccagcagttccagcttcagcagcagccgcgcaagcagcagccgcagtggcggaggtggccacggtagcagcagaggatttggtggaggtggctatggaggcttttacaacagtgatggatatggaggaaattataactcccagggggttgactggtggggtaactgagcctgctttgcagtaggtcaccctgccaaacaagctaatatggaaaccacatgtaacttagccagactataccttgtgtagcttcaagaactcgcagtacattaccagctgtgattctccactgaaattttttttttaagggagctcaaggtcacaagaagaaatgaaaggaacaatcagcagccctgttcagaaggtggtttgaagacttcattgctgtagtttggattaactcccctcccgcctacccccatcccaaactgcatttataattttgtgactgaggatcatttgtttgttaatgtactgtgcctttaactttagacaactttttattttgatgtcctgttggctcagtaatgctcaagatatcaattgttttgacaaaataaatttactgaacttgggctaaaatcaaaccttggcacacaggtgtgatacaacttaacaggaatcatcgattcatccataaataatataaggaaaaacttatgcggtagcctgcattagggctttttgatacttgcagattgggggaaaacaacaaatgtcttgaagcatattaatggaattagtttctaatgtggcaaactgtattaagttaaagttctgatttgctcactctatcctggataggtatttagaacctgatagtctttaagccattccagtcatgatgaggtgatgtatgaatacatgcatacattcaaagcactgttttcaaagttaatgcaagtaaatacagcaattcctctttcaacgtttaggcagatcattaattatgagctagccaaatgtgggcatactattacagggaaagtttaaaggtctgataacttgaaataggtttttaggagaattcatctacttagactttttaaatgcctgccataaatgaaattgaaatggtagaatggctgaccacagcaatgaccagccctcattagggccctggatgatttttggtctaataacgcatgctagtgttgatgttttttggtcaagagggtatgaacaggaagaattaaatgcagcaggctttattttaaatgccgattcacattactctgttcaagctgcgttgagatgttaaactggcttactatagacttcgtaaaaatggctccagaagagtaacaaactgaaatctttgagatcacacaggttggaaatatgtacataactgcacaaggtgtcaattctgctctacagtgcagttttagtcagttttagttgcataggtttccattgtatttatagtctgtttatgctaaatctggccaaagatgagcattgtccaccactaaaatgcctctgccactttgaattctgtgctaattttgtggccagaatgcggtgatcaaaacgctccatctttttacagtggcataggaagacggcaaaaatttcctaaagtgcaatagattttcaagtgtattgtgccttgttctaaaacttttattaagtaggtgcacttgacagtattgaggtcatttgttatggtgctatttcaattagtctaggtttaggcccttgtacattttgcccataactttttacaaagtacttcttttattgcacattcagagaattttatatatatgtcttgtgtgcgtgtccttaaacttccaatcttactttgtctcttggagattgttgaacgcagcttgtctaggaaggggatgggactagattctaaaatttatttgggaccatgggaatgatagttgggaagaaaactatttgcacacgacagatttctagatactttttgctgctagttttatgtaatatttattgaacattttgacaaatatttatttttgtaagcctaaaagtgattctttgaaagtttaaagaaacttgaccaaaagacagtacaaaaacactggcacttgaatgttgaatgtcaccgtatgcgtgaaattatatatttcggggtagtgtgagcttttaatgtttaagtcatattaaactcttaagtcaaattaagcagacccggcgttggcagtgtagccataactttctgatgttagtaaaaacaaaattggcgacttgaaattaaatcatgccaaggttttgatacacttgtcttaagatattaatgaaacacttcaaaacactgatgtgaagtgtccagattctcagatgtttgttgtgtggattttgtttagttgtgtgtttttttttttttttcagtgaatgtctggcacattgcaatcctcaaacatgtggttatctttgttgtattggcataatcagtgacttgtacattcagcaatagcatttgagcaagttttatcagcaagcaatattttcagttaataaggtttcaaaaatcatgtaaggatttaaacttgctgaatgtaaagattgaacctcaagtcactgtagctttagtaattgcttattgtattagtttagatgctagcactgcatgtgctgtgcatattctgattttattaaaataaaaagttgaactgcacagtctcctttgttgttgtcaattgtggtttattttcagaggtgtaaataaagtgctcttgcctgaaaaa

SEQ ID NO: 125202 - DNA, 818 bp, Homo sapiens
  Payload ID: 4575
  Gene Symbol: DDX3X
  Gene Name: DEAD (Asp-Glu-Ala-Asp) box helicase 3, X-linked
  ENST ID: ENST00000616050
  CDS Start-End: 1-494
cccttcaccagttccgctcaggaaaaagcccaattttagtggctacagcagtagcagcaagaggactggacatttcaaatgtgaaacatgttatcaattttgacttgccaagtgatattgaagaatatgtacatcgtattggtcgtacgggacgtgtaggaaaccttggcctggcaacctcattctttaacgagaggaacataaatattactaaggatttgttggatcttcttgttgaagctaaacaagaagtgccgtcttggttagaaaacatggcttatgaacaccactacaagggtagcagtcgtggacgttctaagagcagatttagtggagggtttggtgccagagactaccgacaaagtagcggtgccagcagttccagcttcagcagcagccgcgcaagcagcagccgcagtggcggaggtggccacggtagcagcagaggatttggtggaggatcatgctcctctgtggagcaagtgcctccatgaaatgccatattttgtgaagaaagtgcatgcaggaatattcaggagtccagcatgtagtcatggcagccttaggtatttgagaccgaccaaccctcctgatgaagacaaccataactcatgcaggcatgagtctcaaagcctcacaagaggcttttggctctgctcttttttctctcctagaacttggagcgtgatgcccagaagtgtgtgaactggtctgtgaccacaaagatgagaaccgcatgctgagattggtggaatggagacttcagtgagcctacatgcagatgacatggtgacacccgtgcccagcctgagctgttt

SEQ ID NO: 125203 - DNA, 583 bp, Homo sapiens
  Payload ID: 4575
  Gene Symbol: DDX3X
  Gene Name: DEAD (Asp-Glu-Ala-Asp) box helicase 3, X-linked
  ENST ID: ENST00000631641
  CDS Start-End: 92-583
agagccgcagttctcccgtgagagggccttcgcggtggaacaaacactcgcttagcagcggaagactccgagttctcggtactcttcagggatgagtcatgtggcagtggaaaatgcgctcgggctggaccagcagtttgctggcctagacctgaactcttcagataatcagagtggaggaagtacagccagcagtttctacgataaagacagttcagggtggagttctagcaaagataaggatgcgtatagcagttttggatctcgtagtgattcaagagggaagtctagcttcttcagtgatcgtggaagtggatcaaggggaaggtttgatgatcgtggacggagtgattacgatggcattggcagccgtggtgacagaagtggctttggcaaatttgaacgtggtggaaacagtcgctggtgtgacaaatcagatgaagatgattggtcaaaaccactcccaccaagtgaacgcttggaacaggaactcttttctggaggcaacactgggattaattttgagaaatacgatgacattccagttgaggcaacaggcaacaactgtcctccacatattgaa

SEQ ID NO: 125204 - DNA, 4445 bp, Homo sapiens
  Payload ID: 4576
  Gene Symbol: DDX3Y
  Gene Name: DEAD (Asp-Glu-Ala-Asp) box helicase 3, Y-linked
  Uniprot ID: O15523
  ENST ID: ENST00000336079
  CDS Start-End: 107-2089
gcgtaggctaaccagtgcgcttaatagctgtaggtccagtgtaagagttccgctattcggtctcacacctacagtggactacccgatttttcgcttctcttcagggatgagtcatgtggtggtgaaaaatgaccctgaactggaccagcagcttgctaatctggacctgaactctgaaaaacagagtggaggagcaagtacagcgagcaaagggcgctatatacctcctcacttaaggaacagagaagcatctaaaggattccatgataaagacagttcaggttggagttgcagcaaagataaggatgcatatagcagttttgggtctcgagattctagaggaaagcctggttatttcagtgaacgtggaagtggatcaaggggaagatttgatgatcgtggacggagtgactatgatggtattggcaatcgtgaaagacctggctttggcagatttgaacggagtggacatagtcgttggtgtgacaagtcagttgaagatgattggtcaaaaccacttccaccaagtgaacgcttggagcaagaactgttttctggaggaaacacggggattaactttgagaaatatgatgatataccagtagaggcaaccggcagtaactgtcctccacatattgagaattttagcgatattgacatgggagaaattatcatggggaacattgaacttactcgctatactcgtcctactccagtgcaaaaacatgccattcctattattaagggaaaaagagacttaatggcttgtgcccaaacaggatctgggaaaactgcagcatttcttttacccatactgagtcagatatatacagatggtccaggagaagctttgaaggctgtgaaggaaaatggaaggtatgggcgccgcaaacaatatccaatatccttggttttagccccaacaagagaattggctgtacagatctatgaggaagccagaaaattttcctaccgatctagagttcgtccttgtgtagtttatggtggtgctgatattggtcagcagattcgggacttagaacgtggatgccacttgttagtagccactccaggacgtctagtggatatgatggaaagaggaaagattggattagacttctgcaagtacttagtgttggatgaagctgataggatgctggatatgggatttgaacctcagatacgtcgtatagttgaacaagatactatgccaccaaagggcgttcgtcacaccatgatgtttagtgctacttttcctaaggaaatacagatgcttgctcgtgactttttggatgaatatatctttttggctgtaggcagagtaggctctacctctgagaacatcacacagaaagtagtttgggtggaagacttagataaacggtcatttctactggacattttaggtgcaacagggagtgattcacttactttagtgtttgtggagaccaaaaagggagcagattccctggaggatttcttataccatgaaggatatgcttgtactagtattcatggagaccggtcacagagagatcgagaggaggcccttcaccagtttcgctcaggaaaaagcccaattctagtggctacagctgtggcagcacgaggactagacatttcaaatgtgagacatgttatcaattttgatttgccaagtgatattgaagaatatgtgcatcgtattggccgtacaggacgtgtaggaaacctgggccttgccacctcattctttaatgaaaaaaatatgaatattacaaaggatttgttggatcttcttgtagaagctaaacaagaagtgccttcttggttggaaaatatggcttatgaacaccactacaagggtggcagtcgtggacgatctaaaagtaatagattcagtggaggatttggtgccagagactatcgacaaagtagtggttccagcagttctggctttggtgctagtcgcggaagcagcagccgcagtggtggaggtggttacggcaacagcagaggatttggtggaggtggctatggaggcttctacaatagtgatggatatggaggaaattataactcccagggggttgactggtggggcaactgaatctgctttgcagcaaagtcacccttacaaagaagctaatatggaaaccacatgtaacttagccagactatattgtgtagcttcaagaacttgcagtacattaccagctgtgattctcctgataattcaagggagctcaaagtcacaagaagaaaaatgaaaggaaaaaacagcagccctattcagaaattggtttgaagatgtaattgctctagtttggattaaactcttcccctcctgctttagtgccaccccaaactgcatttataattttgtgactgaggatcgtttgtttgttaacgtactgtgactttaactttagacaacttactactttgatgtcctgttggctcagtaatgctcacgataccaattgttttgacaaaataaatttactaaacttggcctaaaatcaaaccttggcacagaggtatgatacaactttaacaggagtcatcaattcatccataaatataaaaagggaaaaaaacttaaggcagtagtctgcattaggactgtttgagttttgcagacttggggttgggagaacatcttaaagcattaaagcatagttttttgtatggccaaccttactaaattaagttctgacttgctcactctatcctggataggcacttgggaacttacactctttaagccattccagtcatgatgaggtggaatgtatcagtataccaattaatatttttgaaagagctcttttaggttaatttaagtacagcaatttctcatgtaatgtttagggagtttattctaacctaggcaaacggcatgctatcacaagaaaggtttaaagctttgataaaatgggggagatttaatcagtttttttaatgcctgctataaaaatttgaaatattagaatggccgaccatggcagtgaccaggcctcactacaggcctggttggattctggtctttaatgcatgctagtgttgatgttttttggtcaagaacggtttaaacaggaaggattgtgcagcaggctttaatttaatgtagattcatactgctctgttaaagctgcattgaaatgttaaaatggcttacacttgcagactttgcaaatcttaagactaacaaatccttgaaatcacacagcttgcaaatacgtactaaactgcacaaggtgtgtgttctatatgtgcagttttagcgtattttagttgcataggtttccatggtatttatagtctcttgtgctaaatttggccaaagatgattgtccaccactaaaaatgcctctcccacttggaattctgtactgattttgtggccagatgcaatgatctttaaaaacaaatcttttcaatggcataagaagttgacaaaaatttcttaaagtgcaatagattttcaagtgtattgtgccttgttctaaaacttttaagtaggtgcacttgacagtattgaggtcatttgttaaggtgctatttcaattagtgtaggtttagactcttgtacatttctcccataactttttacaaagtattttgttgcacattcagagaattttatatatatatgtcttgtgtgggtgtcctcgaccttccaatcttatttcgtctcttggagattgttgaatgcagccagtgaagaagtagattcctaaattttattggggaccatggaatggtagttgagaagaaaactatttgcacacaacagattttagatactttttgctgctagttgtgtaatatttattgaacattttgacaaatatttatttttgtaagcctaaaaatgattctttgaaagtttaaagaaacttgaccaaaagacagtacaaaaaacactggcacttgaatgttgaatgtcaccgtatgtgaaataatatattttggggtagtgtgagcttttaatgttaagtctgttaaacttgagtcaaattaagcagacccggcattggcaatgtagctgtaattttctgacaaaatttaagacaaaattgtcaacttgaaactaaaacatgccaaggttttgatatacttgtcttaagatattaatgaaacacttctgaacactgataggaagtgtccacatccacaaagtttctcttgagttttgttatgtgttttgttgtgtttgattttcagtgattgtctggtatatttacagtcctcaaacatggttatttctgtcagtgacttaacattcggttttatcagccagcagtattcttcagtaaataaagaatggaattgctgaatgtaatcattgaacctcgagtcactgtaaaagttcagtaattgcttattgtattagttttagatgctggcactgcatgtgctctgtttattctgattttactaaaataaaaagttcaaaagtc

SEQ ID NO: 125205 - DNA, 2709 bp, Homo sapiens
  Payload ID: 4576
  Gene Symbol: DDX3Y
  Gene Name: DEAD (Asp-Glu-Ala-Asp) box helicase 3, Y-linked
  Uniprot ID: O15523
  ENST ID: ENST00000360160
  CDS Start-End: 310-2292
agaggggtctggagttcctaggtgaaccccagcagcctaaccctgtcaagtctgtcgagcctctggctggtcacacgtgctgcggaatccactcagctttcctcaggtgcagtcaggtccatcctgcagagggaccttctgcggacctgttctttcacctccctaacctgaagattgtattcaaaccaccgtggatcgctcacgtaaaatggtcactgcgcctaacacctgggatcccgtaacccttatctatcttggcttcagagagttttttgactagttccaactttgctgaagcttgtcaaagggatgagtcatgtggtggtgaaaaatgaccctgaactggaccagcagcttgctaatctggacctgaactctgaaaaacagagtggaggagcaagtacagcgagcaaagggcgctatatacctcctcacttaaggaacagagaagcatctaaaggattccatgataaagacagttcaggttggagttgcagcaaagataaggatgcatatagcagttttgggtctcgagattctagaggaaagcctggttatttcagtgaacgtggaagtggatcaaggggaagatttgatgatcgtggacggagtgactatgatggtattggcaatcgtgaaagacctggctttggcagatttgaacggagtggacatagtcgttggtgtgacaagtcagttgaagatgattggtcaaaaccacttccaccaagtgaacgcttggagcaagaactgttttctggaggaaacacggggattaactttgagaaatatgatgatataccagtagaggcaaccggcagtaactgtcctccacatattgagaattttagcgatattgacatgggagaaattatcatggggaacattgaacttactcgctatactcgtcctactccagtgcaaaaacatgccattcctattattaagggaaaaagagacttaatggcttgtgcccaaacaggatctgggaaaactgcagcatttcttttacccatactgagtcagatatatacagatggtccaggagaagctttgaaggctgtgaaggaaaatggaaggtatgggcgccgcaaacaatatccaatatccttggttttagccccaacaagagaattggctgtacagatctatgaggaagccagaaaattttcctaccgatctagagttcgtccttgtgtagtttatggtggtgctgatattggtcagcagattcgggacttagaacgtggatgccacttgttagtagccactccaggacgtctagtggatatgatggaaagaggaaagattggattagacttctgcaagtacttagtgttggatgaagctgataggatgctggatatgggatttgaacctcagatacgtcgtatagttgaacaagatactatgccaccaaagggcgttcgtcacaccatgatgtttagtgctacttttcctaaggaaatacagatgcttgctcgtgactttttggatgaatatatctttttggctgtaggcagagtaggctctacctctgagaacatcacacagaaagtagtttgggtggaagacttagataaacggtcatttctactggacattttaggtgcaacagggagtgattcacttactttagtgtttgtggagaccaaaaagggagcagattccctggaggatttcttataccatgaaggatatgcttgtactagtattcatggagaccggtcacagagagatcgagaggaggcccttcaccagtttcgctcaggaaaaagcccaattctagtggctacagctgtggcagcacgaggactagacatttcaaatgtgagacatgttatcaattttgatttgccaagtgatattgaagaatatgtgcatcgtattggccgtacaggacgtgtaggaaacctgggccttgccacctcattctttaatgaaaaaaatatgaatattacaaaggatttgttggatcttcttgtagaagctaaacaagaagtgccttcttggttggaaaatatggcttatgaacaccactacaagggtggcagtcgtggacgatctaaaagtaatagattcagtggaggatttggtgccagagactatcgacaaagtagtggttccagcagttctggctttggtgctagtcgcggaagcagcagccgcagtggtggaggtggttacggcaacagcagaggatttggtggaggtggctatggaggcttctacaatagtgatggatatggaggaaattataactcccagggggttgactggtggggcaactgaatctgctttgcagcaaagtcacccttacaaagaagctaatatggaaaccacatgtaacttagccagactatattgtgtagcttcaagaacttgcagtacattaccagctgtgattctcctgataattcaagggagctcaaagtcacaagaagaaaaatgaaaggaaaaaacagcagccctattcagaaattggtttgaagatgtaattgctctagtttggattaaactcttcccctcctgctttagtgccaccccaaactgcatttataattttgtgactgaggatcgtttgtttgttaacgtactgtgactttaactttagacaacttactactttgatgtcctgttggctcagtaatgctcacgataccaattgttttgacaaaataaatttactaaacttggcctaaaatcaaa

SEQ ID NO: 125206 - DNA, 1049 bp, Homo sapiens
  Payload ID: 4576
  Gene Symbol: DDX3Y
  Gene Name: DEAD (Asp-Glu-Ala-Asp) box helicase 3, Y-linked
  ENST ID: ENST00000454054
  CDS Start-End: 377-1049
ggagttcctaggtgaaccccagcagcctaaccctgtcaagtctgtcgagcctctggctggtcacacgtgctgcggaatccactcagctttcctcaggtgcagtcaggtccatcctgcagagggaccttctgcggacctgttctttcacctccctaacctgaagattgtattcaaaccaccgtggatcgctcacgtaaaatggtcactgcgcctaacacctgggatcccgtaacccttatctatcttggcttcagagagttttttgactagttccaactttgctgaagcttgtcaaagctgtaggtccagtgtaagagttccgctattcggtctcacacctacagtggactacccgatttttcgcttctcttcagggatgagtcatgtggtggtgaaaaatgaccctgaactggaccagcagcttgctaatctggacctgaactctgaaaaacagagtggaggagcaagtacagcgagcaaagggcgctatatacctcctcacttaaggaacagagaagcatctaaaggattccatgataaagacagttcaggttggagttgcagcaaagataaggatgcatatagcagttttgggtctcgagattctagaggaaagcctggttatttcagtgaacgtggaagtggatcaaggggaagatttgatgatcgtggacggagtgactatgatggtattggcaatcgtgaaagacctggctttggcagatttgaacggagtggacatagtcgttggtgtgacaagtcagttgaagatgattggtcaaaaccacttccaccaagtgaacgcttggagcaagaactgttttctggaggaaacacggggattaactttgagaaatatgatgatataccagtagaggcaaccggcagtaactgtcctccacatattgagaattttagcgatattgacatgggagaaattatcatggggaacattgaacttactcgctatactcgtcctactccagtgcaaaaacatgccattcctattattaagggaaaaagagacttaatggcttgtgcccaaacag

SEQ ID NO: 125207 - DNA, 792 bp, Homo sapiens
  Payload ID: 4576
  Gene Symbol: DDX3Y
  Gene Name: DEAD (Asp-Glu-Ala-Asp) box helicase 3, Y-linked
  ENST ID: ENST00000440554
  CDS Start-End: 43-792
gaaggatggctgccgcgtgcttctcttgaccctgtagaaataatggaaattggacgcccgcggaaagacacctggaagcttgctaatctggacctgaactctgaaaaacagagtggaggagcaagtacagcgagcaaagggcgctatatacctcctcacttaaggaacagagaagcatctaaaggattccatgataaagacagttcaggttggagttgcagcaaagataaggatgcatatagcagttttgggtctcgagattctagaggaaagcctggttatttcagtgaacgtggaagtggatcaaggggaagatttgatgatcgtggacggagtgactatgatggtattggcaatcgtgaaagacctggctttggcagatttgaacggagtggacatagtcgttggtgtgacaagtcagttgaagatgattggtcaaaaccacttccaccaagtgaacgcttggagcaagaactgttttctggaggaaacacggggattaactttgagaaatatgatgatataccagtagaggcaaccggcagtaactgtcctccacatattgagaattttagcgatattgacatgggagaaattatcatggggaacattgaacttactcgctatactcgtcctactccagtgcaaaaacatgccattcctattattaagggaaaaagagacttaatggcttgtgcccaaacaggatctgggaaaactgcagcatttcttttacccatactgagtcagatatatacagatggtccaggagaagctttgaaggctgtgaag

SEQ ID NO: 125208 - DNA, 2783 bp, Homo sapiens
  Payload ID: 4577
  Gene Symbol: DDX42
  Gene Name: DEAD (Asp-Glu-Ala-Asp) box helicase 42
  Uniprot ID: Q86XP3
  ENST ID: ENST00000359353
  CDS Start-End: 324-2783
aacgggccgtgaggcggtggcggtggtggcggtggcggcggcggtggtggtggtggcggcggcggcggcgaagggggcggagaggaaggagcgcggcgggaccgggccgggacagcgcgtactttgggctccgggattcgctccgcgcccgcggttgtagcagctgccgctgcagccatagcagcagctattttgaagatgaggaagaagattctagcaacgttgatttaccttacattcctgctgaaaactcaccaactcgccagcaattccattccaagccagtagattctgacagcgatgatgatcccttggaggcattcatggctgaagtggaggatcaggcagctagagacatgaagaggcttgaagaaaaggacaaggaaagaaaaaacgtaaagggtattcgagatgacattgaagaggaagatgaccaagaagcttattttcgatacatggcagaaaacccaactgctggtgtggttcaggaggaagaggaagacaatctagaatatgatagtgacggaaatccaattgcacctaccaaaaaaatcattgatcctcttccccccattgatcattcagagattgactatccaccatttgaaaaaaacttttacaatgagcatgaagagataaccaacctcactccacagcagttaatagatctccggcataagctcaatcttcgggtctctggtgctgcacctcctagaccaggaagtagctttgctcattttgggtttgacgaacaacttatgcaccagattcggaaatctgaatacacacagcccactccaatacagtgccagggtgtgcctgtggcattaagtggtagagacatgattggtattgccaaaacaggtagtgggaaaactgcagccttcatttggcccatgttgattcatataatggaccagaaggagttggaaccaggtgatggaccaattgcagtgattgtgtgtcctaccagggagctttgccagcagatccatgcagaatgtaagcggtttggaaaagcatataatcttcgatcagtggccgtatatggaggagggagtatgtgggagcaggccaaggcccttcaggagggggcagagattgttgtgtgtaccccaggtcgactgatagatcatgtgaaaaagaaagctaccaatcttcaaagagtctcttaccttgtgtttgatgaagcagatcgaatgtttgacatgggatttgagtaccaagttcgatccatagcaagtcatgttcgtcctgacaggcagactctcttatttagtgcaacttttcggaagaagattgaaaagttggccagagacatcctgatcgaccctattcgagtggtgcagggagatattggagaggcaaatgaagatgtgacacagattgtggagattctccattctggacctagtaaatggaactggcttacccggcgtctggtagaatttacctcttcagggagtgtcctcctctttgttactaaaaaagccaatgctgaagagctagcgaataaccttaaacaggagggtcataatcttgggctgctccatggggatatggatcagagtgagagaaacaaggtcatttcagactttaagaaaaaggacatcccagtcctggtggccacagatgttgcagcccgtggtctggacattccttcaattaagactgtcattaactatgatgtggcacgagacattgatacccacacgcataggattggccgcacaggaagagcgggtgagaaaggtgtggcctataccctactcactcccaaggacagcaattttgctggtgacctggtccggaacttggaaggagccaatcaacacgtttctaaggaactcctagatctggcaatgcagaatgcctggtttcggaaatctcgattcaaaggagggaaaggaaaaaagctgaacattggtggaggaggcctaggctacagggagcggcctggcctgggctctgagaacatggatcgaggaaataacaatgtaatgagcaattatgaggcctacaagccttccacaggagctatgggagatcgactaacggcaatgaaagcagctttccagtcacagtacaagagtcactttgttgcagccagtttaagtaatcagaaggctggaagttctgctgctggggcaagtgggtggactagtgcagggagcttgaattctgttccaactaactcagcacaacagggccataacagtcctgacagccccgtcaccagtgccgccaagggcatcccaggctttggcaatactggcaacatcagtggtgcccctgtgacctacccgtctgccggagcccaaggagtcaacaacacagcttcagggaataacagccgagaagggactgggggcagcaacgggaaaagagagagatatactgagaaccggggcagcagccgtcacagtcacggagagactggcaatcggcatagcgatagtccacgtcacggagatggtggtcgccatggagatggataccgccatccagaaagcagcagccgtcatactgatggccatcggcacggggagaacagacatggaggaagcgcaggccggcatggggagaaccggggtgcaaatgatggtcggaatggggaaagcaggaaagaagcttttaatcgtgagagcaagatggagcccaagatggaacccaaagtggacagcagcaagatggacaaggtggacagcaagacagataagacagctgacggctttgctgtcccagagccgcctaaacgcaagaaaagtcgatgggacagttag

SEQ ID NO: 125209 - DNA, 3939 bp, Homo sapiens
  Payload ID: 4577
  Gene Symbol: DDX42
  Gene Name: DEAD (Asp-Glu-Ala-Asp) box helicase 42
  Uniprot ID: Q86XP3
  ENST ID: ENST00000389924
  CDS Start-End: 205-3021
caacgggccgtgaggcggtggcggtggtggcggtggcggcggcggtggtggtggtggcggcggcggcggcgaagggggcggagaggaaggagcgcggcgggaccgggccgggacagcgcgtactttgggctccgggattcgctccgcgcccgcggttgtagcagctgccgctgcagccatagcagcaggtcagtcattggcaccatgaactggaataaaggtggtcctggcactaagcgaggatttggctttggaggttttgccatcagtgctgggaaaaaggaggaacccaaactcccacagcagtcccacagtgcctttggggcaaccagctcttcttctggatttggaaagtcagctccaccacagcttccttctttctacaaaattggatctaagcgggccaactttgatgaagaaaatgcctattttgaagatgaggaagaagattctagcaacgttgatttaccttacattcctgctgaaaactcaccaactcgccagcaattccattccaagccagtagattctgacagcgatgatgatcccttggaggcattcatggctgaagtggaggatcaggcagctagagacatgaagaggcttgaagaaaaggacaaggaaagaaaaaacgtaaagggtattcgagatgacattgaagaggaagatgaccaagaagcttattttcgatacatggcagaaaacccaactgctggtgtggttcaggaggaagaggaagacaatctagaatatgatagtgacggaaatccaattgcacctaccaaaaaaatcattgatcctcttccccccattgatcattcagagattgactatccaccatttgaaaaaaacttttacaatgagcatgaagagataaccaacctcactccacagcagttaatagatctccggcataagctcaatcttcgggtctctggtgctgcacctcctagaccaggaagtagctttgctcattttgggtttgacgaacaacttatgcaccagattcggaaatctgaatacacacagcccactccaatacagtgccagggtgtgcctgtggcattaagtggtagagacatgattggtattgccaaaacaggtagtgggaaaactgcagccttcatttggcccatgttgattcatataatggaccagaaggagttggaaccaggtgatggaccaattgcagtgattgtgtgtcctaccagggagctttgccagcagatccatgcagaatgtaagcggtttggaaaagcatataatcttcgatcagtggccgtatatggaggagggagtatgtgggagcaggccaaggcccttcaggagggggcagagattgttgtgtgtaccccaggtcgactgatagatcatgtgaaaaagaaagctaccaatcttcaaagagtctcttaccttgtgtttgatgaagcagatcgaatgtttgacatgggatttgagtaccaagttcgatccatagcaagtcatgttcgtcctgacaggcagactctcttatttagtgcaacttttcggaagaagattgaaaagttggccagagacatcctgatcgaccctattcgagtggtgcagggagatattggagaggcaaatgaagatgtgacacagattgtggagattctccattctggacctagtaaatggaactggcttacccggcgtctggtagaatttacctcttcagggagtgtcctcctctttgttactaaaaaagccaatgctgaagagctagcgaataaccttaaacaggagggtcataatcttgggctgctccatggggatatggatcagagtgagagaaacaaggtcatttcagactttaagaaaaaggacatcccagtcctggtggccacagatgttgcagcccgtggtctggacattccttcaattaagactgtcattaactatgatgtggcacgagacattgatacccacacgcataggattggccgcacaggaagagcgggtgagaaaggtgtggcctataccctactcactcccaaggacagcaattttgctggtgacctggtccggaacttggaaggagccaatcaacacgtttctaaggaactcctagatctggcaatgcagaatgcctggtttcggaaatctcgattcaaaggagggaaaggaaaaaagctgaacattggtggaggaggcctaggctacagggagcggcctggcctgggctctgagaacatggatcgaggaaataacaatgtaatgagcaattatgaggcctacaagccttccacaggagctatgggagatcgactaacggcaatgaaagcagctttccagtcacagtacaagagtcactttgttgcagccagtttaagtaatcagaaggctggaagttctgctgctggggcaagtgggtggactagtgcagggagcttgaattctgttccaactaactcagcacaacagggccataacagtcctgacagccccgtcaccagtgccgccaagggcatcccaggctttggcaatactggcaacatcagtggtgcccctgtgacctacccgtctgccggagcccaaggagtcaacaacacagcttcagggaataacagccgagaagggactgggggcagcaacgggaaaagagagagatatactgagaaccggggcagcagccgtcacagtcacggagagactggcaatcggcatagcgatagtccacgtcacggagatggtggtcgccatggagatggataccgccatccagaaagcagcagccgtcatactgatggccatcggcacggggagaacagacatggaggaagcgcaggccggcatggggagaaccggggtgcaaatgatggtcggaatggggaaagcaggaaagaagcttttaatcgtgagagcaagatggagcccaagatggaacccaaagtggacagcagcaagatggacaaggtggacagcaagacagataagacagctgacggctttgctgtcccagagccgcctaaacgcaagaaaagtcgatgggacagttagaggggatgtgctaaagcgtgaaatcagttgtccttaatttttagaaagattttggtaactaggtgtctcagggctgggttggggtccaaagtgtaaggaccccctgcccttagtggagagctggagcttggagacattaccccttcatcagaaggaattttcggatgttttcttgggaagctgttttggtccttggaagcagtgagagctgggaagcttcttttggctctaggtgagttgtcatgtgggtaagttgaggttatcttgggataaagggtcttctagggcacaaaactcactctaggtttatattgtatgtagcttatattttttactaaggtgtcaccttataagcatctataaattgacttctttttcttagttgtatggccaggcagtccccattttaggagttggcttctgcaaattcaatccattgagctaactgttggggagcaatttggtagttgtagacatttgcagggaagggagatgtctgattctaaatgggagttgatgctcaggtccccagccaggtttgcatccagccctgagacatgtaggaaacacctttcagacccaggctctgaagattcccagaagccacaaggattgaagggaaaaggtgatcctggtaactgttccaggattgctccaggtttgagatggtattgctaaatttaaaattaaacaagaaacccaacaacagcttttaaagtgtcttctatctcattgtattttttttaacttgccccaatgatagaaaagtcttttgctgaaatgattttgatgatttttgtttatcgtttataaaaaggaaaagaaatatacaaactttgacttttgtgactttgtgaaggtttctttaagatgtgcattcctttctgcttgctctctagtaaatgttttactaccggg

SEQ ID NO: 125210 - DNA, 3323 bp, Homo sapiens
  Payload ID: 4577
  Gene Symbol: DDX42
  Gene Name: DEAD (Asp-Glu-Ala-Asp) box helicase 42
  ENST ID: ENST00000457800
  CDS Start-End: 18-2144
atcccttggaggcattcatggctgaagtggaggatcaggcagctagagacatgaagaggcttgaagaaaaggacaaggaaagaaaaaacgtaaagggtattcgagatgacattgaagaggaagatgaccaagaagcttattttcgatacatggcagaaaacccaactgctggtgtggttcaggaggaagaggaagacaatctagaatatgatagtgacggaaatccaattgcacctaccaaaaaaatcattgatcctcttccccccattgatcattcagagattgactatccaccatttgaaaaaaacttttacaatgagcatgaagagataaccaacctcactccacagcagttaatagatctccggcataagctcaatcttcgggtctctggtgctgcacctcctagaccaggaagtagctttgctcattttgggtttgacgaacaacttatgcaccagattcggaaatctgaatacacacagcccactccaatacagtgccagggtgtgcctgtggcattaagtggtagagacatgattggtattgccaaaacaggtagtgggaaaactgcagccttcatttggcccatgttgattcatataatggaccagaaggagttggaaccaggtgatggaccaattgcagtgattgtgtgtcctaccagggagctttgccagcagatccatgcagaatgtaagcggtttggaaaagcatataatcttcgatcagtggccgtatatggaggagggagtatgtgggagcaggccaaggcccttcaggagggggcagagattgttgtgtgtaccccaggtcgactgatagatcatgtgaaaaagaaagctaccaatcttcaaagagtctcttaccttgtgtttgatgaagcagatcgaatgtttgacatgggatttgagtaccaagttcgatccatagcaagtcatgttcgtcctgacaggcagactctcttatttagtgcaacttttcggaagaagattgaaaagttggccagagacatcctgatcgaccctattcgagtggtgcagggagatattggagaggcaaatgaagatgtgacacagattgtggagattctccattctggacctagtaaatggaactggcttacccggcgtctggtagaatttacctcttcagggagtgtcctcctctttgttactaaaaaagccaatgctgaagagctagcgaataaccttaaacaggagggtcataatcttgggctgctccatggggatatggatcagagtgagagaaacaaggtcatttcagactttaagaaaaaggacatcccagtcctggtggccacagatgttgcagcccgtggtctggacattccttcaattaagactgtcattaactatgatgtggcacgagacattgatacccacacgcataggattggccgcacaggaagagcgggtgagaaaggtgtggcctataccctactcactcccaaggacagcaattttgctggtgacctggtccggaacttggaaggagccaatcaacacgtttctaaggaactcctagatctggcaatgcagaatgcctggtttcggaaatctcgattcaaaggagggaaaggaaaaaagctgaacattggtggaggaggcctaggctacagggagcggcctggcctgggctctgagaacatggatcgaggaaataacaatgtaatgagcaattatgaggcctacaagccttccacaggagctatgggagatcgactaacggcaatgaaagcagctttccagtcacagtacaagagtcactttgttgcagccagtttaagtaatcagaaggctggaagttctgctgctggggcaagtgggtggactagtgcagggagcttgaattctgttccaactaactcagcacaacagggccataacagtcctgacagccccgtcaccagtgccgccaagggcatcccaggctttggcaatactggcaacatcagtggtgcccctgtgacctacccgtctgccggagcccaaggagtcaacaacacagcttcagggaataacagccgagaagggactgggggcagcaacgggaaaagagagagatatactgagaaccggggcagcccgtcacagtcacggagagactggcaatcggcatagcgatagtccacgtcacggagatggtggtcgccatggagatggataccgccatccagaaagcagcagccgtcatactgatggccatcggcacggggagaacagacatggaggaagcgcaggccggcatggggagaaccggggtgcaaatgatggtcggaatggggaaagcaggaaagaagcttttaatcgtgagagcaagatggagcccaagatggaacccaaagtggacagcagcaagatggacaaggtggacagcaagacagataagacagctgacggctttgctgtcccagagccgcctaaacgcaagaaaagtcgatgggacagttagaggggatgtgctaaagcgtgaaatcagttgtccttaatttttagaaagattttggtaactaggtgtctcagggctgggttggggtccaaagtgtaaggaccccctgcccttagtggagagctggagcttggagacattaccccttcatcagaaggaattttcggatgttttcttgggaagctgttttggtccttggaagcagtgagagctgggaagcttcttttggctctaggtgagttgtcatgtgggtaagttgaggttatcttgggataaagggtcttctagggcacaaaactcactctaggtttatattgtatgtagcttatattttttactaaggtgtcaccttataagcatctataaattgacttctttttcttagttgtatggccaggcagtccccattttaggagttggcttctgcaaattcaatccattgagctaactgttggggagcaatttggtagttgtagacatttgcagggaagggagatgtctgattctaaatgggagttgatgctcaggtccccagccaggtttgcatccagccctgagacatgtaggaaacacctttcagacccaggctctgaagattcccagaagccacaaggattgaagggaaaaggtgatcctggtaactgttccaggattgctccaggtttgagatggtattgctaaatttaaaattaaacaagaaacccaacaacagcttttaaagtgtcttctatctcattgtattttttttaacttgccccaatgatagaaaagtcttttgctgaaatgattttgatgatttttgtttatcgtttataaaaaggaaaagaaatatacaaactttgacttttgtg

SEQ ID NO: 125211 - DNA, 1427 bp, Homo sapiens
  Payload ID: 4577
  Gene Symbol: DDX42
  Gene Name: DEAD (Asp-Glu-Ala-Asp) box helicase 42
  ENST ID: ENST00000577940
  CDS Start-End: 1-298
tgatcccttggaggcattcatggctgaagtggaggatcaggcagctagagacatgaagaggcttgaagaaaaggacaaggaaagaaaaaacgtaaagggtattcgagatgacattgaagaggaagatgaccaagaagcttattttcgatacatggcagaaaacccaactgctggtgtggttcaggaggaagaggaagacaatctagaatatgatagtgacggaaatccaattgcacctaccaaaaaaatcattgatcctcttccccccattgatcattcagagactaactttgaataattggacctgcagattgactatccaccatttgaaaaaaacttttacaatgagcatgaagagataaccaacctcactccacagcagttaatagatctccggcataagctcaatcttcgggtctctggtgctgcacctcctagaccaggaagtagctttgctcattttgggtttgacgaacaacttatgcaccagattcggaaatctgaatacacacagcccactccaatacagtgccagggtgtgcctgtggcattaagtggtagagacatgattggtattgccaaaacaggtagtgggaaaactgcagccttcatttggcccatgttgattcatataatggaccagaaggagttggaaccaggtgatggaccaattgcagtgattgtgtgtcctaccagggagctttgccagcagatccatgcagaatgtaagcggtttggaaaagcatataatcttcgatcagtggccgtatatggaggagggagtatgtgggagcaggccaaggcccttcaggagggggcagagattgttgtgtgtaccccaggtcgactgatagatcatgtgaaaaagaaagctaccaatcttcaaagagtctcttaccttgtgtttgatgaagcagatcgaatgtttgacatgggatttgagtaccaagttcgatccatagcaagtcatgttcgtcctgacaggcagactctcttatttagtgcaacttttcggaagaagattgaaaagttggccagagacatcctgatcgaccctattcgagtggtgcagggagatattggagaggcaaatgaagatgtgacacagattgtggagattctccattctggacctagtaaatggaactggcttacccggcgtctggtagaatttacctcttcagggagtgtcctcctctttgttactaaaaaagccaatgctgaagagctagcgaataaccttaaacaggagggtcataatcttgggctgctccatggggatatggatcagagtgagagaaacaaggtcatttcagactttaagaaaaaggacatcccagtcctggtggccacagatgttgcagcccgtggtctggacattccttcaattaagactgtcattaactatgatgtggcacgagacattg

SEQ ID NO: 125212 - DNA, 510 bp, Homo sapiens
  Payload ID: 4577
  Gene Symbol: DDX42
  Gene Name: DEAD (Asp-Glu-Ala-Asp) box helicase 42
  ENST ID: ENST00000584261
  CDS Start-End: 1-212
gccagcaattccattccaagccagtagattctgacagcgatgatgatcccttggaggcattcatggctgaagtggaggatcaggcagctagagacatgaagaggcttgaagaaaaggacaaggaaagaaaaaacgtaaagaagcttattttcgatacatggcagaaaacccaactgctggtgtggttcaggaggaagaggaagacaatctagaatatgatagtgacggaaatccaattgcacctaccaaaaaaatcattgatcctcttccccccattgatcattcagagattgactatccaccatttgaaaaaaacttttacaatgagcatgaagagataaccaacctcactccacagcagttaatagatctccggcataagctcaatcttcgggtctctggtgctgcacctcctagaccaggaagtagctttgctcattttgggtttgacgaacaacttatgcaccagattcggaaatctgaatacacacagcccactccaatacagtg

SEQ ID NO: 125213 - DNA, 857 bp, Homo sapiens
  Payload ID: 4577
  Gene Symbol: DDX42
  Gene Name: DEAD (Asp-Glu-Ala-Asp) box helicase 42
  ENST ID: ENST00000578137
  CDS Start-End: 13-492
gtcattggcaccatgaactggaataaaggtggtcctggcactaagcgaggatttggctttggaggttttgccatcagtgctgggaaaaaggaggaacccaaactcccacagcagtcccacagtgcctttggggcaaccagctcttcttctggatttggaaagtcagctccaccacagcttccttctttctacaaaattggatctaagcgggccaactttgatgaagaaaatgcctattttgaagatgaggaagaagattctagcaacgttgatttaccttacattcctgctgaaaactcaccaactcgccagcaattccattccaagccagtagattctgacagcgatgatgatcccttggaggcattcatggctgaagtggaggatcaggcagctagagacatgaagaggcttgaagaaaaggacaaggaaagaaaaaacgtaaatgttgagagttcctgtgctgtgtggaattcaacactaatctgctgaagcttattttcgatacatggcagaaaacccaactgctggtgtggttcaggaggaagaggaagacaatctagaatatgatagtgacggaaatccaattgcacctaccaaaaaaatcattgatcctcttccccccattgatcattcagagattgactatccaccatttgaaaaaaacttttacaatgagcatgaagagataaccaacctcactccacagcagttaatagatctccggcataagctcaatcttcgggtaagcatcattaagctcaatattcttaatattaatgttaattagtccagatttagtattattggttatctaaactaataaccttgaatttcttttctaatggtctctgaac

SEQ ID NO: 125214 - DNA, 4148 bp, Homo sapiens
  Payload ID: 4577
  Gene Symbol: DDX42
  Gene Name: DEAD (Asp-Glu-Ala-Asp) box helicase 42
  Uniprot ID: Q86XP3
  ENST ID: ENST00000583590
  CDS Start-End: 413-3229
atatgcaacagtttaaactataggcatgttcatgtaaatatggtttctgtccaacccgttttctcttgggatttttggctagccccttgacgccactttttcttcattcgcagacccactttctagatgggtcatgaacactgtccacccaactgcagtttcccgtcagagtatctgaggagcctgtgaggcgttctggagctttaagcaacgggccgtgaggcggtggcggtggtggcggtggcggcggcggtggtggtggtggcggcggcggcggcgaagggggcggagaggaaggagcgcggcgggaccgggccgggacagcgcgtactttgggctccgggattcgctccgcgcccgcggttgtagcagctgccgctgcagccatagcagcaggtcagtcattggcaccatgaactggaataaaggtggtcctggcactaagcgaggatttggctttggaggttttgccatcagtgctgggaaaaaggaggaacccaaactcccacagcagtcccacagtgcctttggggcaaccagctcttcttctggatttggaaagtcagctccaccacagcttccttctttctacaaaattggatctaagcgggccaactttgatgaagaaaatgcctattttgaagatgaggaagaagattctagcaacgttgatttaccttacattcctgctgaaaactcaccaactcgccagcaattccattccaagccagtagattctgacagcgatgatgatcccttggaggcattcatggctgaagtggaggatcaggcagctagagacatgaagaggcttgaagaaaaggacaaggaaagaaaaaacgtaaagggtattcgagatgacattgaagaggaagatgaccaagaagcttattttcgatacatggcagaaaacccaactgctggtgtggttcaggaggaagaggaagacaatctagaatatgatagtgacggaaatccaattgcacctaccaaaaaaatcattgatcctcttccccccattgatcattcagagattgactatccaccatttgaaaaaaacttttacaatgagcatgaagagataaccaacctcactccacagcagttaatagatctccggcataagctcaatcttcgggtctctggtgctgcacctcctagaccaggaagtagctttgctcattttgggtttgacgaacaacttatgcaccagattcggaaatctgaatacacacagcccactccaatacagtgccagggtgtgcctgtggcattaagtggtagagacatgattggtattgccaaaacaggtagtgggaaaactgcagccttcatttggcccatgttgattcatataatggaccagaaggagttggaaccaggtgatggaccaattgcagtgattgtgtgtcctaccagggagctttgccagcagatccatgcagaatgtaagcggtttggaaaagcatataatcttcgatcagtggccgtatatggaggagggagtatgtgggagcaggccaaggcccttcaggagggggcagagattgttgtgtgtaccccaggtcgactgatagatcatgtgaaaaagaaagctaccaatcttcaaagagtctcttaccttgtgtttgatgaagcagatcgaatgtttgacatgggatttgagtaccaagttcgatccatagcaagtcatgttcgtcctgacaggcagactctcttatttagtgcaacttttcggaagaagattgaaaagttggccagagacatcctgatcgaccctattcgagtggtgcagggagatattggagaggcaaatgaagatgtgacacagattgtggagattctccattctggacctagtaaatggaactggcttacccggcgtctggtagaatttacctcttcagggagtgtcctcctctttgttactaaaaaagccaatgctgaagagctagcgaataaccttaaacaggagggtcataatcttgggctgctccatggggatatggatcagagtgagagaaacaaggtcatttcagactttaagaaaaaggacatcccagtcctggtggccacagatgttgcagcccgtggtctggacattccttcaattaagactgtcattaactatgatgtggcacgagacattgatacccacacgcataggattggccgcacaggaagagcgggtgagaaaggtgtggcctataccctactcactcccaaggacagcaattttgctggtgacctggtccggaacttggaaggagccaatcaacacgtttctaaggaactcctagatctggcaatgcagaatgcctggtttcggaaatctcgattcaaaggagggaaaggaaaaaagctgaacattggtggaggaggcctaggctacagggagcggcctggcctgggctctgagaacatggatcgaggaaataacaatgtaatgagcaattatgaggcctacaagccttccacaggagctatgggagatcgactaacggcaatgaaagcagctttccagtcacagtacaagagtcactttgttgcagccagtttaagtaatcagaaggctggaagttctgctgctggggcaagtgggtggactagtgcagggagcttgaattctgttccaactaactcagcacaacagggccataacagtcctgacagccccgtcaccagtgccgccaagggcatcccaggctttggcaatactggcaacatcagtggtgcccctgtgacctacccgtctgccggagcccaaggagtcaacaacacagcttcagggaataacagccgagaagggactgggggcagcaacgggaaaagagagagatatactgagaaccggggcagcagccgtcacagtcacggagagactggcaatcggcatagcgatagtccacgtcacggagatggtggtcgccatggagatggataccgccatccagaaagcagcagccgtcatactgatggccatcggcacggggagaacagacatggaggaagcgcaggccggcatggggagaaccggggtgcaaatgatggtcggaatggggaaagcaggaaagaagcttttaatcgtgagagcaagatggagcccaagatggaacccaaagtggacagcagcaagatggacaaggtggacagcaagacagataagacagctgacggctttgctgtcccagagccgcctaaacgcaagaaaagtcgatgggacagttagaggggatgtgctaaagcgtgaaatcagttgtccttaatttttagaaagattttggtaactaggtgtctcagggctgggttggggtccaaagtgtaaggaccccctgcccttagtggagagctggagcttggagacattaccccttcatcagaaggaattttcggatgttttcttgggaagctgttttggtccttggaagcagtgagagctgggaagcttcttttggctctaggtgagttgtcatgtgggtaagttgaggttatcttgggataaagggtcttctagggcacaaaactcactctaggtttatattgtatgtagcttatattttttactaaggtgtcaccttataagcatctataaattgacttctttttcttagttgtatggccaggcagtccccattttaggagttggcttctgcaaattcaatccattgagctaactgttggggagcaatttggtagttgtagacatttgcagggaagggagatgtctgattctaaatgggagttgatgctcaggtccccagccaggtttgcatccagccctgagacatgtaggaaacacctttcagacccaggctctgaagattcccagaagccacaaggattgaagggaaaaggtgatcctggtaactgttccaggattgctccaggtttgagatggtattgctaaatttaaaattaaacaagaaacccaacaacagcttttaaagtgtcttctatctcattgtattttttttaacttgccccaatgatagaaaagtcttttgctgaaatgattttgatgatttttgtttatcgtttataaaaaggaaaagaaatatacaaactttgacttttgtgactttgtgaaggtttctttaagatgtgcattcctttctgcttgctctctagtaaatgttttactaccggga

SEQ ID NO: 125215 - DNA, 4337 bp, Homo sapiens
  Payload ID: 4577
  Gene Symbol: DDX42
  Gene Name: DEAD (Asp-Glu-Ala-Asp) box helicase 42
  Uniprot ID: Q86XP3
  ENST ID: ENST00000578681
  CDS Start-End: 602-3418
caagagtgtcgctctagtagtatatgcaacagtttaaactataggcatgttcatgtaaatatggtttctgtccaacccgttttctcttgggatttttggctagccccttgacgccactttttcttcattcgcagacccactttctagatgggtcatgaacactgtccacccaactgcagtttcccgtcagagtatctgaggagcctgtgaggcgttctggagctttaaggtcaggcgccttccgggagccgtagccccggccccgcccttctgcccgcgcgttcctcactgcgcatgtcgcgtttttgttcccctccccccttcagcaacgggccgtgaggcggtggcggtggtggcggtggcggcggcggtggtggtggtggcggcggcggcggcgaagggggcggagaggaaggagcgcggcgggaccgggccgggacagcgcgtactttgggctccgggattcgctccgcgcccgcggttgtagcagctgccgctgcagccatagcagcaggacttcctcaagcgcagggactatgtcttaaggcgctttgcagagccaagctcatttctggcacataagaggtcagtcattggcaccatgaactggaataaaggtggtcctggcactaagcgaggatttggctttggaggttttgccatcagtgctgggaaaaaggaggaacccaaactcccacagcagtcccacagtgcctttggggcaaccagctcttcttctggatttggaaagtcagctccaccacagcttccttctttctacaaaattggatctaagcgggccaactttgatgaagaaaatgcctattttgaagatgaggaagaagattctagcaacgttgatttaccttacattcctgctgaaaactcaccaactcgccagcaattccattccaagccagtagattctgacagcgatgatgatcccttggaggcattcatggctgaagtggaggatcaggcagctagagacatgaagaggcttgaagaaaaggacaaggaaagaaaaaacgtaaagggtattcgagatgacattgaagaggaagatgaccaagaagcttattttcgatacatggcagaaaacccaactgctggtgtggttcaggaggaagaggaagacaatctagaatatgatagtgacggaaatccaattgcacctaccaaaaaaatcattgatcctcttccccccattgatcattcagagattgactatccaccatttgaaaaaaacttttacaatgagcatgaagagataaccaacctcactccacagcagttaatagatctccggcataagctcaatcttcgggtctctggtgctgcacctcctagaccaggaagtagctttgctcattttgggtttgacgaacaacttatgcaccagattcggaaatctgaatacacacagcccactccaatacagtgccagggtgtgcctgtggcattaagtggtagagacatgattggtattgccaaaacaggtagtgggaaaactgcagccttcatttggcccatgttgattcatataatggaccagaaggagttggaaccaggtgatggaccaattgcagtgattgtgtgtcctaccagggagctttgccagcagatccatgcagaatgtaagcggtttggaaaagcatataatcttcgatcagtggccgtatatggaggagggagtatgtgggagcaggccaaggcccttcaggagggggcagagattgttgtgtgtaccccaggtcgactgatagatcatgtgaaaaagaaagctaccaatcttcaaagagtctcttaccttgtgtttgatgaagcagatcgaatgtttgacatgggatttgagtaccaagttcgatccatagcaagtcatgttcgtcctgacaggcagactctcttatttagtgcaacttttcggaagaagattgaaaagttggccagagacatcctgatcgaccctattcgagtggtgcagggagatattggagaggcaaatgaagatgtgacacagattgtggagattctccattctggacctagtaaatggaactggcttacccggcgtctggtagaatttacctcttcagggagtgtcctcctctttgttactaaaaaagccaatgctgaagagctagcgaataaccttaaacaggagggtcataatcttgggctgctccatggggatatggatcagagtgagagaaacaaggtcatttcagactttaagaaaaaggacatcccagtcctggtggccacagatgttgcagcccgtggtctggacattccttcaattaagactgtcattaactatgatgtggcacgagacattgatacccacacgcataggattggccgcacaggaagagcgggtgagaaaggtgtggcctataccctactcactcccaaggacagcaattttgctggtgacctggtccggaacttggaaggagccaatcaacacgtttctaaggaactcctagatctggcaatgcagaatgcctggtttcggaaatctcgattcaaaggagggaaaggaaaaaagctgaacattggtggaggaggcctaggctacagggagcggcctggcctgggctctgagaacatggatcgaggaaataacaatgtaatgagcaattatgaggcctacaagccttccacaggagctatgggagatcgactaacggcaatgaaagcagctttccagtcacagtacaagagtcactttgttgcagccagtttaagtaatcagaaggctggaagttctgctgctggggcaagtgggtggactagtgcagggagcttgaattctgttccaactaactcagcacaacagggccataacagtcctgacagccccgtcaccagtgccgccaagggcatcccaggctttggcaatactggcaacatcagtggtgcccctgtgacctacccgtctgccggagcccaaggagtcaacaacacagcttcagggaataacagccgagaagggactgggggcagcaacgggaaaagagagagatatactgagaaccggggcagcagccgtcacagtcacggagagactggcaatcggcatagcgatagtccacgtcacggagatggtggtcgccatggagatggataccgccatccagaaagcagcagccgtcatactgatggccatcggcacggggagaacagacatggaggaagcgcaggccggcatggggagaaccggggtgcaaatgatggtcggaatggggaaagcaggaaagaagcttttaatcgtgagagcaagatggagcccaagatggaacccaaagtggacagcagcaagatggacaaggtggacagcaagacagataagacagctgacggctttgctgtcccagagccgcctaaacgcaagaaaagtcgatgggacagttagaggggatgtgctaaagcgtgaaatcagttgtccttaatttttagaaagattttggtaactaggtgtctcagggctgggttggggtccaaagtgtaaggaccccctgcccttagtggagagctggagcttggagacattaccccttcatcagaaggaattttcggatgttttcttgggaagctgttttggtccttggaagcagtgagagctgggaagcttcttttggctctaggtgagttgtcatgtgggtaagttgaggttatcttgggataaagggtcttctagggcacaaaactcactctaggtttatattgtatgtagcttatattttttactaaggtgtcaccttataagcatctataaattgacttctttttcttagttgtatggccaggcagtccccattttaggagttggcttctgcaaattcaatccattgagctaactgttggggagcaatttggtagttgtagacatttgcagggaagggagatgtctgattctaaatgggagttgatgctcaggtccccagccaggtttgcatccagccctgagacatgtaggaaacacctttcagacccaggctctgaagattcccagaagccacaaggattgaagggaaaaggtgatcctggtaactgttccaggattgctccaggtttgagatggtattgctaaatttaaaattaaacaagaaacccaacaacagcttttaaagtgtcttctatctcattgtattttttttaacttgccccaatgatagaaaagtcttttgctgaaatgattttgatgatttttgtttatcgtttataaaaaggaaaagaaatatacaaactttgacttttgtgactttgtgaaggtttctttaagatgtgcattcctttctgcttgctctctagtaaatgttttactaccggga

SEQ ID NO: 125216 - DNA, 589 bp, Homo sapiens
  Payload ID: 4577
  Gene Symbol: DDX42
  Gene Name: DEAD (Asp-Glu-Ala-Asp) box helicase 42
  ENST ID: ENST00000581135
  CDS Start-End: 276-589
atgcgagcggctcgtcagcgcctgcgcgcagcctgcggggcgggacgcaaccccggggaaagcgcgagacctccctctctcccgcccggctgaggcgaggtggggcttttgggaaaattacataatccccgcccctgggccggaactgccctcgcctatcccaatcctcctacctaggattccgtcaagttgacgtcacacggaaccggtgctccggaagctaaaggtggccatgctgtgtgggaccacgtggccagaggtcagtcattggcaccatgaactggaataaaggtggtcctggcactaagcgaggatttggctttggaggttttgccatcagtgctgggaaaaaggaggaacccaaactcccacagcagtcccacagtgcctttggggcaaccagctcttcttctggatttggaaagtcagctccaccacagcttccttctttctacaaaattggatctaagcgggccaactttgatgaagaaaatgcctattttgaagatgaggaagaagattctagcaacgttgatttaccttacattcctgctgaaaactcaccaactcgccagcaattccattccaa

SEQ ID NO: 125217 - DNA, 2554 bp, Homo sapiens
  Payload ID: 4578
  Gene Symbol: DDX5
  Gene Name: DEAD (Asp-Glu-Ala-Asp) box helicase 5
  Uniprot ID: P17844
  ENST ID: ENST00000225792
  CDS Start-End: 403-2247
agaagaaggtgaggtcaagagagtgcagaatgaggcattccaatggtgggtgggccctgacctgagagagtggcgcggggaggggtgaaagcgcggcgatcctggaacgccagcgggcgttgcggcctatgcgcgaggggcggggcgattaggtcatagagcggctcccagcgttccctgcggcgtaggaggcggtccagactataaaagcggctgccggaaagcggccggcacctcattcatttctaccggtctctagtagtgcagcttcggctggtgtcatcggtgtccttcctccgctgccgcccccgcaaggcttcgccgtcatcgaggccatttccagcgacttgtcgcacgcttttctatatacttcgttccccgccaaccgcaaccattgacgccatgtcgggttattcgagtgaccgagaccgcggccgggaccgagggtttggtgcacctcgatttggaggaagtagggcagggcccttatctggaaagaagtttggaaaccctggggagaaattagttaaaaagaagtggaatcttgatgagctgcctaaatttgagaagaatttttatcaagagcaccctgatttggctaggcgcacagcacaagaggtggaaacatacagaagaagcaaggaaattacagttagaggtcacaactgcccgaagccagttctaaatttttatgaagccaatttccctgcaaatgtcatggatgttattgcaagacagaatttcactgaacccactgctattcaagctcagggatggccagttgctctaagtggattggatatggttggagtggcacagactggatctgggaaaacattgtcttatttgcttcctgccattgtccacatcaatcatcagccattcctagagagaggcgatgggcctatttgtttggtgctggcaccaactcgggaactggcccaacaggtgcagcaagtagctgctgaatattgtagagcatgtcgcttgaagtctacttgtatctacggtggtgctcctaagggaccacaaatacgtgatttggagagaggtgtggaaatctgtattgcaacacctggaagactgattgactttttagagtgtggaaaaaccaatctgagaagaacaacctaccttgtccttgatgaagcagatagaatgcttgatatgggctttgaaccccaaataaggaagattgtggatcaaataagacctgataggcaaactctaatgtggagtgcgacttggccaaaagaagtaagacagcttgctgaagatttcctgaaagactatattcatataaacattggtgcacttgaactgagtgcaaaccacaacattcttcagattgtggatgtgtgtcatgacgtagaaaaggatgaaaaacttattcgtctaatggaagagatcatgagtgagaaggagaataaaaccattgtttttgtggaaaccaaaagaagatgtgatgagcttaccagaaaaatgaggagagatgggtggcctgccatgggtatccatggtgacaagagtcaacaagagcgtgactgggttctaaatgaattcaaacatggaaaagctcctattctgattgctacagatgtggcctccagagggctagatgtggaagatgtgaaatttgtcatcaattatgactaccctaactcctcagaggattatattcatcgaattggaagaactgctcgcagtaccaaaacaggcacagcatacactttctttacacctaataacataaagcaagtgagcgaccttatctctgtgcttcgtgaagctaatcaagcaattaatcccaagttgcttcagttggtcgaagacagaggttcaggtcgttccaggggtagaggaggcatgaaggatgaccgtcgggacagatactctgcgggcaaaaggggtggatttaatacctttagagacagggaaaattatgacagaggttactctagcctgcttaaaagagattttggggcaaaaactcagaatggtgtttacagtgctgcaaattacaccaatgggagctttggaagtaattttgtgtctgctggtatacagaccagttttaggactggtaatccaacagggacttaccagaatggttatgatagcactcagcaatacggaagtaatgttccaaatatgcacaatggtatgaaccaacaggcatatgcatatcctgctactgcagctgcacctatgattggttatccaatgccaacaggatattcccaataagactttagaagtatatgtaaatgtctgtttttcataattgctctttatattgtgtgttatctgacaagatagttatttaagaaacatgggaattgcagaaatgactgcagtgcagcagtaattatggtgcactttttcgctatttaagttggatatttctctacattcctgaaacaatttttaggttttttttgtactagaaaatgcaggcagtgttttcacaaaagtaaatgtacagtgatttgaaatacaataaatgaaggcaatgcatggccttccaataaaaaatatttgaagactgaattaa

SEQ ID NO: 125218 - DNA, 2077 bp, Homo sapiens
  Payload ID: 4578
  Gene Symbol: DDX5
  Gene Name: DEAD (Asp-Glu-Ala-Asp) box helicase 5
  Uniprot ID: P17844
  ENST ID: ENST00000450599
  CDS Start-End: 169-1776
ctcattcatttctaccggtctctagtagtgcagcttcggctggtgtcatcggtgtccttcctccgctgccgcccccgcaaggcttcgccgtcatcgaggccatttccagcgacttgtcgcacgcttttctatatacttcgttccccgccaaccgcaaccattgacgccatgtcgggttattcgagtgaccgagaccgcggccgggaccgagggtttggtgcacctcgatttggaggaagtagggcagggcccttatctggaaagaagtttggaaaccctggggagaaattagttaaaaagaagtggaatcttgatgagctgcctaaatttgagaagaatttttatcaagagcaccctgatttggctaggcgcacagcacaagaggtggaaacatacagaagaagcaaggaaattacagttagaggcgatgggcctatttgtttggtgctggcaccaactcgggaactggcccaacaggtgcagcaagtagctgctgaatattgtagagcatgtcgcttgaagtctacttgtatctacggtggtgctcctaagggaccacaaatacgtgatttggagagaggtgtggaaatctgtattgcaacacctggaagactgattgactttttagagtgtggaaaaaccaatctgagaagaacaacctaccttgtccttgatgaagcagatagaatgcttgatatgggctttgaaccccaaataaggaagattgtggatcaaataagacctgataggcaaactctaatgtggagtgcgacttggccaaaagaagtaagacagcttgctgaagatttcctgaaagactatattcatataaacattggtgcacttgaactgagtgcaaaccacaacattcttcagattgtggatgtgtgtcatgacgtagaaaaggatgaaaaacttattcgtctaatggaagagatcatgagtgagaaggagaataaaaccattgtttttgtggaaaccaaaagaagatgtgatgagcttaccagaaaaatgaggagagatgggtggcctgccatgggtatccatggtgacaagagtcaacaagagcgtgactgggttctaaatgaattcaaacatggaaaagctcctattctgattgctacagatgtggcctccagagggctagatgtggaagatgtgaaatttgtcatcaattatgactaccctaactcctcagaggattatattcatcgaattggaagaactgctcgcagtaccaaaacaggcacagcatacactttctttacacctaataacataaagcaagtgagcgaccttatctctgtgcttcgtgaagctaatcaagcaattaatcccaagttgcttcagttggtcgaagacagaggttcaggtcgttccaggggtagaggaggcatgaaggatgaccgtcgggacagatactctgcgggcaaaaggggtggatttaatacctttagagacagggaaaattatgacagaggttactctagcctgcttaaaagagattttggggcaaaaactcagaatggtgtttacagtgctgcaaattacaccaatgggagctttggaagtaattttgtgtctgctggtatacagaccagttttaggactggtaatccaacagggacttaccagaatggttatgatagcactcagcaatacggaagtaatgttccaaatatgcacaatggtatgaaccaacaggcatatgcatatcctgctactgcagctgcacctatgattggttatccaatgccaacaggatattcccaataagactttagaagtatatgtaaatgtctgtttttcataattgctctttatattgtgtgttatctgacaagatagttatttaagaaacatgggaattgcagaaatgactgcagtgcagcagtaattatggtgcactttttcgctatttaagttggatatttctctacattcctgaaacaatttttaggttttttttgtactagaaaatgcaggcagtgttttcacaaaagtaaatgtacagtgatttgaaatacaataaatgaaggcaatgcatggccttccaataaaaaatatttgaagactg

SEQ ID NO: 125219 - DNA, 2225 bp, Homo sapiens
  Payload ID: 4578
  Gene Symbol: DDX5
  Gene Name: DEAD (Asp-Glu-Ala-Asp) box helicase 5
  ENST ID: ENST00000540698
  CDS Start-End: 171-461
acctcattcatttctaccggtctctagtagtgcagcttcggctggtgtcatcggtgtccttcctccgctgccgcccccgcaaggcttcgccgtcatcgaggccatttccagcgacttgtcgcacgcttttctatatacttcgttccccgccaaccgcaaccattgacgccatgtcgggttattcgagtgaccgagaccgcggccgggaccgagggtttggtgcacctcgatttggaggaagtagggcagggcccttatctggaaagaagtttggaaaccctggggagaaattagttaaaaagaagtggaatcttgatgagctgcctaaatttgagaagaatttttatcaagagcaccctgatttggctaggcgcacagcacaaatgtcatggatgttattgcaagacagaatttcactgaacccactgctattcaagctcagggatggccagttgctctaagtggattggatatggttggagtggcacagactggatctgggaaaacattgtcttatttgcttcctgccattgtccacatcaatcatcagccattcctagagagaggcgatgggcctatttgtttggtgctggcaccaactcgggaactggcccaacaggtgcagcaagtagctgctgaatattgtagagcatgtcgcttgaagtctacttgtatctacggtggtgctcctaagggaccacaaatacgtgatttggagagaggtgtggaaatctgtattgcaacacctggaagactgattgactttttagagtgtggaaaaaccaatctgagaagaacaacctaccttgtccttgatgaagcagatagaatgcttgatatgggctttgaaccccaaataaggaagattgtggatcaaataagacctgataggcaaactctaatgtggagtgcgacttggccaaaagaagtaagacagcttgctgaagatttcctgaaagactatattcatataaacattggtgcacttgaactgagtgcaaaccacaacattcttcagattgtggatgtgtgtcatgacgtagaaaaggatgaaaaacttattcgtctaatggaagagatcatgagtgagaaggagaataaaaccattgtttttgtggaaaccaaaagaagatgtgatgagcttaccagaaaaatgaggagagatgggtggcctgccatgggtatccatggtgacaagagtcaacaagagcgtgactgggttctaaatgaattcaaacatggaaaagctcctattctgattgctacagatgtggcctccagagggctagatgtggaagatgtgaaatttgtcatcaattatgactaccctaactcctcagaggattatattcatcgaattggaagaactgctcgcagtaccaaaacaggcacagcatacactttctttacacctaataacataaagcaagtgagcgaccttatctctgtgcttcgtgaagctaatcaagcaattaatcccaagttgcttcagttggtcgaagacagaggttcaggtcgttccaggggtagaggaggcatgaaggatgaccgtcgggacagatactctgcgggcaaaaggggtggatttaatacctttagagacagggaaaattatgacagaggttactctagcctgcttaaaagagattttggggcaaaaactcagaatggtgtttacagtgctgcaaattacaccaatgggagctttggaagtaattttgtgtctgctggtatacagaccagttttaggactggtaatccaacagggacttaccagaatggttatgatagcactcagcaatacggaagtaatgttccaaatatgcacaatggtatgaaccaacaggcatatgcatatcctgctactgcagctgcacctatgattggttatccaatgccaacaggatattcccaataagactttagaagtatatgtaaatgtctgtttttcataattgctctttatattgtgtgttatctgacaagatagttatttaagaaacatgggaattgcagaaatgactgcagtgcagcagtaattatggtgcactttttcgctatttaagttggatatttctctacattcctgaaacaatttttaggttttttttgtactagaaaatgcaggcagtgttttcacaaaagtaaatgtacagtgatttgaaatacaataaatgaaggcaatgcatggccttccaataaaaaatatttgaagactgaattaa

SEQ ID NO: 125220 - DNA, 676 bp, Homo sapiens
  Payload ID: 4578
  Gene Symbol: DDX5
  Gene Name: DEAD (Asp-Glu-Ala-Asp) box helicase 5
  ENST ID: ENST00000584279
  CDS Start-End: 317-676
ggtccggggtggtacagccacgtgacaacgccaggccccgccttccccctcttttggttacagacgtgagggctctttggagacgtaaacatctccgagtggcgagggtgggcggggctgggcttgggaaagggcggggtggcttgcttgaggtgtggaaagaccagaagaagtagtgcagcttcggctggtgtcatcggtgtccttcctccgctgccgcccccgcaaggcttcgccgtcatcgaggccatttccagcgacttgtcgcacgcttttctatatacttcgttccccgccaaccgcaaccattgacgccatgtcgggttattcgagtgaccgagaccgcggccgggaccgagggtttggtgcacctcgatttggaggaagtagggcagggcccttatctggaaagaagtttggaaaccctggggagaaattagttaaaaagaagtggaatcttgatgagctgcctaaatttgagaagaatttttatcaagagcaccctgatttggctaggcgcacagcacaagaggtggaaacatacagaagaagcaaggaaattacagttagaggtcacaactgcccgaagccagttctaaatttttatgaagccaatttccctgcaaatgtcatggatgttattgcaagacagaatttcactgaacccactgctatt

SEQ ID NO: 125221 - DNA, 838 bp, Homo sapiens
  Payload ID: 4578
  Gene Symbol: DDX5
  Gene Name: DEAD (Asp-Glu-Ala-Asp) box helicase 5
  ENST ID: ENST00000577787
  CDS Start-End: 1-501
gagagaggcgatgggcctatttgtttggtgctggcaccaactcgggaactggcccaacaggtgcagcaagtagctgctgaatattgtagagcatgtcgcttgaagtctacttgtatctacggtggtgctcctaagggaccacaaatacgtgatttggagagaggtgtggaaatctgtattgcaacacctggaagactgattgactttttagagtgtggaaaaaccaatctgagaagaacaacctaccttgtccttgatgaagcagatagaatgcttgatatgggctttgaaccccaaataaggaagattgtggatcaaataagacctgataggcaaactctaatgtggagtgcgacttggccaaaagaagtaagacagcttgctgaagatttcctgaaagactatattcatataaacattggtgcacttgaactgagtgcaaaccacaacattcttcagattgtggatgtgtgtcatgacgtagaaaaggatgaaaagtaagttttattaactctgttatatttgcttcctaacaactttgctgtaaaattgagggatcattgtttggtgagttgttttaggttatttcagttggtgtgatttcatttagttagcctactaatcctgaaaatttcttgaatccttcaaataatggctgtcaccatttatagctttcctatagaaggaattcatgtgtcccctggttgacttaaggaccaagggtcgaactgctcgataagtggattagcaggcgtttcctctttgacttccagccatgtaaattgaacttaatgttttgctgaccataaatgtgtggccctagcaatggtcttttaaa

SEQ ID NO: 125222 - DNA, 2021 bp, Homo sapiens
  Payload ID: 4578
  Gene Symbol: DDX5
  Gene Name: DEAD (Asp-Glu-Ala-Asp) box helicase 5
  ENST ID: ENST00000578804
  CDS Start-End: 168-2012
tcctttcccgaaggcttgcgccattttgatattcacgtcacagtgattggaagagatttgacggtgtagtgtcttcaagcttgctttttgtgtggggattggggagctgtcggggcggctgccatttggtagctgttgagggagttgagagggagcgtattgtgcggatgaaagcgggacgcttcgaggcagacgaaggaacatctgttaggtttggtgcacctcgatttggaggaagtagggcagggcccttatctggaaagaagtttggaaaccctggggagaaattagttaaaaagaagtggaatcttgatgagctgcctaaatttgagaagaatttttatcaagagcaccctgatttggctaggcgcacagcacaagaggtggaaacatacagaagaagcaaggaaattacagttagaggtcacaactgcccgaagccagttctaaatttttatgaagccaatttccctgcaaatgtcatggatgttattgcaagacagaatttcactgaacccactgctattcaagctcagggatggccagttgctctaagtggattggatatggttggagtggcacagactggatctgggaaaacattgtcttatttgcttcctgccattgtccacatcaatcatcagccattcctagagagaggcgatgggcctatttgtttggtgctggcaccaactcgggaactggcccaacaggtgcagcaagtagctgctgaatattgtagagcatgtcgcttgaagtctacttgtatctacggtggtgctcctaagggaccacaaatacgtgatttggagagaggtgtggaaatctgtattgcaacacctggaagactgattgactttttagagtgtggaaaaaccaatctgagaagaacaacctaccttgtccttgatgaagcagatagaatgcttgatatgggctttgaaccccaaataaggaagattgtggatcaaataagacctgataggcaaactctaatgtggagtgcgacttggccaaaagaagtaagacagcttgctgaagatttcctgaaagactatattcatataaacattggtgcacttgaactgagtgcaaaccacaacattcttcagattgtggatgtgtgtcatgacgtagaaaaggatgaaaaacttattcgtctaatggaagagatcatgagtgagaaggagaataaaaccattgtttttgtggaaaccaaaagaagatgtgatgagcttaccagaaaaatgaggagagatgggtggcctgccatgggtatccatggtgacaagagtcaacaagagcgtgactgggttctaaatgaattcaaacatggaaaagctcctattctgattgctacagatgtggcctccagagggctagatgtggaagatgtgaaatttgtcatcaattatgactaccctaactcctcagaggattatattcatcgaattggaagaactgctcgcagtaccaaaacaggcacagcatacactttctttacacctaataacataaagcaagtgagcgaccttatctctgtgcttcgtgaagctaatcaagcaattaatcccaagttgcttcagttggtcgaagacagaggttcaggtcgttccaggggtagaggaggcatgaaggatgaccgtcgggacagatactctgcgggcaaaaggggtggatttaatacctttagagacagggaaaattatgacagaggttactctagcctgcttaaaagagattttggggcaaaaactcagaatggtgtttacagtgctgcaaattacaccaatgggagctttggaagtaattttgtgtctgctggtatacagaccagttttaggactggtaatccaacagggacttaccagaatggttatgatagcactcagcaatacggaagtaatgttccaaatatgcacaatggtatgaaccaacaggcatatgcatatcctgctactgcagctgcacctatgattggttatccaatgccaacaggatattcccaataagactttaga

SEQ ID NO: 125223 - DNA, 474 bp, Homo sapiens
  Payload ID: 4578
  Gene Symbol: DDX5
  Gene Name: DEAD (Asp-Glu-Ala-Asp) box helicase 5
  ENST ID: ENST00000583239
  CDS Start-End: 361-474
gcagagagaaatgcgagacaaagggggaagcgccgccccagcgggaacgccgcccggccgactccgcccgggccgggactcctcccccggtttggtgcacctcgatttggaggaagtagggcagggcccttatctggaaagaagtttggaaaccctggggagaaattagttaaaaagaagtggaatcttgatgagctgcctaaatttgagaagaatttttatcaagagcaccctgatttggctaggcgcacagcacaagaggtggaaacatacagaagaagcaaggaaattacagttagaggtcacaactgcccgaagccagttctaaatttttatgaagccaatttccctgcaaatgtcatggatgttattgcaagacagaatttcactgaacccactgctattcaagctcagggatggccagttgctctaagtggattggatatggttggagtggcacagactggatctggg

SEQ ID NO: 125224 - DNA, 1051 bp, Homo sapiens
  Payload ID: 4578
  Gene Symbol: DDX5
  Gene Name: DEAD (Asp-Glu-Ala-Asp) box helicase 5
  ENST ID: ENST00000585111
  CDS Start-End: 920-1051
gggcataataaatcttaagaatgctgttcctttaaagaccaatacaaaagcaggtacgacctcagggcccatagtgcaagggcggagggcacacggacagcggctagacgccccacagaaagacaagtccggggacgacccttctgaccgctctttttacagccaggacccaagtgtcctaccggcctcgccccagtgcctctctctctcccacagcatactgctgttccacggcctcgaagcgaagaggtggtgaagctgagagaccctatccagggaacccgccagcgcgacgcggcgtctgaaggtcacgagccccgccgacagcccagacccagtccgggctagcccgaggcctccctggaggtggacggtttcagtccacacatactgggaccccagggagacactcaccagcatccgagcctgccatgtttcagaggcaggtcgccgccggactccgacgcggccgggaaggcgacggtgtcctggaaggaccgatccacgcagacccgacactggggcgcggacgcacgaaccaaagcgcggggaaggaggcgtgaaagaaggacggacgttaaaagagcttctcgccgctgattggtcatcagaggagcacttcctttcacaggacgtgaaacgggggcggtttgggaagtttagagaccattctccgccgaccaaaacccgtcaaaggattatcagacacgcgggtcggacggtccacatcagccggcagcccgggcgggtcccggggtgcgagcagcgcacttccgtagtgcagcttcggctggtgtcatcggtgtccttcctccgctgccgcccccgcaaggcttcgccgtcatcgaggccatttccagcgacttgtcgcacgcttttctatatacttcgttccccgccaaccgcaaccattgacgccatgtcgggttattcgagtgaccgagaccgcggccgggaccgagggtttggtgcacctcgatttggaggaagtagggcagggcccttatctggaaagaagtttggaaaccctggggagaaattagttaaaaag

SEQ ID NO: 125225 - DNA, 582 bp, Homo sapiens
  Payload ID: 4578
  Gene Symbol: DDX5
  Gene Name: DEAD (Asp-Glu-Ala-Asp) box helicase 5
  ENST ID: ENST00000578190
  CDS Start-End: 444-582
attcgttgatccggagctctaccgcggcgttcccccagctgggtttgctagcagaagtgtttctgagaaaacccttgttctgttatcgctgactgtactgtttaggttcttaccactaaagctgtttggttccaaaacggccatatgagtaacatcgtcgtgatgctcttcggtttggtgcacctcgatttggaggaagtagggcagggcccttatctggaaagaagtttggaaaccctggggagaaattagttaaaaagaagtggaatcttgatgagctgcctaaatttgagaagaatttttatcaagagcaccctgatttggctaggcgcacagcacaagaggtggaaacatacagaagaagcaaggaaattacagttagaggtcacaactgcccgaagccagttctaaatttttatgaagccaatttccctgcaaatgtcatggatgttattgcaagacagaatttcactgaacccactgctattcaagctcagggatggccagttgctctaagtggattggatatggttggagtggcacagactggatctgggaaaacattgtcttatttgcttcctg

SEQ ID NO: 125226 - DNA, 543 bp, Homo sapiens
  Payload ID: 4578
  Gene Symbol: DDX5
  Gene Name: DEAD (Asp-Glu-Ala-Asp) box helicase 5
  ENST ID: ENST00000583212
  CDS Start-End: 513-543
ttaccactaaagctgtttggttccaaaacggccatatgagtaacatcgtcgtgatgctcttcggttcatgtagccttgttattgctgatagtgaattgctaggctggtggggaagattacagtaaccacaagaagtggtgtgtgccagaatcccaaattctggcatgtgggtgacaagtttccgacatgataaatccccggcttccgacatgataaatcccaggctgtttacatgacctaagtttggtgcacctcgatttggaggaagtagggcagggcccttatctggaaagaagtttggaaaccctggggagaaattagttaaaaagaagtggaatcttgatgagctgcctaaatttgagaagaatttttatcaagagcaccctgatttggctaggcgcacagcacaagaggtggaaacatacagaagaagcaaggaaattacagttagaggtcacaactgcccgaagccagttctaaatttttatgaagccaatttccctgcaaatgtcatggatgttattgcaagacagaatttcactg

SEQ ID NO: 125227 - DNA, 575 bp, Homo sapiens
  Payload ID: 4578
  Gene Symbol: DDX5
  Gene Name: DEAD (Asp-Glu-Ala-Asp) box helicase 5
  ENST ID: ENST00000578400
  CDS Start-End: 205-504
agactataaaagcggctgccggaaagcggccggcacctcattcatttctaccggtctctagtagtgcagcttcggctggtgtcatcggtgtccttcctccgctgccgcccccgcaaggcttcgccgtcatcgaggccatttccagcgacttgtcgcacgcttttctatatacttcgttccccgccaaccgcaaccattgacgccatgtcgggttattcgagtgaccgagaccgcggccgggaccgagggtttggtgcacctcgatttggaggaagtagggcagggcccttatctggaaagaagtttggaaaccctggggagaaattagttaaaaagaagtggaatcttgatgagctgcctaaatttgagaagaatttttatcaagagcaccctgatttggctaggcgcacagcacaagaggtggaaacatacagaagaagcaaggaaattacagttagagtgtggaaaaaccaatctgagaagaacaacctaccttgtccttgatgaagcagatagaatgcttgatatgggctttgaaccccaaataaggaagattgtggatcaaataagacctg

SEQ ID NO: 125228 - DNA, 576 bp, Homo sapiens
  Payload ID: 4578
  Gene Symbol: DDX5
  Gene Name: DEAD (Asp-Glu-Ala-Asp) box helicase 5
  ENST ID: ENST00000581806
  CDS Start-End: 421-576
acaggacgtgaaacgggggcggtttgggaagtttagagaccattctccgccgaccaaaacccgtcaaaggattatcagacacgcgggtcggacggtccacatcagccggcagcccgggcgggtcccggggtgcgagcagcgcacttccggtttggtgcacctcgatttggaggaagtagggcagggcccttatctggaaagaagtttggaaaccctggggagaaattagttaaaaagaagtggaatcttgatgagctgcctaaatttgagaagaatttttatcaagagcaccctgatttggctaggcgcacagcacaagaggtggaaacatacagaagaagcaaggaaattacagttagaggtcacaactgcccgaagccagttctaaatttttatgaagccaatttccctgcaaatgtcatggatgttattgcaagacagaatttcactgaacccactgctattcaagctcagggatggccagttgctctaagtggattggatatggttggagtggcacagactggatctgggaaaacattgtcttatttgcttcctgccattgtccacatcaat

SEQ ID NO: 125229 - DNA, 580 bp, Homo sapiens
  Payload ID: 4578
  Gene Symbol: DDX5
  Gene Name: DEAD (Asp-Glu-Ala-Asp) box helicase 5
  ENST ID: ENST00000581697
  CDS Start-End: 385-580
cagacgtgagggctctttggagacgtaaacatctccgagtggcgagggtgggcggggctgggcttgggaaagggcggggtggcttgcttgaggtgtggaaagaccagaagaaggtttggtgcacctcgatttggaggaagtagggcagggcccttatctggaaagaagtttggaaaccctggggagaaattagttaaaaagaagtggaatcttgatgagctgcctaaatttgagaagaatttttatcaagagcaccctgatttggctaggcgcacagcacaagaggtggaaacatacagaagaagcaaggaaattacagttagaggtcacaactgcccgaagccagttctaaatttttatgaagccaatttccctgcaaatgtcatggatgttattgcaagacagaatttcactgaacccactgctattcaagctcagggatggccagttgctctaagtggattggatatggttggagtggcacagactggatctgggaaaacattgtcttatttgcttcctgccattgtccacatcaatcatcagccattcctagagagaggcgatgggcctatttgtt

SEQ ID NO: 125230 - DNA, 996 bp, Homo sapiens
  Payload ID: 4578
  Gene Symbol: DDX5
  Gene Name: DEAD (Asp-Glu-Ala-Asp) box helicase 5
  ENST ID: ENST00000577922
  CDS Start-End: 359-996
ctccgccgacgtcaacgggaaagtagtgcggaccgctctctcggtggtccggggtggtacagccacgtgacaacgccaggccccgccttccccctcttttggttacagacgtgagggctctttggagacgtaaacatctccgagtggcgagggtgggcggggctgggcttgggaaagggcggggtggcttgcttgaggtgtggaaagaccagaagaagtgcagcttcggctggtgtcatcggtgtccttcctccgctgccgcccccgcaaggcttcgccgtcatcgaggccatttccagcgacttgtcgcacgcttttctatatacttcgttccccgccaaccgcaaccattgacgccatgtcgggttattcgagtgaccgagaccgcggccgggaccgagggtttggtgcacctcgatttggaggaagtagggcagggcccttatctggaaagaagtttggaaaccctggggagaaattagttaaaaagaagtggaatcttgatgagctgcctaaatttgagaagaatttttatcaagagcaccctgatttggctaggcgcacagcacaagaggtggaaacatacagaagaagcaaggaaattacagttagaggtcacaactgcccgaagccagttctaaatttttatgaagccaatttccctgcaaatgtcatggatgttattgcaagacagaatttcactgaacccactgctattcaagctcagggatggccagttgctctaagtggattggatatggttggagtggcacagactggatctgggaaaacattgtcttatttgcttcctgccattgtccacatcaatcatcagccattcctagagagaggcgatgggcctatttgtttggtgctggcaccaactcgggaactggcccaacaggtgcagcaagtagctgctgaatattgtagagcatgtcgcttgaagtctacttgtatctacggtggtgctcctaagggaccacaaatacgtga

SEQ ID NO: 125231 - DNA, 2156 bp, Homo sapiens
  Payload ID: 4578
  Gene Symbol: DDX5
  Gene Name: DEAD (Asp-Glu-Ala-Asp) box helicase 5
  ENST ID: ENST00000581693
  CDS Start-End: 171-287
acctcattcatttctaccggtctctagtagtgcagcttcggctggtgtcatcggtgtccttcctccgctgccgcccccgcaaggcttcgccgtcatcgaggccatttccagcgacttgtcgcacgcttttctatatacttcgttccccgccaaccgcaaccattgacgccatgtcgggttattcgagtgaccgagaccgcggccgggaccgaggcaagaggtggaaacatacagaagaagcaaggaaattacagttagaggtcacaactgcccgaagccagttctaaatttttatgaagccaatttccctgcaaatgtcatggatgttattgcaagacagaatttcactgaacccactgctattcaagctcagggatggccagttgctctaagtggattggatatggttggagtggcacagactggatctgggaaaacattgtcttatttgcttcctgccattgtccacatcaatcatcagccattcctagagagaggcgatgggcctatttgtttggtgctggcaccaactcgggaactggcccaacaggtgcagcaagtagctgctgaatattgtagagcatgtcgcttgaagtctacttgtatctacggtggtgctcctaagggaccacaaatacgtgatttggagagaggtgtggaaatctgtattgcaacacctggaagactgattgactttttagagtgtggaaaaaccaatctgagaagaacaacctaccttgtccttgatgaagcagatagaatgcttgatatgggctttgaaccccaaataaggaagattgtggatcaaataagacctgataggcaaactctaatgtggagtgcgacttggccaaaagaagtaagacagcttgctgaagatttcctgaaagactatattcatataaacattggtgcacttgaactgagtgcaaaccacaacattcttcagattgtggatgtgtgtcatgacgtagaaaaggatgaaaaacttattcgtctaatggaagagatcatgagtgagaaggagaataaaaccattgtttttgtggaaaccaaaagaagatgtgatgagcttaccagaaaaatgaggagagatgggtggcctgccatgggtatccatggtgacaagagtcaacaagagcgtgactgggttctaaatgaattcaaacatggaaaagctcctattctgattgctacagatgtggcctccagagggctagatgtggaagatgtgaaatttgtcatcaattatgactaccctaactcctcagaggattatattcatcgaattggaagaactgctcgcagtaccaaaacaggcacagcatacactttctttacacctaataacataaagcaagtgagcgaccttatctctgtgcttcgtgaagctaatcaagcaattaatcccaagttgcttcagttggtcgaagacagaggttcaggtcgttccaggggtagaggaggcatgaaggatgaccgtcgggacagatactctgcgggcaaaaggggtggatttaatacctttagagacagggaaaattatgacagaggttactctagcctgcttaaaagagattttggggcaaaaactcagaatggtgtttacagtgctgcaaattacaccaatgggagctttggaagtaattttgtgtctgctggtatacagaccagttttaggactggtaatccaacagggacttaccagaatggttatgatagcactcagcaatacggaagtaatgttccaaatatgcacaatggtatgaaccaacaggcatatgcatatcctgctactgcagctgcacctatgattggttatccaatgccaacaggatattcccaataagactttagaagtatatgtaaatgtctgtttttcataattgctctttatattgtgtgttatctgacaagatagttatttaagaaacatgggaattgcagaaatgactgcagtgcagcagtaattatggtgcactttttcgctatttaagttggatatttctctacattcctgaaacaatttttaggttttttttgtactagaaaatgcaggcagtgttttcacaaaagtaaatgtacagtgatttgaaatacaataaatgaaggcaatgcatggccttccaataaaaaatatttgaagactgaattaa

SEQ ID NO: 125232 - DNA, 531 bp, Homo sapiens
  Payload ID: 4578
  Gene Symbol: DDX5
  Gene Name: DEAD (Asp-Glu-Ala-Asp) box helicase 5
  ENST ID: ENST00000579091
  CDS Start-End: 438-531
gactcctcccccggtagtcgccggctcctccttttcttttttcctgcgttatataattttgattcgttgatccggagctctaccgcggcgttcccccagctgggtttgctagcagaagtgtttctgagaaaacccttgttctgttatcgctgactgtactgtttaggtttggtgcacctcgatttggaggaagtagggcagggcccttatctggaaagaagtttggaaaccctggggagaaattagttaaaaagaagtggaatcttgatgagctgcctaaatttgagaagaatttttatcaagagcaccctgatttggctaggcgcacagcacaagaggtggaaacatacagaagaagcaaggaaattacagttagaggtcacaactgcccgaagccagttctaaatttttatgaagccaatttccctgcaaatgtcatggatgttattgcaagacagaatttcactgaacccactgctattcaagctcagggatggccagttgctctaagtggattggatatggttggag

SEQ ID NO: 125233 - DNA, 820 bp, Homo sapiens
  Payload ID: 4578
  Gene Symbol: DDX5
  Gene Name: DEAD (Asp-Glu-Ala-Asp) box helicase 5
  ENST ID: ENST00000579996
  CDS Start-End: 1-461
agagaggtgtggaaatctgtattgcaacacctggaagactgattgactttttagagtgtggaaaaaccaatctgagaagaacaacctaccttgtccttgatgaagcagatagaatgcttgatatgggctttgaaccccaaataaggaagattgtggatcaaataagacctgataggcaaactctaatgtggagtgcgacttggccaaaagaagtaagacagcttgctgaagatttcctgaaagactatattcatataaacattggtgcacttgaactgagtgcaaaccacaacattcttcagattgtggatgtgtgtcatgacgtagaaaaggatgaaaaacttattcgtctaatggaagagatcatgagtgagaaggagaataaaaccattgtttttgtggaaaccaaaagaagatgtgatgagcttaccagaaaaatgaggagagatgggtatgtgtgagctcctccattgaagcagattgattaaaacagcttaggaaagggcaaacttggatcacgagcagtggatttttttcatatctgatagtgaatttaactttttcatttctggcgaaattaaagagatctgtgaccaaaagtggtcaagcactggagtctgaggttttcaatgtgagtttaataacacaacttgtcttttaacttaggtggcctgccatgggtatccatggtgacaagagtcaacaagagcgtgactgggttctaaatggtaaatatttcaaatgaagtatttttcccccttacttaacctagctagaattctgctcagataattgatcatgtatatgccttcctttgtag

SEQ ID NO: 125234 - DNA, 572 bp, Homo sapiens
  Payload ID: 4578
  Gene Symbol: DDX5
  Gene Name: DEAD (Asp-Glu-Ala-Asp) box helicase 5
  ENST ID: ENST00000585060
  CDS Start-End: 524-572
acctcattcatttctaccggtctctagtagtgcagcttcggctggtgtcatcggtgtccttcctccgctgccgcccccgcaaggcttcgccgtcatcgaggccatttccagcgacttgtcgcacgcttttctatatacttcgttccccgccaaccgcaaccattgacgccatgtcgggttattcgagtgaccgagaccgcggccgggaccgaggccatttgaaaatgtgaataacgttttttttcattccaggtttggtgcacctcgatttggaggaagtagggcagggcccttatctggaaagaagtttggaaaccctggggagaaattagttaaaaagaagtggaatcttgatgagctgcctaaatttgagaagaatttttatcaagagcaccctgatttggctaggcgcacagcacaagaggtggaaacatacagaagaagcaaggaaattacagttagaggtcacaactgcccgaagccagttctaaatttttatgaagccaatttccctgcaaatgtcatggatgttattgcaagacagaatttcactgaacccactgctattcaag

SEQ ID NO: 125235 - DNA, 473 bp, Homo sapiens
  Payload ID: 4578
  Gene Symbol: DDX5
  Gene Name: DEAD (Asp-Glu-Ala-Asp) box helicase 5
  ENST ID: ENST00000630471
  CDS Start-End: 174-473
ggcacctcattcatttctaccggtctctagtagtgcagcttcggctggtgtcatcggtgtccttcctccgctgccgcccccgcaaggcttcgccgtcatcgaggccatttccagcgacttgtcgcacgcttttctatatacttcgttccccgccaaccgcaaccattgacgccatgtcgggttattcgagtgaccgagaccgcggccgggaccgagggtttggtgcacctcgatttggaggaagtagggcagggcccttatctggaaagaagtttggaaaccctggggagaaattagttaaaaagaagtggaatcttgatgagctgcctaaatttgagaagaatttttatcaagagcaccctgatttggctaggcgcacagcacaagaggtggaaacatacagaagaagcaaggaaattacagttagagtgtggaaaaaccaatctgagaagaacaacctaccttgtccttga

SEQ ID NO: 125236 - DNA, 2336 bp, Homo sapiens
  Payload ID: 4579
  Gene Symbol: DDX56
  Gene Name: DEAD (Asp-Glu-Ala-Asp) box helicase 56
  Uniprot ID: Q9NY93
  ENST ID: ENST00000258772
  CDS Start-End: 108-1751
ccgggaagtgacttcgtctccgaagccgattggttgttgctttgctcccgctcgcgtcggtggcgtttttcctgcagcgcgtgcgtgctgcgctactgagcagcgccatggaggactctgaagcactgggcttcgaacacatgggcctcgatccccggctccttcaggctgtcaccgatctgggctggtcgcgacctacgctgatccaggagaaggccatcccactggccctagaagggaaggacctcctggctcgggcccgcacgggctccgggaagacggccgcttatgctattccgatgctgcagctgttgctccataggaaggcgacaggtccggtggtagaacaggcagtgagaggccttgttcttgttcctaccaaggagctggcacggcaagcacagtccatgattcagcagctggctacctactgtgctcgggatgtccgagtggccaatgtctcagctgctgaagactcagtctctcagagagctgtgctgatggagaagccagatgtggtagtagggaccccatctcgcatattaagccacttgcagcaagacagcctgaaacttcgtgactccctggagcttttggtggtggacgaagctgaccttcttttttcctttggctttgaagaagagctcaagagtctcctctgtcacttgccccggatttaccaggcttttctcatgtcagctacttttaacgaggacgtacaagcactcaaggagctgatattacataacccggttacccttaagttacaggagtcccagctgcctgggccagaccagttacagcagtttcaggtggtctgtgagactgaggaagacaaattcctcctgctgtatgccctgctcaagctgtcattgattcggggcaagtctctgctctttgtcaacactctagaacggagttaccggctacgcctgttcttggaacagttcagcatccccacctgtgtgctcaatggagagcttccactgcgctccaggtgccacatcatctcacagttcaaccaaggcttctacgactgtgtcatagcaactgatgctgaagtcctgggggccccagtcaagggcaagcgtcggggccgagggcccaaaggggacaaggcctctgatccggaagcaggtgtggcccggggcatagacttccaccatgtgtctgctgtgctcaactttgatcttcccccaacccctgaggcctacatccatcgagctggcaggacagcacgcgctaacaacccaggcatagtcttaacctttgtgcttcccacggagcagttccacttaggcaagattgaggagcttctcagtggagagaacaggggccccattctgctcccctaccagttccggatggaggagatcgagggcttccgctatcgctgcagggatgccatgcgctcagtgactaagcaggccattcgggaggcaagattgaaggagatcaaggaagagcttctgcattctgagaagcttaagacatactttgaagacaaccctagggacctccagctgctgcggcatgacctacctttgcaccccgcagtggtgaagccccacctgggccatgttcctgactacctggttcctcctgctctccgtggcctggtgcgccctcacaagaagcggaagaagctgtcttcctcttgtaggaaggccaagagagcaaagtcccagaacccactgcgcagcttcaagcacaaaggaaagaaattcagacccacagccaagccctcctgaggttgttgggcctctctggagctgagcacattgtggagcacaggcttacacccttcgtggacaggcgaggctctggtgcttactgcacagcctgaacagacagttctggggccggcagtgctgggccctttagctccttggcacttccaagctggcatcttgccccttgacaacagaataaaaattttagctgccccagtttgtgcctccagcatatgaaaaggactatttgaatccccaaaacatcaggagtcgggaaacttcggaagacagctgtgcctggctctgtggctgcatgcagtgcttcacttggccagcagaggtcagctgtgccgagctgccccagccatgagaagagaagcctgcccttgctggcaggtggctatggccggcccagagccttcctgcccagctcctgcagccctgctgcctgggatcaggctgggagatgggccttcctgaccgccagccttcctctccccgagcacacgcacatgtagattcggggggaagctgcctgctcttccttagaggagccggggcagctatctgctggtccctttctgaacaactgttgatgtgtga

SEQ ID NO: 125237 - DNA, 1287 bp, Homo sapiens
  Payload ID: 4579
  Gene Symbol: DDX56
  Gene Name: DEAD (Asp-Glu-Ala-Asp) box helicase 56
  ENST ID: ENST00000415758
  CDS Start-End: 14-325
actgagcagcgccatggaggactctgaagcactgggcttcgaacacatgggcctcgatccccggctccttcaggctgtcaccgatctgggctggtcgcgacctacgctgatccaggagaaggccatcccactggccctagaagggaaggacctcctggctcgggcccgcacgggctccgggaagacggccgcttatgctattccgatgctgcagctgttgctccataggaaggcgagctgtgctgatggagaagccagatgtggtagtagggaccccatctcgcatattaagccacttgcagcaagacagcctgaaacttcgtgactccctggagcttttggtggtggacgaagctgaccttcttttttcctttggctttgaagaagagctcaagagtctcctctgtcacttgccccggatttaccaggcttttctcatgtcagctacttttaacgaggacgtacaagcactcaaggagctgatattacataacccggttacccttaagttacaggagtcccagctgcctgggccagaccagttacagcagtttcaggtggtctgtgagactgaggaagacaaattcctcctgctgtatgccctgctcaagctgtcattgattcggggcaagtctctgctctttgtcaacactctagaacggagttaccggctacgcctgttcttggaacagttcagcatccccacctgtgtgctcaatggagagcttccactgcgctccaggtgccacatcatctcacagttcaaccaaggcttctacgactgtgtcatagcaactgatgctgaagtcctgggggccccagtcaagggcaagcgtcggggccgagggcccaaaggggacaaggcctctgatccggaagcaggtgtggcccggggcatagacttccaccatgtgtctgctgtgctcaactttgatcttcccccaacccctgaggcctacatccatcgagctggcaggtagtagtgtgacggcccaggcatctgcatggacagcacgcgctaacaacccaggcatagtcttaacctttgtgcttcccacggagcagttccacttaggcaagattgaggagcttctcagtggagagaacaggggccccattctgctcccctaccagttccggatggaggagatcgagggcttccgctatcgctgcaggtgtccacccccaggatgccatgcgctcagtgactaagcaggccattcgggaggcaagattgaaggagatcaaggaagagcttctgcattctgagaagcttaagacatactt

SEQ ID NO: 125238 - DNA, 691 bp, Homo sapiens
  Payload ID: 4579
  Gene Symbol: DDX56
  Gene Name: DEAD (Asp-Glu-Ala-Asp) box helicase 56
  ENST ID: ENST00000448192
  CDS Start-End: 1-549
cacttaggcaagattgaggagcttctcagtggagagaacaggggccccattctgctcccctaccagttccggatggaggagatcgagggcttccgctatcgctgcagggatgccatgcgctcagtgactaagcaggccattcgggaggcaagattgaaggagatcaaggaagagcttctgcattctgagaagcttaagacatactttgaagacaaccctagggacctccagctgctgcggcatgacctacctttgcaccccgcagtggtgaagccccacctgggccatgttcctgactacctggttcctcctgctctccgtggcctggtgcgccctcacaagaagcggaagaagctgtcttcctcttgtaggaaggccaaggtacggctcctggggactgcggacagccccaggactcctcccaacctgctcttttgtcatcaccagaatgtggaggcgccttgccctagggaggggaagagagggtgccctagggaggggaagagggggcaccctagaaccgggccccaaaaatctggtgtgggataggggtacttttgcagccgcctgcaggccctgcttttctttccccagctgcctttccccatttccttatctgcagcaccttctggtcgtgttggccagttgccggcacggctccctttgtgtctttctcagttgggtgggtggg

SEQ ID NO: 125239 - DNA, 3028 bp, Homo sapiens
  Payload ID: 4579
  Gene Symbol: DDX56
  Gene Name: DEAD (Asp-Glu-Ala-Asp) box helicase 56
  ENST ID: ENST00000421223
  CDS Start-End: 1157-2284
ttgccttttccagcttggctctggctcccttcctccagcaagggtgggttgagctctcacatggcaccactttgacctcttctgcttccctcttctacactgaaagacttatgggccaggagcagtggctcgcacctgcaatcccagcactttgggaggccgaggaaggcagatcgcttggccccaggagttcaaaaccgtcctgggcaacgtggcgaaaccccatctagaaagaaaagaagagaaggggaggggggaggggaggaggagttacatatatacacatacacacacacacacacgtacgtacatacatacatacacgctaactggacgtggtggtgcgtgcctgtagtcttagctttccaggagactgaggtgggaggaccacttgagcctgagatcgcgccagcctgggtgacagtcagaccatgtctcaaaaaaaaaaaaagatttgtgattaggattcttagtcctcacctgtattattttcctattgctactgtaacaaattaccacaaatttactggcttaaaacgacgcaagtctgtaggtcagaagtctgacacgggtcttaactggtgacccgagtcagatttgggacacaaagaacagaaaccaagctgtgcaggtttctgacaggcagtccggttagggagccctacagcaacccgccggtcctctctctcaggcagttgctgccatggctcattattccaaccggttctcctcagcccagtctatctcagtggctccattcatagggtgatgtgcccggcgggacactaaccctaaccaagcagagagacggtcatgcccgtcacgacctcggccctcgccccggccgaggcttctcctgcaggtcgcgagaatcaggtgcgtcagcggcgtccgggaacgccggaagagccagtggagcggctctgtagtccaaagtaccccgtcgaccccagcacggccgctccaccgcctcctactagacccagtcctagggactgcgcagtcgcagagctccgtccgagtaccggaagcctaggccgccagcacttccgggaagtgacttcgtctccgaagccgattggttgttgctttgctcccgctcgcgtcggtggcgtttttcctgcagcgcgtgcgtgctgcgctactgagcagcgccatggaggactctgaagcactgggcttcgaacacatgggcctcgatccccggctccttcaggctgtcaccgatctgggctggtcgcgacctacgctgatccaggagaaggccatcccactggccctagaagggaaggacctcctggctcgggcccgcacgggctccgggaagacggccgcttatgctattccgatgctgcagctgttgctccataggaaggcgacaggtccggtggtagaacaggcagtgagaggccttgttcttgttcctaccaaggagctggcacggcaagcacagtccatgattcagcagctggctacctactgtgctcgggatgtccgagtggccaatgtctcagctgctgaagactcagtctctcagagagctgtgctgatggagaagccagatgtggtagtagggaccccatctcgcatattaagccacttgcagcaagacagcctgaaacttcgtgactccctggagcttttggtggtggacgaagctgaccttcttttttcctttggctttgaagaagagctcaagagtctcctctgtcacttgccccggatttaccaggcttttctcatgtcagctacttttaacgaggacgtacaagcactcaaggagctgatattacataacccggttacccttaagttacaggagtcccagctgcctgggccagaccagttacagcagtttcaggtggtctgtgagactgaggaagacaaattcctcctgctgtatgccctgctcaagctgtcattgattcggggcaagtctctgctctttgtcaacactctagaacggagttaccggctacgcctgttcttggaacagttcagcatccccacctgtgtgctcaatggagagcttccactgcgctccaggtgccacatcatctcacagttcaaccaaggcttctacgactgtgtcatagcaactgatgctgaagtcctgggggccccagtcaagggcaagcgtcggggccgagggcccaaaggggacaaggcctctgatccggaagcaggtgtggcccggggcatagacttccaccatgtgtctgctgtgctcaactttgatcttcccccaacccctgaggcctacatccatcgagctggcaggtagtagtgtgacggcccaggcatctgcatggacagcacgcgctaacaacccaggcatagtcttaacctttgtgcttcccacggagcagttccacttaggcaagattgaggagcttctcagtggagagaacaggggccccattctgctcccctaccagttccggatggaggagatcgagggcttccgctatcgctgcagggatgccatgcgctcagtgactaagcaggccattcgggaggcaagattgaaggagatcaaggaagagcttctgcattctgagaagcttaagacatactttgaagacaaccctagggacctccagctgctgcggcatgacctacctttgcaccccgcagtggtgaagccccacctgggccatgttcctgactacctggttcctcctgctctccgtggcctggtgcgccctcacaagaagcggaagaagctgtcttcctcttgtaggaaggccaagagagcaaagtcccagaacccactgcgcagcttcaagcacaaaggaaagaaattcagacccacagccaagccctcctgaggttgttgggcctctctggagctgagcacattgtggagcacaggcttacacccttcgtggacaggcgaggctctggtgcttactgcacagcctgaacagacagttctggggccggcagtgctgggccctttagctccttggcacttccaagctggcatcttgccccttgacaacagaataaaaattttagctgcccc

SEQ ID NO: 125240 - DNA, 1554 bp, Homo sapiens
  Payload ID: 4579
  Gene Symbol: DDX56
  Gene Name: DEAD (Asp-Glu-Ala-Asp) box helicase 56
  Uniprot ID: Q9NY93
  ENST ID: ENST00000431640
  CDS Start-End: 31-1554
cgcgtgcgtgctgcgctactgagcagcgccatggaggactctgaagcactgggcttcgaacacatgggcctcgatccccggctccttcaggctgtcaccgatctgggctggtcgcgacctacgctgatccaggagaaggccatcccactggccctagaagggaaggacctcctggctcgggcccgcacgggctccgggaagacggccgcttatgctattccgatgctgcagctgttgctccataggaaggcgacaggtccggtggtagaacaggcagtgagaggccttgttcttgttcctaccaaggagctggcacggcaagcacagtccatgattcagcagctggctacctactgtgctcgggatgtccgagtggccaatgtctcagctgctgaagactcagtctctcagagagctgtgctgatggagaagccagatgtggtagtagggaccccatctcgcatattaagccacttgcagcaagacagcctgaaacttcgtgactccctggagcttttggtggtggacgaagctgaccttcttttttcctttggctttgaagaagagctcaagagtctcctctgtcacttgccccggatttaccaggcttttctcatgtcagctacttttaacgaggacgtacaagcactcaaggagctgatattacataacccggttacccttaagttacaggagtcccagctgcctgggccagaccagttacagcagtttcaggtggtctgtgagactgaggaagacaaattcctcctgctgtatgccctgctcaagctgtcattgattcggggcaagtctctgctctttgtcaacactctagaacggagttaccggctacgcctgttcttggaacagttcagcatccccacctgtgtgctcaatggagagcttccactgcgctccagggcctctgatccggaagcaggtgtggcccggggcatagacttccaccatgtgtctgctgtgctcaactttgatcttcccccaacccctgaggcctacatccatcgagctggcaggacagcacgcgctaacaacccaggcatagtcttaacctttgtgcttcccacggagcagttccacttaggcaagattgaggagcttctcagtggagagaacaggggccccattctgctcccctaccagttccggatggaggagatcgagggcttccgctatcgctgcagggatgccatgcgctcagtgactaagcaggccattcgggaggcaagattgaaggagatcaaggaagagcttctgcattctgagaagcttaagacatactttgaagacaaccctagggacctccagctgctgcggcatgacctacctttgcaccccgcagtggtgaagccccacctgggccatgttcctgactacctggttcctcctgctctccgtggcctggtgcgccctcacaagaagcggaagaagctgtcttcctcttgtaggaaggccaagagagcaaagtcccagaacccactgcgcagcttcaagcacaaaggaaagaaattcagacccacagccaagccctcctga

SEQ ID NO: 125241 - DNA, 1853 bp, Homo sapiens
  Payload ID: 4579
  Gene Symbol: DDX56
  Gene Name: DEAD (Asp-Glu-Ala-Asp) box helicase 56
  ENST ID: ENST00000446987
  CDS Start-End: 1-558
atggaggactctgaagcactgggcttcgaacacatgggcctcgatccccggctccttcaggctgtcaccgatctgggctggtcgcgacctacgctgatccaggagaaggccatcccactggccctagaagggaaggacctcctggctcgggcccgcacgggctccgggaagacggccgcttatgctattccgatgctgcagctgttgctccataggaaggcgacaggtccggtggtagaacaggcagtgagaggccttgttcttgttcctaccaaggagctggcacggcaagcacagtccatgattcagcagctggctacctactgtgctcgggatgtccgagtggccaatgtctcagctgctgaagactcagtctctcagagagctgtgctgatggagaagccagatgtggtagtagggaccccatctcgcatattaagccacttgcagcaagacagcctgaaacttcgtgactccctggagcttttggtggtggacgaagctgaccttcttttttcctttggctttgaagaagagctcaagagtctcctctggtaaggcagagtcacttgccccggatttaccaggcttttctcatgtcagctacttttaacgaggacgtacaagcactcaaggagctgatattacataacccggttacccttaagttacaggagtcccagctgcctgggccagaccagttacagcagtttcaggtggtctgtgagactgaggaagacaaattcctcctgctgtatgccctgctcaagctgtcattgattcggggcaagtctctgctctttgtcaacactctagaacggagttaccggctacgcctgttcttggaacagttcagcatccccacctgtgtgctcaatggagagcttccactgcgctccaggtgccacatcatctcacagttcaaccaaggcttctacgactgtgtcatagcaactgatgctgaagtcctgggggccccagtcaagggcaagcgtcggggccgagggcccaaaggggacaaggcctctgatccggaagcaggtgtggcccggggcatagacttccaccatgtgtctgctgtgctcaactttgatcttcccccaacccctgaggcctacatccatcgagctggcaggacagcacgcgctaacaacccaggcatagtcttaacctttgtgcttcccacggagcagttccacttaggcaagattgaggagcttctcagtggagagaacaggggccccattctgctcccctaccagttccggatggaggagatcgagggcttccgctatcgctgcagggatgccatgcgctcagtgactaagcaggccattcgggaggcaagattgaaggagatcaaggaagagcttctgcattctgagaagcttaagacatactttgaagacaaccctagggacctccagctgctgcggcatgacctacctttgcaccccgcagtggtgaagccccacctgggccatgttcctgactacctggttcctcctgctctccgtggcctggtgcgccctcacaagaagcggaagaagctgtcttcctcttgtaggaaggccaagagagcaaagtcccagaacccactgcgcagcttcaagcacaaaggaaagaaattcagacccacagccaagccctcctgaggttgttgggcctctctggagctgagcacattgtggagcacaggcttacacccttcgtggacaggcgaggctctggtgcttactgcacagcctgaacagacagttctggggccggcagtgctgggccctttagctccttggcacttccaagctggcatcttgccccttgacaacagaataaaaattttagctgcccca

SEQ ID NO: 125242 - DNA, 1682 bp, Homo sapiens
  Payload ID: 4579
  Gene Symbol: DDX56
  Gene Name: DEAD (Asp-Glu-Ala-Asp) box helicase 56
  ENST ID: ENST00000433257
  CDS Start-End: 1-1189
cctggctcgggcccgcacgggctccgggaagacggccgcttatgctattccgatgctgcagctgttgctccataggaaggcgacaggtccggtggtagaacaggcagtgagaggccttgttcttgttcctaccaaggagctggcacggcaagcacagtccatgattcagcagctggctacctactgtgctcgggatgtccgagtggccaatgtctcagctgctgaagactcagtctctcagagagctgtgctgatggagaagccagatgtggtagtagggaccccatctcgcatattaagccacttgcagcaagacagcctgaaacttcgtgactccctggagcttttggtggtggacgaagctgaccttcttttttcctttggctttgaagaagagctcaagagtctcctctgtcacttgccccggatttaccaggcttttctcatgtcagctacttttaacgaggacgtacaagcactcaaggagctgatattacataacccggttacccttaagttacaggagtcccagctgcctgggccagaccagttacagcagtttcaggtggtctgtgagactgaggaagacaaattcctcctgctgtatgccctgctcaagctgtcattgattcggggcaagtctctgctctttgtcaacactctagaacggagttaccggctacgcctgttcttggaacagttcagcatccccacctgtgtgctcaatggagagcttccactgcgctccaggtgccacatcatctcacagttcaaccaaggcttctacgactgtgtcatagcaactgatgctgaagtcctgggggccccagtcaagggcaagcgtcggggccgagggcccaaaggggacaaggcctctgatccggaagcaggtgtggcccggggcatagacttccaccatgtgtctgctgtgctcaactttgatcttcccccaacccctgaggcctacatccatcgagctggcaggacagcacgcgctaacaacccaggcatagtcttaacctttgtgcttcccacggagcagttccacttaggcaagattgaggagcttctcagtggagagaacaggggccccattctgctcccctaccagttccggatggaggagatcgagggcttccgctatcgctgcaggtgtccacccccaggatgccatgcgctcagtgactaagcaggccattcgggaggcaagattgaaggagatcaaggaagagcttctgcattctgagaagcttaagacatactttgaagacaaccctagggacctccagctgctgcggcatgacctacctttgcaccccgcagtggtgaagccccacctgggccatgttcctgactacctggttcctcctgctctccgtggcctggtgcgccctcacaagaagcggaagaagctgtcttcctcttgtaggaaggccaagagagcaaagtcccagaacccactgcgcagcttcaagcacaaaggaaagaaattcagacccacagccaagccctcctgaggttgttgggcctctctggagctgagcacattgtggagcacaggcttacacccttcgtggacaggcgaggctctggtgcttactgcacagcctgaacagacagttctggggccggcagtgctgggccctttagctccttggcacttccaagctggcatcttgccc

SEQ ID NO: 125243 - DNA, 1936 bp, Homo sapiens
  Payload ID: 4580
  Gene Symbol: DDX6
  Gene Name: DEAD (Asp-Glu-Ala-Asp) box helicase 6
  Uniprot ID: P26196
  ENST ID: ENST00000526070
  CDS Start-End: 362-1813
attttgggagcttcgagtcaacaataaaggaccgagggtgccgagcgggagtggcctcgttggtaggacacgggcccgagtcgcgaggcttgggattgacgtgagtgaattcagatataactcaagcttgttagagggctttttaaaaataaaaagttgattccgtgcaagagagcaagttactgctgcttaccgttcagagacttacaggtgcttgcctgcattgcaataaaggactcatttattgagcaagacttatatttatctcttcattttggagagcctaataaactgttattacagtttctctactgactttcaaaagttttgaagtttgaaagacctttgcaattaaaacagcatgagcacggccagaacagagaaccctgttataatgggtctgtccagtcaaaatggtcagctgagaggccctgtgaaacccactggtggccctggaggagggggcacacagacacagcaacagatgaaccagctgaaaaacaccaacacaatcaataatggcactcagcagcaagcacagagtatgaccaccactattaaacctggtgatgactggaaaaagactttaaaactccctccaaaggatctaagaatcaaaacttcggatgtgacctccacaaaaggaaatgagtttgaagattactgtttgaaacgggagttactgatgggaatttttgaaatgggctgggaaaagccatctcctattcaggaggagagcattcccattgctttatctggtagggatatcttagctagagcaaaaaatggaacaggcaagagcggtgcctacctcattcccttacttgaacggctagacctgaagaaggacaatatacaagcaatggtgattgttcccactagagaacttgctctacaggtcagtcaaatttgcatccaggtcagcaaacacatgggaggggccaaagtgatggcaaccacaggaggaaccaatttacgagatgacataatgaggcttgatgatacagtgcacgtggtgattgctacccctgggagaatcctggatcttattaagaaaggagtagcaaaggttgatcatgtccagatgatagtattggatgaggcagataagttgctgtcacaggattttgtgcagataatggaggatattattctcacgctacctaaaaacaggcagattttactatattccgctactttccctcttagtgtacagaagttcatgaattcccatttgcagaaaccctatgagattaacctgatggaggaactaactctgaagggagtaacccagtactacgcatatgtaactgagcgccaaaaagtacactgcctcaacacacttttctccaggcttcagataaaccagtcgatcattttctgtaactcctctcagcgagttgaattgctagccaagaagatttctcaactgggttattcttgcttctatattcatgctaaaatgaggcaggaacatcgaaatcgtgtatttcatgatttccgaaatggcttatgccgcaatcttgtttgcactgatctgtttacccgaggtattgatatacaagctgtgaatgtggtaataaactttgatttcccaaagctggcagagacctatctccatcgtattggaagatcaggtcgctttggtcatcttggcttagccatcaacttgatcacatatgatgatcgcttcaacctgaaaagtattgaggagcagctgggaacagaaattaaacctattccgagcaacattgataagagcctgtatgtggcagaataccacagcgagcctgtagaagatgagaaaccttaacaagcatgtacgtccctgacagaacagctaagaggaacctttaaatgagggaaatcaaaatcttctttcctgggggaaatttgatgtcacaccatatataatagcaataaagggtaaaatacc

SEQ ID NO: 125244 - DNA, 4538 bp, Homo sapiens
  Payload ID: 4580
  Gene Symbol: DDX6
  Gene Name: DEAD (Asp-Glu-Ala-Asp) box helicase 6
  Uniprot ID: P26196
  ENST ID: ENST00000534980
  CDS Start-End: 307-1758
gcgacttcggcggcgccacgagagcgggcagcggaggagattgacgtgagtgaattcagatataactcaagcttgttagagggctttttaaaaataaaaagttgattccgtgcaagagagcaagttactgctgcttaccgttcagagacttacaggtgcttgcctgcattgcaataaaggactcatttattgagcaagacttatatttatctcttcattttggagagcctaataaactgttattacagtttctctactgactttcaaaagttttgaagtttgaaagacctttgcaattaaaacagcatgagcacggccagaacagagaaccctgttataatgggtctgtccagtcaaaatggtcagctgagaggccctgtgaaacccactggtggccctggaggagggggcacacagacacagcaacagatgaaccagctgaaaaacaccaacacaatcaataatggcactcagcagcaagcacagagtatgaccaccactattaaacctggtgatgactggaaaaagactttaaaactccctccaaaggatctaagaatcaaaacttcggatgtgacctccacaaaaggaaatgagtttgaagattactgtttgaaacgggagttactgatgggaatttttgaaatgggctgggaaaagccatctcctattcaggaggagagcattcccattgctttatctggtagggatatcttagctagagcaaaaaatggaacaggcaagagcggtgcctacctcattcccttacttgaacggctagacctgaagaaggacaatatacaagcaatggtgattgttcccactagagaacttgctctacaggtcagtcaaatttgcatccaggtcagcaaacacatgggaggggccaaagtgatggcaaccacaggaggaaccaatttacgagatgacataatgaggcttgatgatacagtgcacgtggtgattgctacccctgggagaatcctggatcttattaagaaaggagtagcaaaggttgatcatgtccagatgatagtattggatgaggcagataagttgctgtcacaggattttgtgcagataatggaggatattattctcacgctacctaaaaacaggcagattttactatattccgctactttccctcttagtgtacagaagttcatgaattcccatttgcagaaaccctatgagattaacctgatggaggaactaactctgaagggagtaacccagtactacgcatatgtaactgagcgccaaaaagtacactgcctcaacacacttttctccaggcttcagataaaccagtcgatcattttctgtaactcctctcagcgagttgaattgctagccaagaagatttctcaactgggttattcttgcttctatattcatgctaaaatgaggcaggaacatcgaaatcgtgtatttcatgatttccgaaatggcttatgccgcaatcttgtttgcactgatctgtttacccgaggtattgatatacaagctgtgaatgtggtaataaactttgatttcccaaagctggcagagacctatctccatcgtattggaagatcaggtcgctttggtcatcttggcttagccatcaacttgatcacatatgatgatcgcttcaacctgaaaagtattgaggagcagctgggaacagaaattaaacctattccgagcaacattgataagagcctgtatgtggcagaataccacagcgagcctgtagaagatgagaaaccttaacaagcatgctttgacaaattacaaaaggctcgtttggatctgtgacacatcgttttggggggaatgctcctctctttgtgggtttttcatcttttattttggaactatgaagacttaaaagagctcagacattttctttttttaactggtgaagagaaaaaggctgaaaagaaggaatataccttttttgttccacttgtttgcactgtgtgctgactgaacattagttgcactaactgctggtttttaaaaaatgttttctggggaaaggggacaaggaaggaaaagaaagaagagaaggggagaaaccctaaaaagagaagaatcttaatgaacacacaagcttgtcaatgatttcaaaattctccaacagctgactctcgtgcatttcaacttctccctgattcctcatccgttttttaagcctgaagagcttattacttatttgtgcgaagtgccttatgctatgagaccattcagaatatcatcttttagacacagcccgaggaatcaacaatagtaactctttctttccgtttttttttctttttcttttaaaaaatgtcttcttattttggtttcaggttgaagtctcttccctttctacccagtactcgagcccagggctagaagttgaaactcactagtaatgttaaacaccattttttttttctttttggggaggagttgatatgcaactgcagttcatccgcactgtaaatacatgtatttaaaaaaacaatcccaagtaaaaatttcttctgggctgagtagataaaaaacatcatcgctcccaaaggaaagagcagtctatcattgcaggagccatatgacaagcctttgtgctctatagcagacactaaagactgggttacatatgcctccagtagtagtatggcacttgatgtgtagacatgtcagagccttggccctctttcctctgtggcaaagcgtgtcccatagaaaattgggtgtgtatacttgtataactttgtaaataagttttttttctgggttcatatatatatatatatatacatatatatatatttttttttggatgaaggttgctgggattaaggggattagagtgattatgggagcagctaaagatgagaggggctcagttttacgcaacactaaattctagaaagtactttggcctcgtgctgtagagagcagatttctatggtaccctgtgttagtaaaggggcccagaaatctgggatgtactgtttgctgccacactgtctcatctagtacctttggagtaggtttaccagagagagcaaggaagcttcaaaacattgataattcaacatttattttgagaagctctgattttgcttcttccccctttctaaaagtttgaggaatatttcaagctctgcaacagggggcaaagattaatctaccttgcagtgtaggaattctattgagtggcagtgtcattgagcagtatatatataaagcacagatttgcatttcagaatattagccagtaccagctttggtaatgttagcagttctggagcttaattttctgtggatcatttcctgtagtgtgtaaatgtgttgccctctgcccgctttgatacataaacttttgcaggaatgggcaacctgagagctgttaactttcatgctacagaaagctgcttgccattctcttgcattgtgacaagaattgttacctgtcattttgcactgtaaattgctggcagatgctttacagtcaatagtgttgctttaaattgtgcccctcccaacatgcttgatgtttggcctgatctccaggcaaaaggagtgagatgaatcaaaaccagtgaacttttttttttaatgtttttaattcccttttaacccagtgtactaggtcaatcaggaggcatctggaaagggggggaaaaaagcaaaaaacaaaattaaaaaaaattgatttccatattttatttttcaaaaccctaaaatattacaaaataagtcccgcatatactttaatgttttaactcttttggacaaaggaatcaattacttgaagttgcttttttgactctgcctacttctgagcaaactatttgcgactcacccacaattccttggagatcaaaatcctacagatgcctcctgatgggacatagccctaactccttaacaactgtagcaagaactgcacggtacaaacccaaaaaagaacaagctcatctatttggaacccaagcctcatattttctgtccagtcaatgttggttactaaatagaaaacctaattaaggaagtaacttttttccagggaggggtgggagagggaatttaaaaggtgtcaacttttgaccaaaaaaattgtgcccttgtaccgatgcagctctctttctcccccacctcttgcgagataagagggatcattcatgtagaagaaaagagtataaatgcaattctgtatctcgctagagaacgtgtgggtgactaaacaaaaagtgcagtctccttcaccaactttagactgcgtggtgccacatgcctgtgggtccctcttaaagcacagacttaaaatggaaagtattactgaagtatagcctctaatgaggagtggcacttaaactatctgggacaccactactggacacggtcttgtagaggcagctgtccagttttggtgcttgactcttgaataggaattgttaaatggaaagatgctctgaggactaggtcaaagcctggtctttttttttttttttttttttttctttcttttttgggccctcataataagcattgtt

SEQ ID NO: 125245 - DNA, 6152 bp, Homo sapiens
  Payload ID: 4580
  Gene Symbol: DDX6
  Gene Name: DEAD (Asp-Glu-Ala-Asp) box helicase 6
  Uniprot ID: P26196
  ENST ID: ENST00000620157
  CDS Start-End: 362-1813
attttgggagcttcgagtcaacaataaaggaccgagggtgccgagcgggagtggcctcgttggtaggacacgggcccgagtcgcgaggcttgggattgacgtgagtgaattcagatataactcaagcttgttagagggctttttaaaaataaaaagttgattccgtgcaagagagcaagttactgctgcttaccgttcagagacttacaggtgcttgcctgcattgcaataaaggactcatttattgagcaagacttatatttatctcttcattttggagagcctaataaactgttattacagtttctctactgactttcaaaagttttgaagtttgaaagacctttgcaattaaaacagcatgagcacggccagaacagagaaccctgttataatgggtctgtccagtcaaaatggtcagctgagaggccctgtgaaacccactggtggccctggaggagggggcacacagacacagcaacagatgaaccagctgaaaaacaccaacacaatcaataatggcactcagcagcaagcacagagtatgaccaccactattaaacctggtgatgactggaaaaagactttaaaactccctccaaaggatctaagaatcaaaacttcggatgtgacctccacaaaaggaaatgagtttgaagattactgtttgaaacgggagttactgatgggaatttttgaaatgggctgggaaaagccatctcctattcaggaggagagcattcccattgctttatctggtagggatatcttagctagagcaaaaaatggaacaggcaagagcggtgcctacctcattcccttacttgaacggctagacctgaagaaggacaatatacaagcaatggtgattgttcccactagagaacttgctctacaggtcagtcaaatttgcatccaggtcagcaaacacatgggaggggccaaagtgatggcaaccacaggaggaaccaatttacgagatgacataatgaggcttgatgatacagtgcacgtggtgattgctacccctgggagaatcctggatcttattaagaaaggagtagcaaaggttgatcatgtccagatgatagtattggatgaggcagataagttgctgtcacaggattttgtgcagataatggaggatattattctcacgctacctaaaaacaggcagattttactatattccgctactttccctcttagtgtacagaagttcatgaattcccatttgcagaaaccctatgagattaacctgatggaggaactaactctgaagggagtaacccagtactacgcatatgtaactgagcgccaaaaagtacactgcctcaacacacttttctccaggcttcagataaaccagtcgatcattttctgtaactcctctcagcgagttgaattgctagccaagaagatttctcaactgggttattcttgcttctatattcatgctaaaatgaggcaggaacatcgaaatcgtgtatttcatgatttccgaaatggcttatgccgcaatcttgtttgcactgatctgtttacccgaggtattgatatacaagctgtgaatgtggtaataaactttgatttcccaaagctggcagagacctatctccatcgtattggaagatcaggtcgctttggtcatcttggcttagccatcaacttgatcacatatgatgatcgcttcaacctgaaaagtattgaggagcagctgggaacagaaattaaacctattccgagcaacattgataagagcctgtatgtggcagaataccacagcgagcctgtagaagatgagaaaccttaacaagcatgctttgacaaattacaaaaggctcgtttggatctgtgacacatcgttttggggggaatgctcctctctttgtgggtttttcatcttttattttggaactatgaagacttaaaagagctcagacattttctttttttaactggtgaagagaaaaaggctgaaaagaaggaatataccttttttgttccacttgtttgcactgtgtgctgactgaacattagttgcactaactgctggtttttaaaaaatgttttctggggaaaggggacaaggaaggaaaagaaagaagagaaggggagaaaccctaaaaagagaagaatcttaatgaacacacaagcttgtcaatgatttcaaaattctccaacagctgactctcgtgcatttcaacttctccctgattcctcatccgttttttaagcctgaagagcttattacttatttgtgcgaagtgccttatgctatgagaccattcagaatatcatcttttagacacagcccgaggaatcaacaatagtaactctttctttccgtttttttttctttttcttttaaaaaatgtcttcttattttggtttcaggttgaagtctcttccctttctacccagtactcgagcccagggctagaagttgaaactcactagtaatgttaaacaccattttttttttctttttggggaggagttgatatgcaactgcagttcatccgcactgtaaatacatgtatttaaaaaaacaatcccaagtaaaaatttcttctgggctgagtagataaaaaacatcatcgctcccaaaggaaagagcagtctatcattgcaggagccatatgacaagcctttgtgctctatagcagacactaaagactgggttacatatgcctccagtagtagtatggcacttgatgtgtagacatgtcagagccttggccctctttcctctgtggcaaagcgtgtcccatagaaaattgggtgtgtatacttgtataactttgtaaataagttttttttctgggttcatatatatatatatatatacatatatatatatttttttttggatgaaggttgctgggattaaggggattagagtgattatgggagcagctaaagatgagaggggctcagttttacgcaacactaaattctagaaagtactttggcctcgtgctgtagagagcagatttctatggtaccctgtgttagtaaaggggcccagaaatctgggatgtactgtttgctgccacactgtctcatctagtacctttggagtaggtttaccagagagagcaaggaagcttcaaaacattgataattcaacatttattttgagaagctctgattttgcttcttccccctttctaaaagtttgaggaatatttcaagctctgcaacagggggcaaagattaatctaccttgcagtgtaggaattctattgagtggcagtgtcattgagcagtatatatataaagcacagatttgcatttcagaatattagccagtaccagctttggtaatgttagcagttctggagcttaattttctgtggatcatttcctgtagtgtgtaaatgtgttgccctctgcccgctttgatacataaacttttgcaggaatgggcaacctgagagctgttaactttcatgctacagaaagctgcttgccattctcttgcattgtgacaagaattgttacctgtcattttgcactgtaaattgctggcagatgctttacagtcaatagtgttgctttaaattgtgcccctcccaacatgcttgatgtttggcctgatctccaggcaaaaggagtgagatgaatcaaaaccagtgaacttttttttttaatgtttttaattcccttttaacccagtgtactaggtcaatcaggaggcatctggaaagggggggaaaaaagcaaaaaacaaaattaaaaaaaattgatttccatattttatttttcaaaaccctaaaatattacaaaataagtcccgcatatactttaatgttttaactcttttggacaaaggaatcaattacttgaagttgcttttttgactctgcctacttctgagcaaactatttgcgactcacccacaattccttggagatcaaaatcctacagatgcctcctgatgggacatagccctaactccttaacaactgtagcaagaactgcacggtacaaacccaaaaaagaacaagctcatctatttggaacccaagcctcatattttctgtccagtcaatgttggttactaaatagaaaacctaattaaggaagtaacttttttccagggaggggtgggagagggaatttaaaaggtgtcaacttttgaccaaaaaaattgtgcccttgtaccgatgcagctctctttctcccccacctcttgcgagataagagggatcattcatgtagaagaaaagagtataaatgcaattctgtatctcgctagagaacgtgtgggtgactaaacaaaaagtgcagtctccttcaccaactttagactgcgtggtgccacatgcctgtgggtccctcttaaagcacagacttaaaatggaaagtattactgaagtatagcctctaatgaggagtggcacttaaactatctgggacaccactactggacacggtcttgtagaggcagctgtccagttttggtgcttgactcttgaataggaattgttaaatggaaagatgctctgaggactaggtcaaagcctggtctttttttttttttttttttttttctttcttttttgggccctcataataagcattgttactattggaagttgttttcacattctttccaatattaaatatgtatttttttaagtaatgataatattttccagtggctcatttggatgagaactaccctctatttttaatattaaaactacatccaactcatcatttagcctttggttgtacagttgtgtaatgggctatggactgttacacaccttaccacctctaggcctatgttttttctttccccatatattctgatggggataaatactgttttgcctctcccataggaatggaatacatttattctaaaatgatctttcacagaagtaagagagagggaaacctaaatatacctctaaattgtttgaagttggtcccagcagcataaaatgggttggccccaaagggttggagggtgggcttggttatcagtatttgttttcagaatgagatgggagcatctttcctttgccacgtgctttgtgcttgataacatcatgcttggttcaaacgacaactcagcacaaagccttgagtataaattgttggaatcaaaacatctcattctgatgacgtggtttaattttttaatttttttttttaataggggtgggagggagggtactttgccccagaagggagggtgtctgcactaaggatttagaaacactttggaagctcataacctcatcagaaactgcctttagccacactcctgaccttctagatgagtaacaaaaaaatgaaataagttcttggaaattaagccatttattttaatttgctatttttttcaatgttctaggtatctttaaatttgttattgtggaatcattttcctgccagatacctttatcaaaattattggcctcatgagagctgaagtaagtcagctttttggtgaactttagtggacttctgtgagattgtagttgtactttgtatctctaaatctaaagatagttttttaaaactcccaaagaaaatctgctctcctttctgatctaaaaactcatctttggggtaaagagttaagtgtccaaaggttgtcacagttcatgaggtcagagggagctagcctggcacctggactctgcccatccacagctgacagattccaacagaagtgtatttaaattctccagtagacaatgctgggtaagggagggggtagggctgggttattaagatacaggctgctgtattttacattggttgtgtgggaaggggagcctggagaaaacaaagtcactattcccttttttgaaacaggaaaaaaaattattttttgttcagtaaaaatggtagagaattccaatgtccctagccacaagggaccagttccactgagaagtgaacagtgggaactcaaaatttcagaaacattgggggaagggaaaattggctttctcttaattggcagatgttccagtggggggggggggggctctgtttttgttgggatgtgttatgttgtatgtacgcatatatggaccggagtctgctgagtttataaggttccaaaaatatggtaaaatcttggtttttgttaatttatctcaataaaagcccactggaactcc

SEQ ID NO: 125246 - DNA, 2883 bp, Homo sapiens
  Payload ID: 4580
  Gene Symbol: DDX6
  Gene Name: DEAD (Asp-Glu-Ala-Asp) box helicase 6
  ENST ID: ENST00000617381
  CDS Start-End: 318-881
tcagccaggcggcgacttcggcggcgccacgagagcgggcagcggaggagattgacgtgagtgaattcagatataactcaagcttgttagagggctttttaaaaataaaaagttgattccgtgcaagagagcaagttactgctgcttaccgttcagagacttacaggtgcttgcctgcattgcaataaaggactcatttattgagcaagacttatatttatctcttcattttggagagcctaataaactgttattacagtttctctactgactttcaaaagttttgaagtttgaaagacctttgcaattaaaacagcatgagcacggccagaacagagaaccctgttataatgggtctgtccagtcaaaatggtcagctgagaggccctgtgaaacccactggtggccctggaggagggggcacacagacacagcaacagatgaaccagctgaaaaacaccaacacaatcaataatggcactcagcagcaagcacagagtatgaccaccactattaaacctggtgatgactggaaaaagactttaaaactccctccaaaggatctaagaatcaaaacttcggatgtgacctccacaaaaggaaatgagtttgaagattactgtttgaaacgggagttactgatgggaatttttgaaatgggctgggaaaagccatctcctattcaggaggagagcattcccattgctttatctggtagggatatcttagctagagcaaaaaatggaacaggcaagagcggtgcctacctcattcccttacttgaacggctagacctgaagaaggacaatatacaagcaatggtgattgttcccactagagaacttgctctacaggtcagtcaaatttgcactgtgtgctgactgaacattagttgcactaactgctggtttttaaaaaatgttttctggggaaaggggacaaggaaggaaaagaaagaagagaaggggagaaaccctaaaaagagaagaatcttaatgaacacacaagcttgtcaatgatttcaaaattctccaacagctgactctcgtgcatttcaacttctccctgattcctcatccgttttttaagcctgaagagcttattacttatttgtgcgaagtgccttatgctatgagaccattcagaatatcatcttttagacacagcccgaggaatcaacaatagtaactctttctttccgtttttttttctttttcttttaaaaaatgtcttcttattttggtttcaggttgaagtctcttccctttctacccagtactcgagcccagggctagaagttgaaactcactagtaatgttaaacaccattttttttttctttttggggaggagttgatatgcaactgcagttcatccgcactgtaaatacatgtatttaaaaaaacaatcccaagtaaaaatttcttctgggctgagtagataaaaaacatcatcgctcccaaaggaaagagcagtctatcattgcaggagccatatgacaagcctttgtgctctatagcagacactaaagactgggttacatatgcctccagtagtagtatggcacttgatgtgtagacatgtcagagccttggccctctttcctctgtggcaaagcgtgtcccatagaaaattgggtgtgtatacttgtataactttgtaaataagttttttttctgggttcatatatatatatatatatacatatatatatatttttttttggatgaaggttgctgggattaaggggattagagtgattatgggagcagctaaagatgagaggggctcagttttacgcaacactaaattctagaaagtactttggcctcgtgctgtagagagcagatttctatggtaccctgtgttagtaaaggggcccagaaatctgggatgtactgtttgctgccacactgtctcatctagtacctttggagtaggtttaccagagagagcaaggaagcttcaaaacattgataattcaacatttattttgagaagctctgattttgcttcttccccctttctaaaagtttgaggaatatttcaagctctgcaacagggggcaaagattaatctaccttgcagtgtaggaattctattgagtggcagtgtcattgagcagtatatatataaagcacagatttgcatttcagaatattagccagtaccagctttggtaatgttagcagttctggagcttaattttctgtggatcatttcctgtagtgtgtaaatgtgttgccctctgcccgctttgatacataaacttttgcaggaatgggcaacctgagagctgttaactttcatgctacagaaagctgcttgccattctcttgcattgtgacaagaattgttacctgtcattttgcactgtaaattgctggcagatgctttacagtcaatagtgttgctttaaattgtgcccctcccaacatgcttgatgtttggcctgatctccaggcaaaaggagtgagatgaatcaaaaccagtgaacttttttttttaatgtttttaattcccttttaacccagtgtactaggtcaatcaggaggcatctggaaagggggggaaaaaagcaaaaaacaaaattaaaaaaaattgatttccatattttatttttcaaaaccctaaaatattacaaaataagtcccgcatatactttaatgttttaactcttttggacaaaggaatcaattacttgaagttgcttttttgactctgcctacttctgagcaaactatttgcgactcacccacaattccttggagatcaaaatcctacagatgcctcctgatgggacatagccctaactccttaacaactgtagcaagaactgcacggtacaaacccaaaaaagaacaagctcatctatttggaaccc

SEQ ID NO: 125247 - DNA, 3264 bp, Homo sapiens
  Payload ID: 4581
  Gene Symbol: DDX10
  Gene Name: DEAD (Asp-Glu-Ala-Asp) box polypeptide 10
  Uniprot ID: Q13206
  ENST ID: ENST00000322536
  CDS Start-End: 130-2757
aaaagctcgggggcgggcttctgagttcgcgcatgcgcctctgtgcgtttgtcccatgctggttccgtgagtctggccttaggtgtctcgtgtctggggttgatccgagctgtcgccgccgccgccgcaatgggcaaaacggccaactctccgggttcgggagcccgacccgacccggtgcggagcttcaatcgctggaagaaaaaacacagccataggcagaacaaaaagaagcagttgaggaagcaactgaagaaacccgaatggcaggtcgagcgcgagagtatcagccgcctcatgcagaactatgaaaagataaatgtaaatgaaatcacaagattttcagattttcccttgtccaaaaaaacattgaaaggtttgcaagaagctcagtaccgtttggtgactgagatacagaagcagaccattggattggctttgcaaggtaaagatgtacttggagcggccaaaactggatctggcaagactctggcttttcttgttccagtgctggaagccttatatcgtctgcaatggacttcaacagatgggctgggggttctcataatatcacctacgagagaactggcctatcagacctttgaggttctccgaaaagtaggaaagaatcatgacttctcagctggtctcatcattggtggaaaggatctaaaacacgaagctgagaggatcaacaacataaatatactcgtgtgcacaccaggtcggcttcttcaacacatggatgaaacagtatcttttcatgctaccgacctccaaatgttagttcttgatgaagcagatagaatcttggatatgggctttgctgataccatgaatgctgttattgaaaatctccccaagaaacgtcagactttacttttctcagcaacacaaactaaatctgtaaaggaccttgcacgcttgagtttgaaaaaccctgagtatgtctgggttcatgaaaaagcaaaatatagcacccctgccactttggaacagaactacatagtctgtgagctgcagcaaaaaataagtgtgctgtattcctttttgagaagccatctgaagaagaagagcattgtatttttttccagttgcaaagaggtccagtatctgtaccgagtgttttgccggctacgtcctggtgtttctatccttgcactccatggtcgacagcagcaaatgagaagaatggaagtctataatgagtttgtccgtaagagagctgcagtactctttgctactgatattgcagccaggggtctggatttcccggccgtgaattgggttcttcagtttgattgtcctgaggatgccaacacatatattcacagagcaggtagaactgccaggtacaaagaggatggtgaagctttgctaattttgctaccctcagaaaaagctatggtgcagcagcttcttcagaagaaagtacctgtgaaggaaatcaaaatcaatccagaaaaacttatagatgtccagaaaaaattggaatctattttagctcaagatcaagatttaaaagaaagagctcaaaggtgtttcgtctcctatgtacgatctgtatatctgatgaaggataaagaagtatttgatgtgagcaagttacctatacctgaatatgccctgtctcttggtcttgctgtggcaccacgcgtaagatttcttcagaaaatgcagaaacaacccaccaaagaattggtaaggagccaagccgataaagtaattgagccaagggctccctccctcaccaatgacgaagtggaagaatttagagcctacttcaatgagaaaatgtccatccttcaaaaaggtggaaaaagactcgaagggacagagcacagacaggataatgatactggtaatgaagaacaggaagaagaagaagacgatgaagaagaaatggaagagaaactggcaaaagcaaaaggatctcaagccccatctcttcctaacaccagtgaggcacagaagatcaaggaagttcctacacagttcttggacagagatgaggaggaagaagatgctgatttcttgaaggtgaagcggcataatgtgtttggattggaccttaaagacgagaaaacattacagaagaaagaaccttctaaatccagcatcaagaaaaaaatgaccaaagttgcagaagcaaaaaaagtaatgaagagaaattttaaagtgaataagaagataacatttactgatgaaggggagttggttcagcagtggccacaaatgcagaaatctgccatcaaggatgctgaggaagatgatgacacaggtggtatcaacttacataaagcaaaggaaagacttcaggaagaggacaaatttgacaaagaagaatataggaaaaaaattaaggcaaagcatcgggagaaaagactgaaagaaagggaagccagaagagaagccaacaagagacaagcaaaggccaaagatgaagaggaagcctttctggattggagtgatgatgatgatgatgatgatgatggatttgatccaagcacactcccagatccagataaatacagaagctctgaagattcagatagtgaagatatggaaaataaaataagtgataccaagaagaagcaggggatgaagaagaggagcaacagtgaagtggaagacgtgggaccaacaagtcataacagaaagaaggccaggtgggacactttagagcctttggataccggcctgtctttagcagaggatgaagagctggtgttacatctgctaagaagtcaaagctaaatacttcctgcgcctgccttctccttgaaaccttggttatgactgcgtaggcaagaagttgaaaaacagttgatttgggggcacttaggtaccatatgccccattcccaaagggcacatttctggatagaagcgatcgtatctccaagtccctctcacaggacatgctttgtgccatcactgagcatactcagatcgagggtggatgataccatttcctgaccccgttttccagcatgtgttctgttagatttttatccatgggttcctacgccttgtcattggaaacactgcctttgtcttactggcaagttctggagctcttgtgtcattgttagaaatccctgtcttgcttactgtacagaagtttctgttgctgttaaaattgctcatgatttcgacgtatttaatattttcaaagagactatgatggaccagccctgagaaagaatgagtatttttgaattgagatgatcaataataaacatatttcctataaaagaaagta

SEQ ID NO: 125248 - DNA, 6707 bp, Homo sapiens
  Payload ID: 4581
  Gene Symbol: DDX10
  Gene Name: DEAD (Asp-Glu-Ala-Asp) box polypeptide 10
  ENST ID: ENST00000526794
  CDS Start-End: 33-2540
ggttgatccgagctgtcgccgccgccgccgcaatgggcaaaacggccaactctccgggttcgggagcccgacccgacccggtgcggagcttcaatcgctggaagaaaaaacacagccataggcagaacaaaaagaagcagttgaggaagcaactgaagaaacccgaatggcaggtcgagcgcgagagtatcagccgcctcatgcagaactatgaaaagataaatgtaaatgaaatcacaagattttcagattttcccttgtccaaaaaaacattgaaaggtttgcaagaagctcagtaccgtttggtgactgagatacagaagcagaccattggattggctttgcaaggtaaagatgtacttggagcggccaaaactggatctggcaagactctggcttttcttgttccagtgctggaagccttatatcgtctgcaatggacttcaacagatgggctgggggttctcataatatcacctacgagagaactggcctatcagacctttgaggttctccgaaaagtaggaaagaatcatgacttctcagctggtctcatcattggtggaaaggatctaaaacacgaagctgagaggatcaacaacataaatatactcgtgtgcacaccaggtcggcttcttcaacacatggatgaaacagtatcttttcatgctaccgacctccaaatgttagttcttgatgaagcagatagaatcttggatatgggctttgctgataccatgaatgctgttattgaaaatctccccaagaaacgtcagactttacttttctcagcaacacaaactaaatctgtaaaggaccttgcacgcttgagtttgaaaaaccctgagtatgtctgggttcatgaaaaagcaaaatatagcacccctgccactttggaacagaactacatagtctgtgagctgcagcaaaaaataagtgtgctgtattcctttttgagaagccatctgaagaagaagagcattgtatttttttccagttgcaaagaggtccagtatctgtaccgagtgttttgccggctacgtcctggtgtttctatccttgcactccatggtcgacagcagcaaatgagaagaatggaagtctataatgagtttgtccgtaagagagctgcagtactctttgctactgatattgcagccaggggtctggatttcccggccgtgaattgggttcttcagtttgattgtcctgaggatgccaacacatatattcacagagcaggtagaactgccaggtacaaagaggatggtgaagctttgctaattttgctaccctcagaaaaagctatggtgcagcagcttcttcagaagaaagtacctgtgaaggaaatcaaaatcaatccagaaaaacttatagatgtccagaaaaaattggaatctattttagctcaagatcaagatttaaaagaaagagctcaaaggtgtttcgtctcctatgtacgatctgtatatctgatgaaggataaagaagtatttgatgtgagcaagttacctatacctgaatatgccctgtctcttggtcttgctgtggcaccacgcgtaagatttcttcagaaaatgcagaaacaacccaccaaagaattggtaaggagccaagccgataaagtaattgagccaagggctccctccctcaccaatgacgaagtggaagaatttagagcctacttcaatgagaaaatgtccatccttcaaaaaggtggaaaaagactcgaagggacagagcacagacaggataatgatactggtaatgaagaacaggaagaagaagaagacgatgaagaagaaatggaagagaaactggcaaaagcaaaaggatctcaagccccatctcttcctaacaccagtgaggcacagaagatcaaggaagttcctacacagttcttggacagagatgaggaggaagaagatgctgatttcttgaaggtgaagcggcataatgtgtttggattggaccttaaagacgagaaaacattacagaagaaagaaccttctaaatccagcatcaagaaaaaaatgaccaaagttgcagaagcaaaaaaagtaatgaagagaaattttaaagtgaataagaagataacatttactgatgaaggggagttggttcagcagtggccacaaatgcagaaatctgccatcaaggatgctgaggaagatgatgacacaggtggtatcaacttacataaagcaaaggaaagacttcaggaagaggacaaatttgacaaagaagaatataggaaaaaaattaaggcaaagcatcgggagaaaagactgaaagaaagggaagccagaagagaagccaacaagagacaagcaaaggccaaagatgaagaggaagcctttctggattggagtgatgatgatgatgatgatgatgatggatttgatccaagcacactcccagatccagataaatacagaagctctgaagattcagatagtgaagatatggaaaataaaataaggtatgtttttactatgggtatgaaatacatacttagtactctcacatcagtcttttaatgaatccaaaagacattactaagagttctactccaagagatgtttgttgcttttttttgatacctttacttagattcctggaaatcctgctgctgtttttttactcattttgctgcagattgttctggtcatgttagggcctttttgattatttctataatccctattaatagatatgagtatgatatatgagttgtgtttttcctttctctattctttttttttttttcttatctttctctgagtcctttatgcctaagtatttgatgcactaaaatctgttctctgcaaacagagttagggttttattttttttcattgtcagagaactctattaaagatactgctaaaaattgtccttgaattttaaaacgtggacattattcttccacattcttttatatggaattaaataacaaaatactggtggggctgggcgctgtggctcatgcctgtaatcccaacactttgggaggctgatatgggaggattgcttgaagccaggagtttgagaccagcctgatcaacaaagtgagaccccaaatctacaaaaacaaatttttttttaataaataaaataatggaacacttgtacagaaacaactcttgacaaattccttcactttaaagtctatttgctattatttatttgctaccattggcagaaacaaatgaaacgtgatgaataataatatgacttgctcaccatttgttttcagagtactatgtattagattacattaagagtttattgatttcaaagttgagaatgttaaacttcatgctcaatctaaaccagtgagcttctttacagaagggaggtactaataacagatagagttagtatgattgaagggaagaggaagcctgatggaacccttgaagtgctagcacagggtgtttgcagttggagaagtaggccatagagagctataatttgttttaaacaagaacattatgaaaaggtcttaaagattttcttaggacaaaatgctgtagagagacagagttactcttcatttgaatcttatgcatatttaaacatgaattattttttaataggaaaattcacttatccaaattcagttttctgaggtgatgccagaaacttccatttgctgttggacaactaggtggttgaacatatgagctttatatagtatgtgtaggctctaggtagtggacatcattgttttactaccacaagaggcaccacagataaaaataatttgattaggatttagaaaaatatacaaatgtttgtgccataaggattaaataatttaggttctgggcatattcctaatctttaaaaattgacctctaagagtaaatatacatgctctgagttccttggtgtatggtctgagacctagatgaaccccagtggggtcaggtttgcttccccttgtgttcctatataaatgcacctcttttagaatggtttatggggtctgtattttggtagatgtgatttaatgtaacatacatgactttcagtcattgtcttccaagtgtttccatgtaacttgactccctggaagcaacattaattggttcttgcatttctgcagccatattttgcatatctatctaatatacctttaaaaaatagtcaacctttgaaacctttggcaggatgtcagcagtccttctgcatttgatttatatggattttttccctaacattttagatagtttctgggtcatctttcatctgtgtacagcaggcatttcatttaattcttctgccatttcttgcccttatagtgacatttccatgctaccacctagttaatagaacttgttctctagtagctcatgtgtttcatcctgttaattggctgtaaatgttttgtacctagaaattgtccttacattttttttttggtaccaacacttaactgctctagcctcaattcccacccctaatattaatgtcatggcacagagaatgccttgacatatttgaattgattaattgattgatgaaggagatttacagggttaaaaaagaaatgtaattataagagactatatcattggtcctaatattaataggttaaatgatacaagagatgacagaatatagatggagagttggaagaagccaagttcatacagtgtaatggtgatgaacaagaaggtaggagtactgtgagagatgacaaagcatcttaacttaaagacaagggttcagatggaaagtatttaagcattatatgaaaattaaaacagttttaatttcatgcacagctaacaagtcagcattagtggagactgggattggtcaacttgttttaagctgacagaaattgtcttttgttgaagaggaggatatcaacaagggcttgatcactgatgagggattttattcctgtagcgtatataagggcttcctagcaggttttttgttttggcctgtgaacacagagattgtctaatcttatagcctccttctagatgaaaaaaccaaggctttaaaggctaaaataacttgtctgtgatcacaataaaagttagggacagatcagtgtgatctttgtaaattaaactaactccctagttctagaatctcagttaggttgtatagaattaccctggtgttgagagaggtagctcaggataatgtcatttgactaaacacctggatccatggactaaccataagatagacatggtttcccaccctcagcattattgatattccggcccagatagttttttgtttgagaaagggtataagctgcttaacatcatccttggcctctaccactagcatttgggacaactaaaaatgtcttcagacatggcaggtatctctgaggaagcaaaattgcccacagttgagaacaactggattagaccccagatggcagatacatattactggtgcttaatttcccctgtccttcagtcagagtaggttttttctctattcacttccatttggcctaagcagtcctcagcacagtctctgtcaatcaattggaactggtacggaaggtaaaacctatttgccattcctggactagcaggcaggatttggagtaaattataagtagtagcctacatctgtaatttctatttatactttaatttccatttttctcccttttctgtggtttatttgcctcaatggcaatgaatcaagatgtatgtaaactaaaaccaaaattgttttagataaagaaaatgtatttggaagattgtatatactagaattttgacagtggtaattgctgttgctgctagcatttgcatagtagcgccagtaaagtttttctgtattcttccagtttggctacacactggaagcatacagcttccatctgcttatgcttctcataagctgtatgattacgtgctaagatcttatgatgtcagctttagtgagtcctcttgacatgttcacaggttttacttgctgtgctgtctctagccctctactcagtaattgaggcaatggctagtactccagcctcttggacatcatcacatctctcagtaggttattctctggctatacacttagcattttcagagacgaattcactcttatgggactagatagaccaattggaaagtagctattagtcctggccgggcgtggtggctcacacctgtaatcctagcacttcaggaggccgagatgagtggatcacgaggtcacgagatcgagaccatctggctaacacagtgaaaccccgtctgtactaaaaatacaaaaaattagctgggcatagtggtgggcgcctgtagtcccagctgctggggaggctgaggcaggagaatggtgtgaacctgggaggcggagcttgcagtgagccgagatcgtgccactgcactccagcctgtgcgacagagcaagactcccagagagagagagccgagcacagtggctcacgcctgtaatcccagcactttgggaggccgaggtgggcggatcacaaggtcaagagattgagaccatactggccaagctggtgaaaccctgtctctattaaaaatacaaaaattagccgggcgtggtggcgggcgcctgtagtcccagctacttgggaggctgaggcaggagaattgcttgaacctgggaggcagaggttgcagtgagccgagattgtgccactgcactccagcctgggcaacagagggagactccatctc

SEQ ID NO: 125249 - DNA, 3796 bp, Homo sapiens
  Payload ID: 4582
  Gene Symbol: DDX18
  Gene Name: DEAD (Asp-Glu-Ala-Asp) box polypeptide 18
  Uniprot ID: Q9NVP1
  ENST ID: ENST00000263239
  CDS Start-End: 129-2141
ccagcgttcctgtgacgcgtttcctgttggccgagctgcgcacgtgcggccggaagggaagtaacgtcagcctgagaactgagtagctgtactgtgtggcgccttattctaggcacttgttgggcagaatgtcacacctgccgatgaaactcctgcgtaagaagatcgagaagcggaacctcaaattgcggcagcggaacctaaagtttcagggggcctcaaatctgaccctatcggaaactcaaaatggagatgtatctgaagaaacaatgggaagtagaaaggttaaaaaatcaaaacaaaagcccatgaatgtgggcttatcagaaactcaaaatggaggcatgtctcaagaagcagtgggaaatataaaagttacaaagtctccccagaaatccactgtattaaccaatggagaagcagcaatgcagtcttccaattcagaatcaaaaaagaaaaagaagaaaaagagaaaaatggtgaatgatgctgagcctgatacgaaaaaagcaaaaactgaaaacaaagggaaatctgaagaagaaagtgccgagactactaaagaaacagaaaataatgtggagaagccagataatgatgaagatgagagtgaggtgcccagtctgcccctgggactgacaggagcttttgaggatacttcgtttgcttctctatgtaatcttgtcaatgaaaacactctgaaggcaataaaagaaatgggttttacaaacatgactgaaattcagcataaaagtatcagaccacttctggaaggcagggatcttctagcagctgcaaaaacaggcagtggtaaaaccctggcttttctcatccctgcagttgaactcattgttaagttaaggttcatgcccaggaatggaacaggagtccttattctctcacctactagagaactagccatgcaaacctttggtgttcttaaggagctgatgactcaccacgtgcatacctatggcttgataatgggtggcagtaacagatctgctgaagcacagaaacttggtaatgggatcaacatcattgtggccacaccaggccgtctgctggaccatatgcagaataccccaggatttatgtataaaaacctgcagtgtctggttattgatgaagctgatcgtatcttggatgtggggtttgaagaggaattaaagcaaattattaaacttttgccaacacgtagacagactatgctcttttctgccacccaaactcgaaaagttgaagacctggcaaggatttctctgaaaaaggagccattgtatgttggcgttgatgatgataaagcgaatgcaacagtggatggtcttgaacagggatatgttgtttgtccttctgaaaagagattccttctgctctttacattccttaagaagaaccgaaagaagaagcttatggtcttcttttcatcttgtatgtctgtgaaataccactatgagttgctgaactacattgatttgcccgtcttggccattcatggaaagcaaaagcaaaataagcgtacaaccacattcttccagttctgcaatgcagattcgggaacactattgtgtacggatgtggcagcgagaggactagacattcctgaagtcgactggattgttcagtatgaccctccggatgaccctaaggaatatattcatcgtgtgggtagaacagccagaggcctaaatgggagagggcatgccttgctcattttgcgcccagaagaattgggttttcttcgctacttgaaacaatccaaggttccattaagtgaatttgacttttcctggtctaaaatttctgacattcagtctcagcttgagaaattgattgaaaagaattactttcttcataagtcagcccaggaagcatataagtcatacatacgagcctatgattcccattctctgaaacagatctttaatgttaataacctaaatttgcctcaggttgctctgtcatttggtttcaaggtgcctcccttcgttgatctgaacgtcaacagtaatgaaggcaagcagaaaaagcgaggaggtggtggtggatttggctaccagaaaaccaagaaagttgagaaatccaaaatctttaaacacattagcaagaaatcatctgacagcaggcagttctctcactgaacacatgccttcctttcatcttgaataactttgtcctaaaatgaattttttttccccttgatttaacaggatttttgtagactttagaatttggacttacctaacaagagtataaattgacttgggttgcaagcactgagcactgttacttctatcacgtctctcttttatttctgggatataaaacaggctttaagtttcttggttgcccaagggcagagcaaggaatatctggtgtttcttgtgatgataatattttaattttaaatatccctccctcatacaagtgtatgttaccattttaatataattctttttgtacctttccttcttgttttgcgaagatttttgtggcatggattgctgtgctcactgctgtaaaaggtgacctagtgtactgggcagctggtggcggtgcagaaaagagtctcaggttattttttgtttttagttatttcttggaccttgacagtatctaatgactcctcctgaaaatgctgcagtataaaagagcaaagagctttgggaaatacctaagaagcaccttaagattagggtggcattgcttttatagattcttgattttaaagcaacaggcctttctcaggtgttgcattttttggagcaaaaactatgggttgtaatttgaataaagtgtcactaagcagttataacgtttgatggctggggggtaggaagaggatggaattgagatgtttgagcctcatttacatcaatagaggtgtaatgtactgcatttcttcatttggtaacataacaaagactttcatacaaagaacgatgatgctcctcattaagatttgtttaattcaaggtggtttggatttggtaagcctttgcactctgtagagtacttagaagacaagggcaacttacttggagttagagccaagctgtcagacggtgcccagcacacattaatgttagcttctttctgagaaaaaaatacctcttccaggccctgaaacaaaaaatacatttgctgtgaagattgaaaatgaacaaagttagaaaaaaaaacagcaaaatcagtgatttagtcagatgagtttttcgttgtaggagcacttgatttctagtgtgttttgtacagtatataactacaagatagtacattttgtagcagttcaaagccaaagttgctagcatcattttgctgttgtgccagttaatcataggatcccattaaataagtgtgctaacatcgaatatagagaaaactggtaaagaacattccagtaggaaaagaaaagaacaatcttccatttctgggcttggccaccatcaccctggtcggacctgtcctggacttccaaccttgactgctgagctcctggcttagcttcttgggttcctaattcctggtgtttaataattctctccacgatcatgtttttctgattttttttttcagaaataatgttttttaaaagacaaaaacaaagggaagaatatttaattactgagcagaagtaaatactgttggcattttgtacataatctaatttttatatgcatgttcatgctttttaatttttttatcaaaaattaagtcatctacctactacttgtaaccagcttgtttcataacatgttattttcctgtgtcattaaataattacttcaatgttgta

SEQ ID NO: 125250 - DNA, 644 bp, Homo sapiens
  Payload ID: 4582
  Gene Symbol: DDX18
  Gene Name: DEAD (Asp-Glu-Ala-Asp) box polypeptide 18
  ENST ID: ENST00000415038
  CDS Start-End: 1-644
aataccccaggatttatgtataaaaacctgcagtgtctggttattgatgaagctgatcgtatcttggatgtggggtttgaagaggaattaaagcaaattattaaacttttgccaacacgtagacagactatgctcttttctgccacccaaactcgaaaagttgaagacctggcaaggatttctctgaaaaaggagccattgtatgttggcgttgatgatgataaagcgaatgcaacagtggatggtcttgaacagaagaaccgaaagaagaagcttatggtcttcttttcatcttgtatgtctgtgaaataccactatgagttgctgaactacattgatttgcccgtcttggccattcatggaaagcaaaagcaaaataagcgtacaaccacattcttccagttctgcaatgcagattcgggaacactattgtgtacggatgtggcagcgagaggactagacattcctgaagtcgactggattgttcagtatgaccctccggatgaccctaaggaatatattcatcgtgtgggtagaacagccagaggcctaaatgggagagggcatgccttgctcattttgcgcccagaagaattgggttttcttcgctacttgaaacaatccaaggttccattaagtgaatt

SEQ ID NO: 125251 - DNA, 2997 bp, Homo sapiens
  Payload ID: 4583
  Gene Symbol: DDX19A
  Gene Name: DEAD (Asp-Glu-Ala-Asp) box polypeptide 19A
  Uniprot ID: Q9NUU7
  ENST ID: ENST00000302243
  CDS Start-End: 164-1600
agaatgatgatgtcgcacgctgggtgggaactgacgtcacctgtgctcaccgccgcttccggtccgcgtgaggtgcattctcgcgccggtggcgaggttagggcccgcgttgcgacgtggtgcagcgcatattttcacaagtgggtctcccttgtccgggactatggccaccgactcgtgggccctggcggtggacgagcaggaagcggctgtcaagtcgatgaccaatttgcagatcaaggaagagaaagtcaaagcagataccaatggtattatcaaaaccagtaccactgccgagaaaacagatgaagaggagaaagaggacagagctgcccagtccttactcaacaagctgatcagaagcaaccttgttgataacacaaaccaagtggaagtcctgcaacgggatccaaactcccctctgtactcggtgaagtcgtttgaagagcttcggctgaaaccacagcttctccagggagtctatgccatgggcttcaatcgaccctccaagatacaagagaacgcattacccatgatgcttgctgaacccccacagaatctgattgcccagtctcagtctggcactggtaaaacagctgcctttgtcttagccatgctcagccgagtggagccatcagacagatacccccagtgtctgtgcctctccccaacatatgagctggcgcttcaaacaggaaaagtgattgagcagatgggcaaattttacccagaactgaagcttgcctatgccgttcgaggcaataaattggaaagaggccagaagatcagtgagcagattgtcattggcacccctgggaccgtgctggactggtgctccaagctcaagttcattgatcccaagaaaatcaaggtgtttgttctggatgaggctgatgtcatgatagccactcagggccaccaagatcagagcatccgcatccagaggatgctgcccaggaactgccagatgctgcttttctccgccacctttgaagactctgtgtggaagtttgcccagaaagtggtcccagacccaaatgttatcaaactgaagcgtgaggaagagaccctggataccatcaagcagtactatgtcctgtgcagcagcagagacgagaagttccaggccttgtgtaacctctacggggccatcaccattgctcaagccatgatcttctgccatactcgcaaaacagctagttggctggcagcagagctctcaaaagaaggccaccaggtggctctgctgagtggggagatgatggtggagcagagggctgcggtgattgagcgcttccgagagggcaaagagaaggttttggtgaccaccaacgtgtgtgcccgcggcattgatgttgaacaagtgtctgtcgtcatcaactttgatcttcccgtggacaaggacgggaatcctgacaatgagacctacctgcaccggatcgggcgcacgggccgctttggcaagaggggcctggcagtgaacatggtggacagcaagcacagcatgaacatcctgaacagaatccaggagcattttaataagaagatagaaagattggacacagatgatttggacgagattgagaaaatagccaactgagaagctccaccagccactgatgccagccctggcactgcccctgcacaggagacaagtgcatttagggcacaggccccgacatcaccccaaggacaacggcagaagtagagagaaactacctacctcacttcaaattatgtttggacttgacaaaaataggtgcaaatgatggggggcaatagaagaaaaaatttgcattttggaaaattgggtcctttccccacttttttaaagccacattcccccatctttataataatctggtcacagtggtagtcgctggccccaggaccccctcctgattttggctaggcatcgtggaaccagctccagcccctgaagaaacgatagatgtgcaggttgtgcggaagaggctgagtggaaaatggtgtgagccccaccgctgtgcatcgaatgagggaagtggcagcagagaggccagagctgccccctctctgtctcttcaatggacccttcacaagtgtttctcctgcccttggggctgtcttccttctcctgaaatccagagactttcttgctcatcccttctccctttcacttctgttctctgctgcagaaagcagacttgcatatccctgatgagcagctcggctacttttgtaaacttcagatttggagagaaacacgaaagtctgaatcctgaccccttgagagagagtgatctggcgagggccgatgaaggggctgggcctggtcttgccttctcttctctcggttgctccctctgcctaggcccctggtactcagtcacggcagccaggagaccccaggtgagtttctgagcgcatacgtagttggttcttacccccaggtgtcacacggggccgagagctgagcaagaatttggaatggaagttatgaccaagggaattatgctgttcatttataatagtggacattatggagagctctgattcctacataatatgaataaggatggataggccgggcgtggtggctcatgcctataatcccagcacgttgggaggctgaggcgggcggatcggttgagctcaggcgttcgggaccagcctggccaacatgatgaaaccccgtctctaccaaaaatagaaaaaaatatagccgggcctggtggcgcacgcctgtagtcccagctactcgggaggctgaggtaggaggatcgcttgagcctgggtagaggctgctgtgagctgaaatggcgccactgcactccagcctgggtaacagagcgagaccccgactcaataaataaataaggatggataaattgtagcgtatgcaccattcattatgctaagacattttaaagtaattatgagaaacgctctactaatgatttgtttttatttgtatttttctgcttattagacaaatatatactcattttaaaaagg

SEQ ID NO: 125252 - DNA, 1703 bp, Homo sapiens
  Payload ID: 4583
  Gene Symbol: DDX19A
  Gene Name: DEAD (Asp-Glu-Ala-Asp) box polypeptide 19A
  ENST ID: ENST00000417604
  CDS Start-End: 49-1392
cgtggtgcagcgcatattttcacaagtgggtctcccttgtccgggactatggccaccgactcgtgggccctggcggtggacgagcaggaagcggctgtcaagtcgatgaccaatttgcagatcaaggaagagaaagtcaaagcagataccaatggtattatcaaaaccagtaccactgccgagaaaacagatgaagaggagaaagaggacagagctgcccagtccttactcaacaagctgatcagaagcaaccttgttgataacacaaaccaagtggaagtcctgcaacgggatccaaactcccctctgtactcggtgaagtcgtttgaagagcttcggctcccacagaatctgattgcccagtctcagtctggcactggtaaaacagctgcctttgtcttagccatgctcagccgagtggagccatcagacagatacccccagtgtctgtgcctctccccaacatatgagctggcgcttcaaacaggaaaagtgattgagcagatgggcaaattttacccagaactgaagcttgcctatgccgttcgaggcaataaattggaaagaggccagaagatcagtgagcagattgtcattggcacccctgggaccgtgctggactggtgctccaagctcaagttcattgatcccaagaaaatcaaggtgtttgttctggatgaggctgatgtcatgatagccactcagggccaccaagatcagagcatccgcatccagaggatgctgcccaggaactgccagatgctgcttttctccgccacctttgaagactctgtgtggaagtttgcccagaaagtggtcccagacccaaatgttatcaaactgaagcgtgaggaagagaccctggataccatcaagcagtactatgtcctgtgcagcagcagagacgagaagttccaggccttgtgtaacctctacggggccatcaccattgctcaagccatgatcttctgccatactcgcaaaacagctagttggctggcagcagagctctcaaaagaaggccaccaggtggctctgctgagtggggagatgatggtggagcagagggctgcggtgattgagcgcttccgagagggcaaagagaaggttttggtgaccaccaacgtgtgtgcccgcggcattgatgttgaacaagtgtctgtcgtcatcaactttgatcttcccgtggacaaggacgggaatcctgacaatgagacctacctgcaccggatcgggcgcacgggccgctttggcaagaggggcctggcagtgaacatggtggacagcaagcacagcatgaacatcctgaacagaatccaggagcattttaataagaagatagaaagattggacacagatgatttggacgagattgagaaaatagccaactgagaagctccaccagccactgatgccagccctggcactgcccctgcacaggagacaagtgcatttagggcacaggccccgacatcaccccaaggacaacggcagaagtagagagaaactacctacctcacttcaaattatgtttggacttgacaaaaataggtgcaaatgatggggggcaatagaagaaaaaatttgcattttggaaaattgggtcctttccccacttttttaaagccacattcccccatctttataataatctggtcacagtggtagtcgctggccccaggaccccctcctgattttggcta

SEQ ID NO: 125253 - DNA, 551 bp, Homo sapiens
  Payload ID: 4583
  Gene Symbol: DDX19A
  Gene Name: DEAD (Asp-Glu-Ala-Asp) box polypeptide 19A
  ENST ID: ENST00000566167
  CDS Start-End: 97-240
gtgaggtgcattctcgcgccggtggcgaggttagggcccgcgttgcgacgtggtgcagcgcatattttcacaagtgggtctcccttgtccgggactatggccaccgactcgtgggccctggcggtggacgagcaggaagcggctgtcaagtcggtattatcaaaaccagtaccactgccgagaaaacagatgaagaggagaaagaggacagagctgcccagtccttactcaacaagctgatcagaagcaaccttgttgataacacaaaccaagtggaagtcctgcaacgggatccaaactcccctctgtactcggtgaagtcgtttgaagagcttcggctagtcccactctgtcaccctggttggagtgcagtggctcagtcacagatcactgcagccttgacctcctgagctcaagtgagcctcccacctcagcctcttgagtaactgggactacaggaaaccacagcttctccagggagtctatgccatgggcttcaatcgaccctccaagatacaagagaacgcattacccatgatgcttgctgaacc

SEQ ID NO: 125254 - DNA, 577 bp, Homo sapiens
  Payload ID: 4583
  Gene Symbol: DDX19A
  Gene Name: DEAD (Asp-Glu-Ala-Asp) box polypeptide 19A
  ENST ID: ENST00000561574
  CDS Start-End: 88-243
attctcgcgccggtggcgaggttagggcccgcgttgcgacgtggtgcagcgcatattttcacaagtgggtctcccttgtccgggactatggccaccgactcgtgggccctggcggtggacgagcaggaagcggctgtcaagtcgagacggggtttctccatgttggtcaggctggtctcgaactcccgacctcaagtgatccgcccacctcggcctcccaaagtgctgggattacagccgtgagtcaccgcgcccagccgatgaccaatttgcagatcaaggaagagaaagtcaaagcagataccaatggtattatcaaaaccagtaccactgccgagaaaacagatgaagaggagaaagaggacagagctgcccagtccttactcaacaagctgatcagaagcaaccttgttgataacacaaaccaagtggaagtcctgcaacgggatccaaactcccctctgtactcggtgaagtcgtttgaagagcttcggctgaaaccacagcttctccagggagtctatgccatgggcttcaatcgaccctccaagatacaagagaacgcattacccatgat

SEQ ID NO: 125255 - DNA, 1643 bp, Homo sapiens
  Payload ID: 4583
  Gene Symbol: DDX19A
  Gene Name: DEAD (Asp-Glu-Ala-Asp) box polypeptide 19A
  ENST ID: ENST00000569319
  CDS Start-End: 88-324
attctcgcgccggtggcgaggttagggcccgcgttgcgacgtggtgcagcgcatattttcacaagtgggtctcccttgtccgggactatggccaccgactcgtgggccctggcggtggacgagcaggaagcggctgtcaagtcgatgaccaatttgcagatcaaggaagagaaagtcaaagcagataccaatggtattatcaaaaccagtaccactgccgagaaaacagatgaagaggagaaaggaaaccacagcttctccagggagtctatgccatgggcttcaatcgaccctccaagatacaagagaacgcattacccatgatgcttgctgaacccccacagaatctgattgcccagtctcagtctggcactggtaaaacagctgcctttgtcttagccatgctcagccgagtggagccatcagacagatacccccagtgtctgtgcctctccccaacatatgagctggcgcttcaaacaggaaaagtgattgagcagatgggcaaattttacccagaactgaagcttgcctatgccgttcgaggcaataaatcagaagagaccaagactgaggggaacactcatgtgtgttttgaaatctggaaataacttgttctcctagtcctagaaggatgggcagggctttgatttccagagctggctttgcctttgaaatacctatgaaaatcacctgggtctccacagtggaaagaggccagaagatcagtgagcagattgtcattggcacccctgggaccgtgctggactggtgctccaagctcaagttcattgatcccaagaaaatcaaggtgtttgttctggatgaggctgatgtcatgatagccactcagggccaccaagatcagagcatccgcatccagaggatgctgcccaggaactgccagatgctgcttttctccgccacctttgaagactctgtgtggaagtttgcccagaaagtggtcccagacccaaatgttatcaaactgaagcgtgaggaagagaccctggataccatcaagcagtactatgtcctgtgcagcagcagagacgagaagttccaggccttgtgtaacctctacggggccatcaccattgctcaagccatgatcttctgccatactcgcaaaacagctagttggctggcagcagagctctcaaaagaaggccaccaggtggctctgctgagtggggagatgatggtggagcagagggctgcggtgattgagcgcttccgagagggcaaagagaaggttttggtgaccaccaacgtgtgtgcccgcggcattgatgttgaacaagtgtctgtcgtcatcaactttgatcttcccgtggacaaggacgggaatcctgacaatgagacctacctgcaccggatcgggcgcacgggccgctttggcaagaggggcctggcagtgaacatggtggacagcaagcacagcatgaacatcctgaacagaatccaggagcattttaataagaagatagaaagattggacacagatgatttggacgagattgagaaaatagccaactgagaagctccaccagccactgatgccagccctggcactgcccctgcacaggagacaagtgcatttagggcacaggccccgacatcaccccaaggacaacggcaga

SEQ ID NO: 125256 - DNA, 3067 bp, Homo sapiens
  Payload ID: 4583
  Gene Symbol: DDX19A
  Gene Name: DEAD (Asp-Glu-Ala-Asp) box polypeptide 19A
  ENST ID: ENST00000569771
  CDS Start-End: 110-499
gcttccggtccgcgtgaggtgcattctcgcgccggtggcgaggttagggcccgcgttgcgacgtggtgcagcgcatattttcacaagtgggtctcccttgtccgggactatggccaccgactcgtgggccctggcggtggacgagcaggaagcggctgtcaagtcgatgaccaatttgcagatcaaggaagagaaagtcaaagcagataccaatggtattatcaaaaccagtaccactgccgagaaaacagatgaagaggagaaagaggacagagctgcccagtccttactcaacaagctgatcagaagcaaccttgttgataacacaaaccaagtggaagtcctgcaacgggatccaaactcccctctgtactcggtgaagtcgtttgaagagcttcggctgaaaccacagcttctccagggagtctatgccatgggcttcaatcgaccctccaagatacaagagaacgcattacccatgatgcttgctgaaccgtgagtatgcagatgaagcgcatctcacccagtgtgattagatcaatcttccccaaactgcgtttttgtgcctgagaacagaaggagctgtttggggccacgtgtttcctcaggaatacagcttagcccacagaatctgattgcccagtctcagtctggcactggtaaaacagctgcctttgtcttagccatgctcagccgagtggagccatcagacagatacccccagtgtctgtgcctctccccaacatatgagctggcgcttcaaacaggaaaagtgattgagcagatgggcaaattttacccagaactgaagcttgcctatgccgttcgaggcaataaattggaaagaggccagaagatcagtgagcagattgtcattggcacccctgggaccgtgctggactggtgctccaagctcaagttcattgatcccaagaaaatcaaggtgtttgttctggatgaggctgatgtcatgatagccactcagggccaccaagatcagagcatccgcatccagaggatgctgcccaggaactgccagatgctgcttttctccgccacctttgaagactctgtgtggaagtttgcccagaaagtggtcccagacccaaatgttatcaaactgaagcgtgaggaagagaccctggataccatcaagcagtactatgtcctgtgcagcagcagagacgagaagttccaggccttgtgtaacctctacggggccatcaccattgctcaagccatgatcttctgccatactcgcaaaacagctagttggctggcagcagagctctcaaaagaaggccaccaggtggctctgctgagtggggagatgatggtggagcagagggctgcggtgattgagcgcttccgagagggcaaagagaaggttttggtgaccaccaacgtgtgtgcccgcggcattgatgttgaacaagtgtctgtcgtcatcaactttgatcttcccgtggacaaggacgggaatcctgacaatgagacctacctgcaccggatcgggcgcacgggccgctttggcaagaggggcctggcagtgaacatggtggacagcaagcacagcatgaacatcctgaacagaatccaggagcattttaataagaagatagaaagattggacacagatgatttggacgagattgagaaaatagccaactgagaagctccaccagccactgatgccagccctggcactgcccctgcacaggagacaagtgcatttagggcacaggccccgacatcaccccaaggacaacggcagaagtagagagaaactacctacctcacttcaaattatgtttggacttgacaaaaataggtgcaaatgatggggggcaatagaagaaaaaatttgcattttggaaaattgggtcctttccccacttttttaaagccacattcccccatctttataataatctggtcacagtggtagtcgctggccccaggaccccctcctgattttggctaggcatcgtggaaccagctccagcccctgaagaaacgatagatgtgcaggttgtgcggaagaggctgagtggaaaatggtgtgagccccaccgctgtgcatcgaatgagggaagtggcagcagagaggccagagctgccccctctctgtctcttcaatggacccttcacaagtgtttctcctgcccttggggctgtcttccttctcctgaaatccagagactttcttgctcatcccttctccctttcacttctgttctctgctgcagaaagcagacttgcatatccctgatgagcagctcggctacttttgtaaacttcagatttggagagaaacacgaaagtctgaatcctgaccccttgagagagagtgatctggcgagggccgatgaaggggctgggcctggtcttgccttctcttctctcggttgctccctctgcctaggcccctggtactcagtcacggcagccaggagaccccaggtgagtttctgagcgcatacgtagttggttcttacccccaggtgtcacacggggccgagagctgagcaagaatttggaatggaagttatgaccaagggaattatgctgttcatttataatagtggacattatggagagctctgattcctacataatatgaataaggatggataggccgggcgtggtggctcatgcctataatcccagcacgttgggaggctgaggcgggcggatcggttgagctcaggcgttcgggaccagcctggccaacatgatgaaaccccgtctctaccaaaaatagaaaaaaatatagccgggcctggtggcgcacgcctgtagtcccagctactcgggaggctgaggtaggaggatcgcttgagcctgggtagaggctgctgtgagctgaaatggcgccactgcactccagcctgggtaacagagcgagaccccgactcaataaataaataaggatggataaattgtagcgtatgcaccattcattatgctaagacattttaaagtaattatgagaaacgctctactaatgatttgtttttatttgtatttttctgcttattagacaaatatatactcattttaaaaa

SEQ ID NO: 125257 - DNA, 1533 bp, Homo sapiens
  Payload ID: 4583
  Gene Symbol: DDX19A
  Gene Name: DEAD (Asp-Glu-Ala-Asp) box polypeptide 19A
  ENST ID: ENST00000575878
  CDS Start-End: 1-1190
attggctgacaggtgatttctggatgtcaggaacatttctgattaggaaaccacagcttctccagggagtctatgccatgggcttcaatcgaccctccaagatacaagagaacgcattacccatgatgcttgctgaacccccacagaatctgattgcccagtctcagtctggcactggtaaaacagctgcctttgtcttagccatgctcagccgagtggagccatcagacagatacccccagtgtctgtgcctctccccaacatatgagctggcgcttcaaacaggaaaagtgattgagcagatgggcaaattttacccagaactgaagcttgcctatgccgttcgaggcaataaattggaaagaggccagaagatcagtgagcagattgtcattggcacccctgggaccgtgctggactggtgctccaagctcaagttcattgatcccaagaaaatcaaggtgtttgttctggatgaggctgatgtcatgatagccactcagggccaccaagatcagagcatccgcatccagaggatgctgcccaggaactgccagatgctgcttttctccgccacctttgaagactctgtgtggaagtttgcccagaaagtggtcccagacccaaatgttatcaaactgaagcgtgaggaagagaccctggataccatcaagcagtactatgtcctgtgcagcagcagagacgagaagttccaggccttgtgtaacctctacggggccatcaccattgctcaagccatgatcttctgccatactcgcaaaacagctagttggctggcagcagagctctcaaaagaaggccaccaggtggctctgctgagtggggagatgatggtggagcagagggctgcggtgattgagcgcttccgagagggcaaagagaaggttttggtgaccaccaacgtgtgtgcccgcggcattgatgttgaacaagtgtctgtcgtcatcaactttgatcttcccgtggacaaggacgggaatcctgacaatgagacctacctgcaccggatcgggcgcacgggccgctttggcaagaggggcctggcagtgaacatggtggacagcaagcacagcatgaacatcctgaacagaatccaggagcattttaataagaagatagaaagattggacacagatgatttggacgagattgagaaaatagccaactgagaagctccaccagccactgatgccagccctggcactgcccctgcacaggagacaagtgcatttagggcacaggccccgacatcaccccaaggacaacggcagaagtagagagaaactacctacctcacttcaaattatgtttggacttgacaaaaataggtgcaaatgatggggggcaatagaagaaaaaatttgcattttggaaaattgggtcctttccccacttttttaaagccacattcccccatctttataataatctggtcacagtggtagtcgctggccccaggaccccctcctgattttggctaggcatcgtggaaccagctccagcccctgaaga

SEQ ID NO: 125258 - DNA, 557 bp, Homo sapiens
  Payload ID: 4583
  Gene Symbol: DDX19A
  Gene Name: DEAD (Asp-Glu-Ala-Asp) box polypeptide 19A
  ENST ID: ENST00000562649
  CDS Start-End: 88-282
attctcgcgccggtggcgaggttagggcccgcgttgcgacgtggtgcagcgcatattttcacaagtgggtctcccttgtccgggactatggccaccgactcgtgggccctggcggtggacgagcaggaagcggctgtcaagtcgatgaccaatttgcagatcaaggaagagaaagtcaaagcagataccaatggtattatcaaaaccagtaccactgccgagaaaacagatgaagaggagaaagtccttactcaacaagctgatcagaagcaaccttgttgataacacaaaccaagtggaagtcctgcaacgggatccaaactcccctctgtactcggtgaagtcgtttgaagagcttcggctgaaaccacagcttctccagggagtctatgccatgggcttcaatcgaccctccaagatacaagagaacgcattacccatgatgcttgctgaacccccacagaatctgattgcccagtctcagtctggcactggtaaaacagctgcctttgtcttagccatgctcagccgagtggagccatcagacagataccccc

SEQ ID NO: 125259 - DNA, 3386 bp, Homo sapiens
  Payload ID: 4584
  Gene Symbol: DDX19B
  Gene Name: DEAD (Asp-Glu-Ala-Asp) box polypeptide 19B
  Uniprot ID: Q9UMR2
  ENST ID: ENST00000288071
  CDS Start-End: 246-1685
gataggaaagcttgctctgcccggggttgaggggtacgggtctgagggcaacagaatcgacagcctcaagtgggcaaagggtggccaaacaggagtggcctccgacgtcactgtggcgcgccgcttccggtctgcagccttgtagtggggctggagcagagcctgccgcgaacccccggagcccacgatccctcgtgccatccctcgaatccaccagcacgagcgtcccacccgcgcctgggaccatggccactgactcatgggccctggcggtggacgagcaggaagctgcggctgagtcgttgagcaacttgcatcttaaggaagagaaaatcaaaccagataccaatggtgctgttgtcaagaccaatgccaatgcagagaagacagatgaagaagagaaagaggacagagctgcccagtccttactcaacaagctgatcagaagcaaccttgttgataacacaaaccaagtggaagtcctgcagcgggatccaaactcccctctgtactcggtgaagtcttttgaagagcttcggctgaaaccacagcttctccaaggagtctatgccatgggtttcaatcgtccatccaagatacaagagaacgcattgccactgatgcttgctgagcccccacagaacttaattgcccaatctcagtctggtactggtaaaacagctgccttcgtgctggccatgcttagccaagtagaacctgcaaacaaatacccccagtgtctatgtctctccccaacgtatgagctcgccctccaaacaggaaaagtgattgaacaaatgggcaaattttaccctgaactgaagctagcttatgctgttcgaggcaataaattggaaagaggccagaagatcagtgagcagattgtcattggcacccctgggactgtgctggactggtgctccaagctcaagttcattgatcccaagaaaatcaaggtgtttgttctggatgaggctgatgtcatgatagccactcagggccaccaagatcagagcatccgcatccagaggatgctgcccaggaactgccagatgctgcttttctccgccacctttgaagactctgtgtggaagtttgcccagaaagtggtcccagacccaaacgttatcaaactgaagcgtgaggaagagaccctggacaccatcaagcagtactatgtcctgtgcagcagcagagacgagaagttccaggccttgtgtaacctctacggggccatcaccattgctcaagccatgatcttctgccatactcgcaaaacagctagttggctggcagcagagctctcaaaagaaggccaccaggtggctctgctgagtggggagatgatggtggaacagagggctgcagtgattgagcgcttccgagagggcaaagagaaggttttggtgaccaccaacgtgtgtgcccgcggcattgatgttgaacaagtgtctgtcgtcatcaactttgatcttcccgtggacaaggacgggaatcctgacaatgagacctacctgcaccggatcgggcgcacgggccgctttggcaagaggggcctggcagtgaacatggtggacagcaagcacagcatgaacatcctgaacagaatccaggagcattttaataagaagatagaaagattggacacagatgatttggacgagattgagaaaatagccaactgagaagctccaccagccactgatgccagccctggcactgcccctgcacaggagacaagtgcgttcagggcacaggccccgacatcaccccaaggacaacggcacaagtagagagaaactacctacctcacttcaaattatgtttggacttgacaaaaatgtatgcaaatgatgggggatggtagaaaaaaattatttacacaaccttggaagattaggcatgaatacacagagatttaccttttggaagtttcatcttttaatttggccagtgtttccttcatgctaatctagatgctgtggctgattacttgcccaggatctcctgtggcagcctctgcttgttctctggcttggagtggatggggcagcctccagctcctgtggaagtaatggaatagtggtggaaagggaacacagagagggaggcttccagtaagataggtgtgtaagcccagccatcatgtttggaatggcatgaggcagcagaggaggcctgagagctgctgctttggacttgggggtgggacagctcatctgagtattgccagccccctgtcctagtgcccacagcagaagggaatttgttaaataagcatggaccaaaatgccaacctctcggttgtgtatatgggtttgtgtcacaggactgtgacctgttctcggtgggtgcagtctgtgtagagtgcacatctgattattggtgggtcctgtgcctgtgcttaagcaagtcctgtggagaagtcatcatggagaattagtggtggccctagcgtgccacaaaacctggtctcatgagcatttgcaacatcccttttacatccttaatatccccttaccccacagtagccccaaacaaatgtgatctgaggtttagatcctcagtgaaaattgtggtttcaagtcttcatggccagcctcaaggcagttctagatgtgatcagcagtagtcacaaattcttgttttgtctccacacccagaaggcaagttttgtcagagctggggaataatttcagatatttgacatcttgattataaagggcttctgaacatctgtgtttactgcctttggaatacaaacaggtgcaactgagggactagctacactaccaccatttatctgtccaaggcaagagtatcaccaaggcctttgctccagccttacttggcatctttgcgcaagatagtcagagcaaacaatagtaatggacacttctcacacctggccaaggctgttggtacccacgaaatgacagcaaagatgagaggaaactgaattgcaagagcaatatgaaaccccaaccaagaggagtactctgcagttctttggctttggtatagagtggccactttctctaggacctggaagaagagtttgatggctaagaacgattgtgatcctaggtcttctttgtacgcatctccgtatttaggccagatctgcctcctgggaagggaaggggccaatgtcagcctccaggtgatttctttaatctgacattacaaagagaccaacagactgccaattctaccacattcccctggtgggtactcgactatgtagttttctctatgcttctggtcaactctgacacatcttggaattcttgtaataagaaaagaaatttttatacttttttctccttccctgagtcctgtggaccaaccctgaaatactaaaaacaagggcaataattaaagaa

SEQ ID NO: 125260 - DNA, 1692 bp, Homo sapiens
  Payload ID: 4584
  Gene Symbol: DDX19B
  Gene Name: DEAD (Asp-Glu-Ala-Asp) box polypeptide 19B
  Uniprot ID: Q9UMR2
  ENST ID: ENST00000355992
  CDS Start-End: 105-1451
gtagtggggctggagcagagcctgccgcgaacccccggagcccacgatccctcgtgccatccctcgaatccaccagcacgagcgtcccacccgcgcctgggaccatggccactgactcatgggccctggcggtggacgagcaggaagctgcggctgagtcgttgagcaacttgcatcttaaggaagagaaaatcaaaccagataccaatggtgctgttgtcaagaccaatgccaatgcagagaagacagatgaagaagagaaagaggacagagctgcccagtccttactcaacaagctgatcagaagcaaccttgttgataacacaaaccaagtggaagtcctgcagcgggatccaaactcccctctgtactcggtgaagtcttttgaagagcttcggctcccacagaacttaattgcccaatctcagtctggtactggtaaaacagctgccttcgtgctggccatgcttagccaagtagaacctgcaaacaaatacccccagtgtctatgtctctccccaacgtatgagctcgccctccaaacaggaaaagtgattgaacaaatgggcaaattttaccctgaactgaagctagcttatgctgttcgaggcaataaattggaaagaggccagaagatcagtgagcagattgtcattggcacccctgggactgtgctggactggtgctccaagctcaagttcattgatcccaagaaaatcaaggtgtttgttctggatgaggctgatgtcatgatagccactcagggccaccaagatcagagcatccgcatccagaggatgctgcccaggaactgccagatgctgcttttctccgccacctttgaagactctgtgtggaagtttgcccagaaagtggtcccagacccaaacgttatcaaactgaagcgtgaggaagagaccctggacaccatcaagcagtactatgtcctgtgcagcagcagagacgagaagttccaggccttgtgtaacctctacggggccatcaccattgctcaagccatgatcttctgccatactcgcaaaacagctagttggctggcagcagagctctcaaaagaaggccaccaggtggctctgctgagtggggagatgatggtggaacagagggctgcagtgattgagcgcttccgagagggcaaagagaaggttttggtgaccaccaacgtgtgtgcccgcggcattgatgttgaacaagtgtctgtcgtcatcaactttgatcttcccgtggacaaggacgggaatcctgacaatgagacctacctgcaccggatcgggcgcacgggccgctttggcaagaggggcctggcagtgaacatggtggacagcaagcacagcatgaacatcctgaacagaatccaggagcattttaataagaagatagaaagattggacacagatgatttggacgagattgagaaaatagccaactgagaagctccaccagccactgatgccagccctggcactgcccctgcacaggagacaagtgcgttcagggcacaggccccgacatcaccccaaggacaacggcacaagtagagagaaactacctacctcacttcaaattatgtttggacttgacaaaaatgtatgcaaatgatgggggatggtagaaaaaaattatttacacaaccttggaagattaggcatgaatacacagagatttaccttt

SEQ ID NO: 125261 - DNA, 1717 bp, Homo sapiens
  Payload ID: 4584
  Gene Symbol: DDX19B
  Gene Name: DEAD (Asp-Glu-Ala-Asp) box polypeptide 19B
  Uniprot ID: Q9UMR2
  ENST ID: ENST00000393657
  CDS Start-End: 361-1473
actgtggcgcgccgcttccggtctgcagccttgtagtggggctggagcagagcctgccgcgaacccccggagcccacgatccctcgtgccatccctcgaatccaccagcacgagcgtcccacccgcgcctgggaccatggccactgactcatgggccctggcggtggacgagcaggaagctgcggctgagtcgaggacagagctgcccagtccttactcaacaagctgatcagaagcaaccttgttgataacacaaaccaagtggaagtcctgcagcgggatccaaactcccctctgtactcggtgaagtcttttgaagagcttcggctgaaaccacagcttctccaaggagtctatgccatgggtttcaatcgtccatccaagatacaagagaacgcattgccactgatgcttgctgagcccccacagaacttaattgcccaatctcagtctggtactggtaaaacagctgccttcgtgctggccatgcttagccaagtagaacctgcaaacaaatacccccagtgtctatgtctctccccaacgtatgagctcgccctccaaacaggaaaagtgattgaacaaatgggcaaattttaccctgaactgaagctagcttatgctgttcgaggcaataaattggaaagaggccagaagatcagtgagcagattgtcattggcacccctgggactgtgctggactggtgctccaagctcaagttcattgatcccaagaaaatcaaggtgtttgttctggatgaggctgatgtcatgatagccactcagggccaccaagatcagagcatccgcatccagaggatgctgcccaggaactgccagatgctgcttttctccgccacctttgaagactctgtgtggaagtttgcccagaaagtggtcccagacccaaacgttatcaaactgaagcgtgaggaagagaccctggacaccatcaagcagtactatgtcctgtgcagcagcagagacgagaagttccaggccttgtgtaacctctacggggccatcaccattgctcaagccatgatcttctgccatactcgcaaaacagctagttggctggcagcagagctctcaaaagaaggccaccaggtggctctgctgagtggggagatgatggtggaacagagggctgcagtgattgagcgcttccgagagggcaaagagaaggttttggtgaccaccaacgtgtgtgcccgcggcattgatgttgaacaagtgtctgtcgtcatcaactttgatcttcccgtggacaaggacgggaatcctgacaatgagacctacctgcaccggatcgggcgcacgggccgctttggcaagaggggcctggcagtgaacatggtggacagcaagcacagcatgaacatcctgaacagaatccaggagcattttaataagaagatagaaagattggacacagatgatttggacgagattgagaaaatagccaactgagaagctccaccagccactgatgccagccctggcactgcccctgcacaggagacaagtgcgttcagggcacaggccccgacatcaccccaaggacaacggcacaagtagagagaaactacctacctcacttcaaattatgtttggacttgacaaaaatgtatgcaaatgatgggggatggtagaaaaaaattatttacacaaccttggaagattaggcatgaatacacagagatttaccttttgg

SEQ ID NO: 125262 - DNA, 1608 bp, Homo sapiens
  Payload ID: 4584
  Gene Symbol: DDX19B
  Gene Name: DEAD (Asp-Glu-Ala-Asp) box polypeptide 19B
  Uniprot ID: Q9UMR2
  ENST ID: ENST00000451014
  CDS Start-End: 50-1411
agtgccaagagcagcggttgttggagtgtaactgccatgctcagccgcgatggctggggctgccgggcgcgtccaagatcgcgccctgcggcggtttcccatcaccctgcctgtgggcgacttgagcaacttgcatcttaaggaagagaaaatcaaaccagataccaatggtgctgttgtcaagaccaatgccaatgcagagaagacagatgaagaagagaaagaggacagagctgcccagtccttactcaacaagctgatcagaagcaaccttgttgataacacaaaccaagtggaagtcctgcagcgggatccaaactcccctctgtactcggtgaagtcttttgaagagcttcggctcccacagaacttaattgcccaatctcagtctggtactggtaaaacagctgccttcgtgctggccatgcttagccaagtagaacctgcaaacaaatacccccagtgtctatgtctctccccaacgtatgagctcgccctccaaacaggaaaagtgattgaacaaatgggcaaattttaccctgaactgaagctagcttatgctgttcgaggcaataaattggaaagaggccagaagatcagtgagcagattgtcattggcacccctgggactgtgctggactggtgctccaagctcaagttcattgatcccaagaaaatcaaggtgtttgttctggatgaggctgatgtcatgatagccactcagggccaccaagatcagagcatccgcatccagaggatgctgcccaggaactgccagatgctgcttttctccgccacctttgaagactctgtgtggaagtttgcccagaaagtggtcccagacccaaacgttatcaaactgaagcgtgaggaagagaccctggacaccatcaagcagtactatgtcctgtgcagcagcagagacgagaagttccaggccttgtgtaacctctacggggccatcaccattgctcaagccatgatcttctgccatactcgcaaaacagctagttggctggcagcagagctctcaaaagaaggccaccaggtggctctgctgagtggggagatgatggtggaacagagggctgcagtgattgagcgcttccgagagggcaaagagaaggttttggtgaccaccaacgtgtgtgcccgcggcattgatgttgaacaagtgtctgtcgtcatcaactttgatcttcccgtggacaaggacgggaatcctgacaatgagacctacctgcaccggatcgggcgcacgggccgctttggcaagaggggcctggcagtgaacatggtggacagcaagcacagcatgaacatcctgaacagaatccaggagcattttaataagaagatagaaagattggacacagatgatttggacgagattgagaaaatagccaactgagaagctccaccagccactgatgccagccctggcactgcccctgcacaggagacaagtgcgttcagggcacaggccccgacatcaccccaaggacaacggcacaagtagagagaaactacctacctcacttcaaattatgtttggacttgacaaaaatgtatgcaaatgatgggggatggtagaaaaaaattatttac

SEQ ID NO: 125263 - DNA, 726 bp, Homo sapiens
  Payload ID: 4584
  Gene Symbol: DDX19B
  Gene Name: DEAD (Asp-Glu-Ala-Asp) box polypeptide 19B
  ENST ID: ENST00000566216
  CDS Start-End: 26-726
tgggaaggcggctctaacttggctgatgcaactgcgagaaaagttgagcaacttgcatcttaaggaagagaaaatcaaaccagataccaatggtgctgttgtcaagaccaatgccaatgcagagaagacagatgaagaagagaaagaggacagagctgcccagtccttactcaacaagctgatcagaagcaaccttgttgataacacaaaccaagtggaagtcctgcagcgggatccaaactcccctctgtactcggtgaagtcttttgaagagcttcggctgaaaccacagcttctccaaggagtctatgccatgggtttcaatcgtccatccaagatacaagagaacgcattgccactgatgcttgctgagcccccacagaacttaattgcccaatctcagtctggtactggtaaaacagctgccttcgtgctggccatgcttagccaagtagaacctgcaaacaaatacccccagtgtctatgtctctccccaacgtatgagctcgccctccaaacaggaaaagtgattgaacaaatgggcaaattttaccctgaactgaagctagcttatgctgttcgaggcaataaattggaaagaggccagaagatcagtgagcagattgtcattggcacccctgggactgtgctggactggtgctccaagctcaagttcattgatcccaagaaaatcaaggtgtttgttctggatgaggctgatgtcat

SEQ ID NO: 125264 - DNA, 818 bp, Homo sapiens
  Payload ID: 4584
  Gene Symbol: DDX19B
  Gene Name: DEAD (Asp-Glu-Ala-Asp) box polypeptide 19B
  ENST ID: ENST00000568008
  CDS Start-End: 130-228
cgcgccgcttccggtctgcagccttgtagtggggctggagcagagcctgccgcgaacccccggagcccacgatccctcgtgccatccctcgaatccaccagcacgagcgtcccacccgcgcctgggaccatggccactgactcatgggccctggcggtggacgagcaggaagctgcggctgagtcgcccacagaacttaattgcccaatctcagtctggtactggtaaaacagctgccttcgtgctggccatgcttagccaagtagaacctgcaaacaaatacccccagtgtctatgtctctccccaacgtatgagctcgccctccaaacaggaaaagtgattgaacaaatgggcaaattttaccctgaactgaagctagcttatgctgttcgaggcaataaattggaaagaggccagaagatcagtgagcagattgtcattggcacccctgggactgtgctggactggtgctccaagctcaagttcattgatcccaagaaaatcaaggtgtttgttctggatgaggctgatgtcatgatagccactcagggccaccaagatcagagcatccgcatccagaggatgctgcccaggaactgccagatgctgcttttctccgccacctttgaagactctgtgtggaagtttgcccagaaagtggtcccagacccaaacgttatcaaactgaagcgtgaggaagagaccctggacaccatcaagcagtactatgtcctgtgcagcagcagagacgagaagttccaggccttgtgtaacctctacggggccatcaccattgctcaagccatgatcttctgcc

SEQ ID NO: 125265 - DNA, 1790 bp, Homo sapiens
  Payload ID: 4584
  Gene Symbol: DDX19B
  Gene Name: DEAD (Asp-Glu-Ala-Asp) box polypeptide 19B
  ENST ID: ENST00000562519
  CDS Start-End: 157-249
caggagtggcctccgacgtcactgtggcgcgccgcttccggtctgcagccttgtagtggggctggagcagagcctgccgcgaacccccggagcccacgatccctcgtgccatccctcgaatccaccagcacgagcgtcccacccgcgcctgggaccatggccactgactcatgggccctggcggtggacgagcaggaagctgcggctgagtcgaggacagagctgcccagtccttactcaacaagctgatcagaagcaaccttgttgataacacaaaccaagtggaagtcctgcagcgggatccaaactcccctctgtactcggtgaagtcttttgaagagcttcggctcccacagaacttaattgcccaatctcagtctggtactggtaaaacagctgccttcgtgctggccatgcttagccaagtagaacctgcaaacaaatacccccagtgtctatgtctctccccaacgtatgagctcgccctccaaacaggaaaagtgattgaacaaatgggcaaattttaccctgaactgaagctagcttatgctgttcgaggcaataaattggaaagaggccagaagatcagtgagcagattgtcattggcacccctgggactgtgctggactggtgctccaagctcaagttcattgatcccaagaaaatcaaggtgtttgttctggatgaggctgatgtcatgatagccactcagggccaccaagatcagagcatccgcatccagaggatgctgcccaggaactgccagatgctgcttttctccgccacctttgaagactctgtgtggaagtttgcccagaaagtggtcccagacccaaacgttatcaaactgaagcgtgaggaagagaccctggacaccatcaagcagtactatgtcctgtgcagcagcagagacgagaagttccaggccttgtgtaacctctacggggccatcaccattgctcaagccatgatcttctgccatactcgcaaaacagctagttggctggcagcagagctctcaaaagaaggccaccaggtggctctgctgagtggggagatgatggtggaacagagggctgcagtgattgagcgcttccgagagggcaaagagaaggttttggtgaccaccaacgtgtgtgcccgcggcattgatgttgaacaagtgtctgtcgtcatcaactttgatcttcccgtggacaaggacgggaatcctgacaatgagacctacctgcaccggatcgggcgcacgggccgctttggcaagaggggcctggcagtgaacatggtggacagcaagcacagcatgaacatcctgaacagaatccaggagcattttaataagaagatagaaagattggacacagatgatttggacgagattgagaaaatagccaactgagaagctccaccagccactgatgccagccctggcactgcccctgcacaggagacaagtgcgttcagggcacaggccccgacatcaccccaaggacaacggcacaagtagagagaaactacctacctcacttcaaattatgtttggacttgacaaaaatgtatgcaaatgatgggggatggtagaaaaaaattatttacacaaccttggaagattaggcatgaatacacagagatttaccttttggaagtttcatcttttaatttggccagtgtttccttcatgctaatctagatgctgtggctgattacttgcccaggatctcctgtggcagcctctgcttgttctctggcttggagtggatggggcagcctccagctcctgtggaagtaa

SEQ ID NO: 125266 - DNA, 1765 bp, Homo sapiens
  Payload ID: 4584
  Gene Symbol: DDX19B
  Gene Name: DEAD (Asp-Glu-Ala-Asp) box polypeptide 19B
  ENST ID: ENST00000563206
  CDS Start-End: 70-1524
aatgaggctccggcttggccagtgccaagagcagcggttgttggagtgtaactgccatgctcagccgcgatggctggggctgccgggcgcgtccaagatcgcgccctgcggcggtttcccatcaccctgcctgtgggcgacttgagcaacttgcatcttaaggaagagaaaatcaaaccagataccaatggtgctgttgtcaagaccaatgccaatgcagagaagacagatgaagaagagaaagaggacagagctgcccagtccttactcaacaagctgatcagaagcaaccttgttgataacacaaaccaagtggaagtcctgcagcgggatccaaactcccctctgtactcggtgaagtcttttgaagagcttcggctgaaaccacagcttctccaaggagtctatgccatgggtttcaatcgtccatccaagatacaagagaacgcattgccactgatgcttgctgagcccccacagaacttaattgcccaatctcagtctggtactggtaaaacagctgccttcgtgctggccatgcttagccaagtagaacctgcaaacaaatacccccagtgtctatgtctctccccaacgtatgagctcgccctccaaacaggaaaagtgattgaacaaatgggcaaattttaccctgaactgaagctagcttatgctgttcgaggcaataaattggaaagaggccagaagatcagtgagcagattgtcattggcacccctgggactgtgctggactggtgctccaagctcaagttcattgatcccaagaaaatcaaggtgtttgttctggatgaggctgatgtcatgatagccactcagggccaccaagatcagagcatccgcatccagaggatgctgcccaggaactgccagatgctgcttttctccgccacctttgaagactctgtgtggaagtttgcccagaaagtggtcccagacccaaacgttatcaaactgaagcgtgaggaagagaccctggacaccatcaagcagtactatgtcctgtgcagcagcagagacgagaagttccaggccttgtgtaacctctacggggccatcaccattgctcaagccatgatcttctgccatactcgcaaaacagctagttggctggcagcagagctctcaaaagaaggccaccaggtggctctgctgagtggggagatgatggtggaacagagggctgcagtgattgagcgcttccgagagggcaaagagaaggttttggtgaccaccaacgtgtgtgcccgcggcattgatgttgaacaagtgtctgtcgtcatcaactttgatcttcccgtggacaaggacgggaatcctgacaatgagacctacctgcaccggatcgggcgcacgggccgctttggcaagaggggcctggcagtgaacatggtggacagcaagcacagcatgaacatcctgaacagaatccaggagcattttaataagaagatagaaagattggacacagatgatttggacgagattgagaaaatagccaactgagaagctccaccagccactgatgccagccctggcactgcccctgcacaggagacaagtgcgttcagggcacaggccccgacatcaccccaaggacaacggcacaagtagagagaaactacctacctcacttcaaattatgtttggacttgacaaaaatgtatgcaaatgatgggggatggtagaaaaaaattatttacacaaccttggaagattaggcatgaatacacagagatttaccttt

SEQ ID NO: 125267 - DNA, 1760 bp, Homo sapiens
  Payload ID: 4584
  Gene Symbol: DDX19B
  Gene Name: DEAD (Asp-Glu-Ala-Asp) box polypeptide 19B
  Uniprot ID: Q9UMR2
  ENST ID: ENST00000563392
  CDS Start-End: 410-1522
gcccccggctcccggaggtcgacattttggtttccataggcaaagtcctaacaccacaattgacatagttaaaaaggggagacggtaacgtgtttggtagaggttacatatcttgctatagttgtttattttagttgctgagtgatacacagccctcaaagagtctgacattgtgcccatggttacacttgtccgggggagaccttgaatttggtgtggaagaaataacatcagtagttcagaggacagagctgcccagtccttactcaacaagctgatcagaagcaaccttgttgataacacaaaccaagtggaagtcctgcagcgggatccaaactcccctctgtactcggtgaagtcttttgaagagcttcggctgaaaccacagcttctccaaggagtctatgccatgggtttcaatcgtccatccaagatacaagagaacgcattgccactgatgcttgctgagcccccacagaacttaattgcccaatctcagtctggtactggtaaaacagctgccttcgtgctggccatgcttagccaagtagaacctgcaaacaaatacccccagtgtctatgtctctccccaacgtatgagctcgccctccaaacaggaaaagtgattgaacaaatgggcaaattttaccctgaactgaagctagcttatgctgttcgaggcaataaattggaaagaggccagaagatcagtgagcagattgtcattggcacccctgggactgtgctggactggtgctccaagctcaagttcattgatcccaagaaaatcaaggtgtttgttctggatgaggctgatgtcatgatagccactcagggccaccaagatcagagcatccgcatccagaggatgctgcccaggaactgccagatgctgcttttctccgccacctttgaagactctgtgtggaagtttgcccagaaagtggtcccagacccaaacgttatcaaactgaagcgtgaggaagagaccctggacaccatcaagcagtactatgtcctgtgcagcagcagagacgagaagttccaggccttgtgtaacctctacggggccatcaccattgctcaagccatgatcttctgccatactcgcaaaacagctagttggctggcagcagagctctcaaaagaaggccaccaggtggctctgctgagtggggagatgatggtggaacagagggctgcagtgattgagcgcttccgagagggcaaagagaaggttttggtgaccaccaacgtgtgtgcccgcggcattgatgttgaacaagtgtctgtcgtcatcaactttgatcttcccgtggacaaggacgggaatcctgacaatgagacctacctgcaccggatcgggcgcacgggccgctttggcaagaggggcctggcagtgaacatggtggacagcaagcacagcatgaacatcctgaacagaatccaggagcattttaataagaagatagaaagattggacacagatgatttggacgagattgagaaaatagccaactgagaagctccaccagccactgatgccagccctggcactgcccctgcacaggagacaagtgcgttcagggcacaggccccgacatcaccccaaggacaacggcacaagtagagagaaactacctacctcacttcaaattatgtttggacttgacaaaaatgtatgcaaatgatgggggatggtagaaaaaaattatttacacaaccttggaagattaggcatgaatacacagagatttacc

SEQ ID NO: 125268 - DNA, 1681 bp, Homo sapiens
  Payload ID: 4584
  Gene Symbol: DDX19B
  Gene Name: DEAD (Asp-Glu-Ala-Asp) box polypeptide 19B
  Uniprot ID: Q9UMR2
  ENST ID: ENST00000568625
  CDS Start-End: 456-1568
atgctcagccgcgatggctggggctgccgggcgcgtccaagatcgcgccctgcggcggtttcccatcaccctgcctgtgggcgacgtgagtatctgcgagggtagaagccagaccctttcctcccacgtttaggtgccttcctcgcccctactcctgggtagaggaataacaatatttctcgaggcttcggcccaaggtcttagccttgtgatctagaatccgccatctgtgaggtgctgttgtcaagaccaatgccaatgcagagaagacagatgaagaagagaaagaggacagagctgcccagtccttactcaacaagctgatcagaagcaaccttgttgataacacaaaccaagtggaagtcctgcagcgggatccaaactcccctctgtactcggtgaagtcttttgaagagcttcggctgaaaccacagcttctccaaggagtctatgccatgggtttcaatcgtccatccaagatacaagagaacgcattgccactgatgcttgctgagcccccacagaacttaattgcccaatctcagtctggtactggtaaaacagctgccttcgtgctggccatgcttagccaagtagaacctgcaaacaaatacccccagtgtctatgtctctccccaacgtatgagctcgccctccaaacaggaaaagtgattgaacaaatgggcaaattttaccctgaactgaagctagcttatgctgttcgaggcaataaattggaaagaggccagaagatcagtgagcagattgtcattggcacccctgggactgtgctggactggtgctccaagctcaagttcattgatcccaagaaaatcaaggtgtttgttctggatgaggctgatgtcatgatagccactcagggccaccaagatcagagcatccgcatccagaggatgctgcccaggaactgccagatgctgcttttctccgccacctttgaagactctgtgtggaagtttgcccagaaagtggtcccagacccaaacgttatcaaactgaagcgtgaggaagagaccctggacaccatcaagcagtactatgtcctgtgcagcagcagagacgagaagttccaggccttgtgtaacctctacggggccatcaccattgctcaagccatgatcttctgccatactcgcaaaacagctagttggctggcagcagagctctcaaaagaaggccaccaggtggctctgctgagtggggagatgatggtggaacagagggctgcagtgattgagcgcttccgagagggcaaagagaaggttttggtgaccaccaacgtgtgtgcccgcggcattgatgttgaacaagtgtctgtcgtcatcaactttgatcttcccgtggacaaggacgggaatcctgacaatgagacctacctgcaccggatcgggcgcacgggccgctttggcaagaggggcctggcagtgaacatggtggacagcaagcacagcatgaacatcctgaacagaatccaggagcattttaataagaagatagaaagattggacacagatgatttggacgagattgagaaaatagccaactgagaagctccaccagccactgatgccagccctggcactgcccctgcacaggagacaagtgcgttcagggcacaggccccgacatcaccccaaggacaacggcacaagtagagaga

SEQ ID NO: 125269 - DNA, 879 bp, Homo sapiens
  Payload ID: 4584
  Gene Symbol: DDX19B
  Gene Name: DEAD (Asp-Glu-Ala-Asp) box polypeptide 19B
  ENST ID: ENST00000568408
  CDS Start-End: 90-215
cagagcctgccgcgaacccccggagcccacgatccctcgtgccatccctcgaatccaccagcacgagcgtcccacccgcgcctgggaccatggccactgactcatgggccctggcggtggacgagcaggaagctgcggctgagtcgttgagcaacttgcatcttaaggaagagaaaatcaaaccagataccaatggcctttacaaaaacttctagtgtcatagaatttgaattgtctcaactgttgggtatgggatgcgattttgaatgatggccactttgtgtctataaaggtgctgttgtcaagaccaatgccaatgcagagaagacagatgaagaagagaaagaggacagagctgcccagtccttactcaacaagctgatcagaagcaaccttgttgataacacaaaccaagtggaagtcctgcagcgggatccaaactcccctctgtactcggtgaagtcttttgaagagcttcggctcccacagaacttaattgcccaatctcagtctggtactggtaaaacagctgccttcgtgctggccatgcttagccaagtagaacctgcaaacaaatacccccagtgtctatgtctctccccaacgtatgagctcgccctccaaacaggaaaagtgattgaacaaatgggcaaattttaccctgaactgaagctagcttatgctgttcgaggcaataaattggaaagaggccagaagatcagtgagcagattgtcattggcacccctgggactgtgctggactggtgctccaagctcaagttcattgatcccaagaaaatcaaggtgtttgttctggatgaggctgatgtcatgatagccactcagggccaccaagatcagagcatccgcatccagagg

SEQ ID NO: 125270 - DNA, 586 bp, Homo sapiens
  Payload ID: 4584
  Gene Symbol: DDX19B
  Gene Name: DEAD (Asp-Glu-Ala-Asp) box polypeptide 19B
  ENST ID: ENST00000568460
  CDS Start-End: 107-253
ttgtagtggggctggagcagagcctgccgcgaacccccggagcccacgatccctcgtgccatccctcgaatccaccagcacgagcgtcccacccgcgcctgggaccatggccactgactcatgggccctggcggtggacgagcaggaagctgcggctgagtcggtgctgttgtcaagaccaatgccaatgcagagaagacagatgaagaagagaaagaggacagagctgcccagtccttactcaacaagctgatcagaagcaaccttgttgataacacaaaccaagtggaagtcctgcagcgggatccaaactcccctctgtactcggtgaagtcttttgaagagcttcggctgaaaccacagcttctccaaggagtctatgccatgggtttcaatcgtccatccaagatacaagagaacgcattgccactgatgcttgctgagcccccacagaacttaattgcccaatctcagtctggtactggtaaaacagctgccttcgtgctggccatgcttagccaagtagaacctgcaaacaaatacccccagtgtctatgtctctccccaacgtatgagctcgccctcc

SEQ ID NO: 125271 - DNA, 569 bp, Homo sapiens
  Payload ID: 4584
  Gene Symbol: DDX19B
  Gene Name: DEAD (Asp-Glu-Ala-Asp) box polypeptide 19B
  ENST ID: ENST00000562912
  CDS Start-End: 121-267
tccggtctgcagccttgtagtggggctggagcagagcctgccgcgaacccccggagcccacgatccctcgtgccatccctcgaatccaccagcacgagcgtcccacccgcgcctgggaccatggccactgactcatgggccctggcggtggacgagcaggaagctgcggctgagtcggtgctgttgtcaagaccaatgccaatgcagagaagacagatgaagaagagaaagaggacagagctgcccagtccttactcaacaagctgatcagaagcaaccttgttgataacacaaaccaagtggaagtcctgcagcgggatccaaactcccctctgtactcggtgaagtcttttgaagagcttcggctgaaaccacagcttctccaaggagtctatgccatgggtttcaatcgtccatccaagatacaagagaacgcattgccactgatgcttgctgagccatattttagggcaagtgtggtggctcatgcctgtaatcccaatactttgagaggccgaggcaggcagatcgcttgagcccaggagttcgagaccagcctgggcaacatg

SEQ ID NO: 125272 - DNA, 4212 bp, Homo sapiens
  Payload ID: 4585
  Gene Symbol: DDX20
  Gene Name: DEAD (Asp-Glu-Ala-Asp) box polypeptide 20
  Uniprot ID: Q9UHI6
  ENST ID: ENST00000369702
  CDS Start-End: 621-3095
gtgcgccagggacttgctaggagataaatggggtttatctcaccggagataaatgtggttgcacagcagatggacacaccagccaatgtggtaaataaacccttgggtccagctacgttctgcgcgctctctgccagcacagaggagcagcgagtcagggtacggagcgggtagcgttggggaagaggtggccgcgaagcgagacaggccagcggaacggaaaacggaagcacgagacgggggcgtgacgcaccgggcgcatcacaaagaacggcgagagggcggtggcgccgggggcacggctgggcggctccgcccagaagagggccgagaggcggggcggtgcccccaccgcaggcccgcggcgccctctgcaggccacaggcagcgactcaccagttgcctcatctttcctctcctccctcttggggctttcctcaggccacattttttgtgtgtctgggcagtctctcagcctccgactcccgtccctttcttccacttccaggccgggcgtgttagtgtcttcgcgggaaaactgccaataaagtttttcttcttctcgctcccaagatccccgcctccccttaagcaccgcgagatctgacggcgcggctaccatggcggcggcatttgaagcctcgggagccttagcagcagtggcgactgctatgccggctgagcatgtggccgtgcaggtcccggccccagagccaacacccgggcctgtgaggatcctgcggaccgctcaggatctcagcagcccgcggacccgcacgggggatgtgctgttggcggagccggccgacttcgagtcactgctgctttcgcggccggtgctggaggggctgcgggcggccggcttcgagaggccctcgccggtgcagctcaaggccatcccgttggggcgctgcgggctcgatttaattgttcaagctaaatctggcaccgggaaaacctgtgtgttctccaccatagctttggactctcttgttcttgaaaacttaagtacccagattttgatcttggctcctacaagagaaattgctgtacagatacattctgttattacagccattggaataaaaatggaaggcttagagtgtcatgtctttattggagggaccccattatcacaagacaaaaccagacttaaaaagtgtcatattgctgttggatctcctggcagaattaagcaactcatagaacttgactacttgaacccaggcagtatacgcctctttattcttgatgaagcagataagcttttagaagaaggcagcttccaggagcaaataaattggatttattcttccttgcctgccagtaaacagatgctggcagtatcagctacttatcccgaatttttggctaatgctttgacaaagtacatgagagatcccacttttgtaagactgaattccagtgatccaagtctcataggtttgaagcagtattacaaagttgtcaattcataccctttggcacataaggtttttgaggaaaagactcagcatttacaggaactgttcagcagaattccatttaatcaagctttagtcttttctaatttgcacagcagagcacaacatttggctgatatcctttcttctaaaggctttcctgctgagtgcatttcaggcaatatgaatcagaatcagcgtcttgatgctatggctaaactgaagcactttcattgcagagtcctcatttccacagatttgacttctcgtgggattgatgctgagaaggtgaatctggttgtaaatctggatgtaccattggattgggagacatacatgcatcggattgggagagctggccgttttggtacattggggctgacagtgacctactgttgccggggagaggaagaaaatatgatgatgagaattgcccagaaatgtaatatcaaccttctccctttaccagatcccattccttctggtctgatggaagaatgtgtggattgggatgtggaagttaaagctgctgtgcatacatatggtatagcaagtgtacctaaccaacccttaaaaaagcaaattcagaaaatagagagaacccttcaaattcagaaagctcatggtgaccacatggcttcctctagaaataattctgtatctggactatcagtcaaatcaaaaaataataccaaacaaaagcttcctgtgaaaagccactcagaatgtggaatcatagaaaaagcaacgtcaccaaaagaactgggctgtgacaggcaatccgaagagcaaatgaagaattctgttcagactcccgttgaaaactccaccaacagtcagcaccaggtcaaagaagctttacctgtgtcactcccccagattccttgtctgtcttcctttaaaatccatcagccatacacgttgacttttgctgaattggtagaggattatgaacattatattaaagaggggttagagaaacctgtggaaatcatcaggcactacacaggccctggggatcagactgtgaatcctcaaaatggttttgtgagaaataaagttattgaacagagagtccctgtgttggcaagtagtagccaatctggagactctgagagtgacagtgattcttacagctcaagaacctcttcccagagcaaaggaaataagtcatacttggaaggctcttctgataatcagctgaaagactctgaatctacgcctgtggatgatcgtatttctttggaacaaccaccaaatggaagtgacacccccaatccagagaaatatcaagaatcacctggaatccagatgaagacaagacttaaagagggggctagccagagagctaagcagagccggagaaacctacccaggcggtcttccttcagattgcagactgaagcccaggaagatgattggtatgactgtcatagggaaatacgtctgagtttttctgatacctatcaggattatgaggagtactggagagcttactacagggcatggcaagaatattatgctgccgcttctcattcatattattggaatgctcagagacatccaagttggatggcagcttatcacatgaataccatttatctacaagaaatgatgcatagtaaccagtgattataggatatacctgagaccatcaggaactgtcaacaaatgatacctttggatatccatcctcctcgacttatagtacagtggtgtatagtggcatttctgataaacttgaaaagacttgagtctttccactgggacacatccatttttcagattgttttgatttaggccaggtatattatcttcatttttaagagtttctttaagaaacttcatcagattgttgaaagataatttttgggacatagagctgaaagtttcagggtgccattttctataagatcttcccaaaagaaacatttaaaaagatgacatataccaccacttacttaaaaacaataaaagcaatagatttgattagtaatattattgctgtggagttctttacaaagggcttaggctgcatttccttctatagaggtgcattcttgtagaaatttgtagcatggtagatcagaaaatcctcttaggttttaggcaggaaggaatatttaaacattgctttagattttcctaaaggtatttgatttgatctgttagcttccagtaaaaatatttgtttttagtaaaaacaaatttaaatatatttacatgtttgttgtttatcttttgaatgtcttttgaggctgtgaaagctgtccacatttttgctgtgtattaaatagctgtgggtcatcagttgctgtcttacttgtgttgctcagatagaggagcagctcttaatcttttttggttcttggatccttttatgaatcagctgatagctatagattgacttcaggaaatttctcattccataagcacagaattgtgagtgtaatttcaaggggttcatagaccctctgaagttcatctatacagtccagattaacaagtgacctgctctgctggtaggctaggggaagttctagctcttagttttaagtattttgtggaagctggaattgattctcttcagacacttcttagtacatcctaattttgtgtcttctagaaaattttccccagtttttacctctaatgttaggatccaagaggagcttggatctgagctgatgcatctgtaaattacgatttagaaaaatataattggaaattacatattctttgctttttt

SEQ ID NO: 125273 - DNA, 1499 bp, Homo sapiens
  Payload ID: 4585
  Gene Symbol: DDX20
  Gene Name: DEAD (Asp-Glu-Ala-Asp) box polypeptide 20
  Uniprot ID: Q9UHI6
  ENST ID: ENST00000533164
  CDS Start-End: 263-679
cttgggagctgttagtccagttccaggttccaattcaacgtacttttatcagagctcactgtgcgccagggacttgctaggagataaatggggtttatctcaccggagataaatgtggttgcacagcagatggacacaccagccaatgtggccgggcgtgttagtgtcttcgcgggaaaactgccaataaagtttttcttcttctcgctcccaagatccccgcctccccttaagcaccgcgagatctgacggcgcggctaccatggcggcggcatttgaagcctcgggagccttagcagcagtggcgactgctatgccggctgagcatgtggccgtgcaggtcccggccccagagccaacacccgggcctgtgaggatcctgcggaccgctcaggatctcagcagcccgcggacccgcacgggggatgtgctgttggcggagccggccgacttcgagtcactgctgctttcgcggccggtgctggaggggctgcgggcggccggcttcgagaggccctcgccggtgcagctcaaggccatcccgttggggcgctgcgggctcgatttaattgttcaagctaaatctggcaccgggaaaacctgtgtgttctccaccatagctttggactctcttgttcttgaaaacttaagtacccaggcagaattaagcaactcatagaacttgactacttgaacccaggcagtatacgcctctttattcttgatgaagcagataagcttttagaagaaggcagcttccaggagcaaataaattggatttattcttccttgcctgccagtaaacagatgctggcagtatcagctacttatcccgaatttttggctaatgctttgacaaagtacatgagagatcccacttttgtaagactgaattccagtgatccaagtctcataggtttgaagcagtattacaaagttgtcaattcataccctttggcacataaggtttttgaggaaaagactcagcatttacaggaactgttcagcagaattccatttaatcaagctttagtcttttctaatttgcacagcagagcacaacatttggctgatatcctttcttctaaaggctttcctgctgagtgcatttcaggcaatatgaatcagaatcagcgtcttgatgctatggctaaactgaagcactttcattgcagagtcctcatttccacagatttgacttctcgtgggattgatgctgagaaggtgaatctggttgtaaatctggatgtaccattggattgggagacatacatgcatcggattgggagagctggccgttttggtacattggggctgacagtgacctactgttgccggggagaggaagaaaatatgatgatgagaattgcccagaaatgtaatatcaaccttctccctttaccagatcccattccttctggtctgatggaagaatgtgtggattgggatgtggaagttaaagctgctgtgcatacatatggtatagcaagtgtacctaa

SEQ ID NO: 125274 - DNA, 4332 bp, Homo sapiens
  Payload ID: 4585
  Gene Symbol: DDX20
  Gene Name: DEAD (Asp-Glu-Ala-Asp) box polypeptide 20
  ENST ID: ENST00000475700
  CDS Start-End: 2359-3657
agtagagtaacaatattggctgagatttacacaaatttggtacatcataaatatttcaattttttttttttaattaggcagaattaagcaactcatagaacttgactacttgaacccaggcagtatacgcctctttattcttgatgaagcagataagcttttagaagaaggcagcttccaggagcaaataaattggatttattcttccttgcctgccagtaaacagatgctggcagtatcagctacttatcccgaatttttggctaatgctttgacaaagtacatgagagatcccacttttgtaagactgaattccagtgatccaagtctcataggtgtgtacagcttttaggtacttatattattggtttatttgtgatatgctggagctttcccttgcctagttttgtcttgctgtttcatggttaccattagcatatatatttgttttaactgatagctcttctttgtaggtttgaagcagtattacaaagttgtcaattcataccctttggcacataaggtttttgaggaaaagactcagcatttacaggaactgttcagcagaattccatttaatcaagctttagtcttttctaatttgcacagcaggtaatgtaacttaaaaggtcatctggggaacttgtgaaataaaaggatagtcatggggcaatatttgtaaatttgtaaccatttatgttatatttcatagagcacaacatttggctgatatcctttcttctaaaggctttcctgctgagtgcatttcaggtaagttcatctcttactttaatctttatttagtatactgacttgaagcctccaaagtcaggaggaaaaaataccactttatgagttgtcttgagagtgtgaaattatcttgtatcttttagagtaaaggaattttcaggcttatttttcattggaatttgatatgtcaatattctatttttaaggagtaacttggtatatagtaaaaagttagaaaactagtgttcagaaagacaattttattagaatctctcttatagccacatataacttaattctataaaaccaagtttgtctgtattgtgttaagataaaaatattttttctttagaatttttttttttaataattgttaaaatgctggagattgctaactgaattgactgttttatggttttgtggaaggcaaaagtgattgagttcttgctgcaaagttaaatgattactgctggcataataagaatgaaagagtcgaaggattttttgatcagtgagatcctttttagagttttgtttggtgtcagcttaatttttaacctgttggcatgagcttgtttagttatggtatatcacgagatactggggagactattttctaatgaaccaatacttaaactatagatcacactttaacaccaaattataaacagctgattaaagcatttttattttcctaagaattgctagttatacttcatatgtaactttgcaaatagaatgttatatattcaggcatggcctgatcactatttaggattgatttttgaatttcaagttgattgcctaaaccatagtttaaaagattttaactttggatcttaacctagatttgcacagaaggacagaattaactgtggttggtgtattaaaagtgttaagactgggtgttatgctttttactttttgtggattggataaatatgtattagcttagttgtttttatgtgactttcttttggggtccttttaggcaatatgaatcagaatcagcgtcttgatgctatggctaaactgaagcactttcattgcagagtcctcatttccacagatttggtaaatttcctattcagtttgggtgactaatccatcttgacatatgttctattatcagatgtacagatttcatatattattttatgtaggcgtatctaacaagaataccagaagataattatctttccagtgctgaggaaaatactttcttaaaaatgtctttaatatgtttatctttgtccttgaaattagtcattaggaatgaatttccttttcctctgctcctcagtattcagttcttaatttgtctcttgactgtactggaagaatataatatgcattggtatccatgctgtatagttaatgcaaacaaataattgctatcttcttcaattcaagacttctcgtgggattgatgctgagaaggtgaatctggttgtaaatctggatgtaccattggattgggagacatacatgcatcggattgggagagctggccgttttggtaaaaaaaaaaaaaaaagtttgagtgctttctttaaggggagggatctataatgtgacaggtgggctttgaatattatttttgtgaaaatgatttactacctaacattctctctgcttttaggtacattggggctgacagtgacctactgttgccggggagaggaagaaaatatgatgatgagaattgcccagaaatgtaatatcaaccttctccctttaccagatcccattccttctggtctgatggaagaatgtgtggattgggatgtggaagttaaagctgctgtgcatacatatggtatagcaagtgtacctaaccaacccttaaaaaagcaaattcagaaaatagagagaacccttcaaattcagaaagctcatggtgaccacatggcttcctctagaaataattctgtatctggactatcagtcaaatcaaaaaataataccaaacaaaagcttcctgtgaaaagccactcagaatgtggaatcatagaaaaagcaacgtcaccaaaagaactgggctgtgacaggcaatccgaagagcaaatgaagaattctgttcagactcccgttgaaaactccaccaacagtcagcaccaggtcaaagaagctttacctgtgtcactcccccagattccttgtctgtcttcctttaaaatccatcagccatacacgttgacttttgctgaattggtagaggattatgaacattatattaaagaggggttagagaaacctgtggaaatcatcaggcactacacaggccctggggatcagactgtgaatcctcaaaatggttttgtgagaaataaagttattgaacagagagtccctgtgttggcaagtagtagccaatctggagactctgagagtgacagtgattcttacagctcaagaacctcttcccagagcaaaggaaataagtcatacttggaaggctcttctgataatcagctgaaagactctgaatctacgcctgtggatgatcgtatttctttggaacaaccaccaaatggaagtgacacccccaatccagagaaatatcaagaatcacctggaatccagatgaagacaagacttaaagagggggctagccagagagctaagcagagccggagaaacctacccaggcggtcttccttcagattgcagactgaagcccaggaagatgattggtatgactgtcatagggaaatacgtctgagtttttctgatacctatcaggattatgaggagtactggagagcttactacagggcatggcaagaatattatgctgccgcttctcattcatattattggaatgctcagagacatccaagttggatggcagcttatcacatgaataccatttatctacaagaaatgatgcatagtaaccagtgattataggatatacctgagaccatcaggaactgtcaacaaatgatacctttggatatccatcctcctcgacttatagtacagtggtgtatagtggcatttctgataaacttgaaaagacttgagtctttccactgggacacatccatttttcagattgttttgatttaggccaggtatattatcttcatttttaagagtttctttaagaaacttcatcagattgttgaaagataatttttgggacatagagctgaaagtttcagggtgccattttctataagatcttcccaaaagaaacatttaaaaagatgacatataccaccacttacttaaaaacaataaaagcaatagatttgattagtaatattattgctgtggagttctttacaaagggcttaggctgcatttccttctatagaggtgcattcttgtagaaatttgtagcatggtagatcagaaaatcctcttaggttttaggcaggaaggaatatttaaacattgctttagattttcctaaaggtatttgatttgatctgttagcttccagtaaaaatatttgtttttagtaaaaacaaatttaaatatatttacatgtttgttgtttatcttttgaatgtcttttgaggctgtgaaagctgtccacatttttgctgtgtattaaatagctgtgggtca

SEQ ID NO: 125275 - DNA, 3248 bp, Homo sapiens
  Payload ID: 4586
  Gene Symbol: DDX23
  Gene Name: DEAD (Asp-Glu-Ala-Asp) box polypeptide 23
  Uniprot ID: Q9BUQ8
  ENST ID: ENST00000308025
  CDS Start-End: 81-2543
atctccgcgaccaggaaacgggaaagatggcgacggctccgcgacgttgaggccgcgttgggcggttcagactcagggtgatggcaggagagctggctgacaaaaaggaccgtgatgcatcaccttccaaggaggaaaggaagcgatcacggactcctgacagagagcgggatagagaccgggaccggaagtcttccccatctaaagatagaaagcggcatcgttcaagggatagacgtcgaggaggcagccgttctcgctctcgttcccgttccaaatctgcagaaagagaacgacggcacaaagaacgagaacgagataaggagcgggatcggaataagaaggaccgagatcgagacaaggatgggcacagacgggacaaggaccgtaaacgatccagcttatctcctggtcgaggaaaagactttaaatctcggaaggacagagactctaagaaggatgaagaggatgaacatggtgataagaagcctaaggcccagccattatccctggaggagcttctggccaagaaaaaggctgaggaagaagctgaggctaagcccaagttcctctctaaagcagaacgagaggctgaagctctaaagcgacggcagcaggaggtggaagagcggcagaggatgcttgaagaagagaggaagaaaaggaaacagttccaagacttgggcaggaagatgttggaagatcctcaggaacgggaacgtcgggaacgcagggagaggatggaacgggagaccaatggaaatgaggatgaggaagggcggcagaagatccgggaagagaaggataagagcaaggaactgcatgccattaaggagcgttacctgggtggcatcaaaaagcggcgccgaacgagacatctcaatgaccggaaatttgtttttgagtgggatgcatctgaggacacatccattgactacaaccccctgtacaaagaacggcaccaggtgcagttgttagggcgaggcttcattgcaggcattgacctcaagcagcagaagcgagagcagtcacgtttctatggagacctaatggagaagaggcgaaccctggaagaaaaggagcaggaggaggcaagactccgcaaacttcgtaagaaggaagccaagcagcgctgggatgatcgtcattggtctcagaaaaagttagatgagatgacggacagggactggcggatcttccgtgaggactacagcatcaccaccaaaggtggcaagatccccaatcccatccgatcctggaaagactcttctctgcccccacacatcttggaggtcattgataagtgtggctacaaggaaccaacacctatacagcgtcaggcaattcccattgggctacagaatcgtgacatcattggtgtggctgagactggcagtggcaagacagcagccttcctcatccctctgctggtctggatcaccacacttcccaaaattgacaggatcgaagagtcagaccaaggcccttatgccatcatcctggctcccacccgtgagttggctcaacagattgaggaagagaccatcaagtttgggaaaccgctaggtatccgcactgtggctgtcattggtggcatctccagagaagaccagggcttcaggctgcgcatgggttgtgagattgtgattgctacccctgggcgtttgattgatgtgctggagaaccgctacctggtgctgagccgctgtacctatgtggttctggatgaggcagataggatgattgacatgggctttgagccagatgtccagaagatcctggagcacatgcctgtcagcaaccagaagccagacacggatgaggctgaggaccctgagaagatgctggccaactttgagtcgggaaaacataagtaccgccaaacagtcatgttcacggccaccatgcccccagcggtggagcgtctggccaggagctatcttcggcgacctgctgtggtgtacattggctccgcaggcaagccccatgagcgtgtggaacagaaggtcttcctcatgtcagagtcagaaaagaggaaaaagctgctggcaatcttggagcaaggctttgacccacccatcattatttttgtcaaccagaagaagggctgcgacgtgttggccaaatccctggagaagatggggtacaatgcttgcacactgcacggtggaaaaggccaggagcagcgagagtttgcgttgtccaacctcaaggctggggccaaggatattttggtggctacagatgtggctggtcgtggtattgacatccaagatgtgtctatggttgtcaactatgatatggccaaaaatattgaagattacatccaccgcattggccgcacgggacgagcaggcaagagtggggtggccatcaccttcctcacaaaagaggactctgctgtgttctacgagctgaagcaagctatcctggaaagcccagtgtcttcctgtccccccgaactagccaaccacccagatgcccagcataagccaggcaccatcctcaccaagaagcgccgggaagagaccatctttgcctgacacagcactcttcctgtgggctgagggcatctccaaagctgcctgatgcctgtttttcagaaccctcacatccctctttccaggtcctcactcttgggatatgggggcttaggaaaacaatccaactccctagcccagaccctcaggtcaggaggcctgcgtgtggggctgcaaaaggagaggacgacgctgtcggaggcagggagagcaaattaccacagcttcttggcccagttctgcccttctttgctttgggattgcactgggccatcagctcatgccaggctatgggggcagccagttggcattgctccccagactgaacagaaacctggccgccggatgggacctcctttggcacagacttgactgtgtaactgcataaactgcagtagcatcattgccctagatgccccaggagacctggcaccatgaggattacagacagtggaatcttactgtcatctggacagctgttttcctgtttggatggtaaaggaagttgagagtctttagacctgtgcacagccccgcaccaaggggtgctgtatgctctaggcatcccctcccccaggggattttctaagtagatggggggacacggtgaactggctgtgtccatctttgtcactgagtgaaatctctgttttctattctctgagaagataagtttgtatgttctgagaataaatacatgaatattaa

SEQ ID NO: 125276 - DNA, 1377 bp, Homo sapiens
  Payload ID: 4586
  Gene Symbol: DDX23
  Gene Name: DEAD (Asp-Glu-Ala-Asp) box polypeptide 23
  Uniprot ID: Q9BUQ8
  ENST ID: ENST00000547135
  CDS Start-End: 59-385
aaagatggcgacggctccgcgacgttgaggccgcgttgggcggttcagactcagggtgatggcaggagagctggctgacaaaaaggaccgtgatgcatcaccttccaaggaggaaaggaagcgatcacggactcctgacagagagcgggatagagaccgggaccggaagtcttccccatctaaagatagaaagcggcatcgttcaagggatagacgtcgaggaggcagccgttctcgctctcgttcccgttccaaatctgcagaaagagaacgacggcacaaagaacgagaacgagataaggagcgggatcggaataagaaggaccgagatcgagacaaggatgggcacagacgggacaaggaccgtaaacgatccaggcactgaagtaagagtgatgtggaccttgttccttttcctcaaagcttatctcctggtcgaggaaaagactttaaatctcggaaggacagagactctaagaaggatgaagaggatgaacatggtgataagaagcctaaggcccagccattatccctggaggagcttctggccaagaaaaaggctgaggaagaagctgaggctaagcccaagttcctctctaaagcagaacgagaggctgaagctctaaagcgacggcagcaggaggtggaagagcggcagaggatgcttgaagaagagaggaagaaaaggaaacagttccaagacttgggcaggaagatgttgggtacaaagaacggcaccaggtgcagttgttagggcgaggcttcattgcaggcattgacctcaagcagcagaagcgagagcagtcacgtttctatggagacctaatggagaagaggcgaaccctggaagaaaaggagcaggaggagtgagtgatcaaggctagggtggctggacagagcccagaggctctacagaaaggagttggagggcactgattctacttactcctcacaccctgctccagggcaagactccgcaaacttcgtaagaaggaagccaagcagcgctgggatgatcgtcattggtctcagaaaaagttagatgagatgacggacagggactggcggatcttccgtgaggactacagcatcaccaccaaaggtggcaagatccccaatcccatccgatcctggaaagactcttctctgcccccacacatcttggaggtcattgataagtgtggctacaaggaaccaacacctatacagcgtcaggcaattcccattgggctacagaatcgtgacatcattggtgtggctgagactggcagtggcaagacagcagccttcctcatccctctgctggtctggatcaccacacttcccaaaattgacaggatcgaagagtcagaccaaggcccttatgccatcatcctg

SEQ ID NO: 125277 - DNA, 567 bp, Homo sapiens
  Payload ID: 4586
  Gene Symbol: DDX23
  Gene Name: DEAD (Asp-Glu-Ala-Asp) box polypeptide 23
  ENST ID: ENST00000551468
  CDS Start-End: 154-567
aaagatggcgacggctccgcgacgttgaggccgcgttgggcggttcagactcagggtgtagagatggggtttcaccgtgttggccaggatggtctcaatctcctgacctcatgatctgcccgctttggcctccaaaagtgctaggattacacgatggcaggagagctggctgacaaaaaggaccgtgatgcatcaccttccaaggaggaaaggaagcgatcacggactcctgacagagagcgggatagagaccgggaccggaagtcttccccatctaaagatagaaagcggcatcgttcaagggatagacgtcgaggaggcagccgttctcgctctcgttcccgttccaaatctgcagaaagagaacgacggcacaaagaacgagaacgagataaggagcgggatcggaataagaaggaccgagatcgagacaaggatgggcacagacgggacaaggaccgtaaacgatccagcttatctcctggtcgaggaaaagactttaaatctcggaaggacagagactctaagaaggatgaagaggatgaacatggtgataagaagcctaag

SEQ ID NO: 125278 - DNA, 926 bp, Homo sapiens
  Payload ID: 4586
  Gene Symbol: DDX23
  Gene Name: DEAD (Asp-Glu-Ala-Asp) box polypeptide 23
  ENST ID: ENST00000552802
  CDS Start-End: 1-457
ggactacagcatcaccaccaaaggtggcaagatccccaatcccatccgatcctggaaagactcttctctgcccccacacatcttggaggtcattgataagtgtggctacaaggaaccaacacctatacagcgtcaggcaattcccattgggctacagaatcgtgacatcattggtgtggctgagactggcagtggcaagacagcagccttcctcatccctctgctggtctggatcaccacacttcccaaaattgacaggctggagtgcagtggtgtgatcttggcttacagcaaccgttgcctcccaggctcatatcctcctacctcagcctcccaagtagctgggattacaggatcgaagagtcagaccaaggcccttatgccatcatcctggctcccacccgtgagttggctcaacagattgaggaagagaccatcaagtttgggaaaccgctaggtatccgcactgtggctgtcattggtggcatctccagagaagaccagggcttcaggctgcgcatgggttgtgagattgtgattgctacccctgggcgtttgattgatgtgctggagaaccgctacctggtgctgagccgctgtacctatgtggttctggatgaggcagataggatgattgacatgggctttgagccagatgtccagaagatcctggagcacatgcctgtcagcaaccagaagccagacacggatgaggctgaggaccctgagaagatgctggccaactttgagtcgggaaaacataagtaccgccaaacagtcatgttcacggccaccatgcccccagcggtggagcgtctggccaggagctatcttcggcgacctgctgtggtgtacattggctccgcaggcaagccccatgagcgtgtggaacagaaggtcttcctcatgtcagagtcagaaaagag

SEQ ID NO: 125279 - DNA, 696 bp, Homo sapiens
  Payload ID: 4586
  Gene Symbol: DDX23
  Gene Name: DEAD (Asp-Glu-Ala-Asp) box polypeptide 23
  ENST ID: ENST00000552512
  CDS Start-End: 151-696
aaagatggcgacggctccgcgacgttgaggccgcgttgggcggttcagactcagggtgagatggggtttcaccgtgttggccaggatggtctcaatctcctgacctcatgatctgcccgctttggcctccaaaagtgctaggattacacgatggcaggagagctggctgacaaaaaggaccgtgatgcatcaccttccaaggaggaaaggaagcgatcacggactcctgacagagagcgggatagagaccgggaccggaagtcttccccatctaaagatagaaagcggcatcgttcaagggatagacgtcgaggaggcagccgttctcgctctcgttcccgttccaaatctgcagaaagagaacgacggcacaaagaacgagaacgagataaggagcgggatcggaataagaaggaccgagatcgagacaaggatgggcacagacgggacaaggaccgtaaacgatccagcttatctcctggtcgaggaaaagactttaaatctcggaaggacagagactctaagaaggatgaagaggatgaacatggtgataagaagcctaaggcccagccattatccctggaggagcttctggccaagaaaaaggctgaggaagaagctgaggctaagcccaagttcctctctaaagcagaacgagaggctgaagctctaaagcgacggcagcaggaggtggaa

SEQ ID NO: 125280 - DNA, 869 bp, Homo sapiens
  Payload ID: 4586
  Gene Symbol: DDX23
  Gene Name: DEAD (Asp-Glu-Ala-Asp) box polypeptide 23
  ENST ID: ENST00000550834
  CDS Start-End: 1-780
gctgaggctaagcccaagttcctctctaaagcagaacgagaggctgaagctctaaagcgacggcagcaggaggtggaagagcggcagaggatgcttgaagaagagaggaagaaaaggaaacagttccaagacttgggcaggaagatgttggaagatcctcaggaacgggaacgtcgggaacgcagggagaggatggaacgggagaccaatggaaatgaggatgaggaagggcggcagaagatccgggaagagaaggataagagcaaggaactgcatgccattaaggagcgttacctgggtggcatcaaaaagcggcgccgaacgagacatctcaatgaccggaaatttgtttttgagtgggatgcatctgaggacacatccattgactacaaccccctgtacaaagaacggcaccatcctcaccaagaagcgccgggaagagaccatctttgcctgacacagcactcttcctgtgggctgagggcatctccaaagctgcctgatgcctgtttttcagaaccctcacatccctctttccaggtcctcactcttgggatatgggggcttaggaaaacaatccaactccctagcccagaccctcaggtcaggaggcctgcgtgtggggctgcaaaaggagaggacgacgctgtcggaggcagggagagcaaattaccacagcttcttggcccagttctgcccttctttgctttgggattgcactgggccatcagctcatgccaggctatgggggcagccagttggcattgctccccagactgaacagaaacctggccgccggatgggacctcctttggcacagacttgactgtgtaactgcataaactgcagtagcatcattgccctagatg

SEQ ID NO: 125281 - DNA, 2643 bp, Homo sapiens
  Payload ID: 4587
  Gene Symbol: DDX27
  Gene Name: DEAD (Asp-Glu-Ala-Asp) box polypeptide 27
  Uniprot ID: Q96GQ7
  ENST ID: ENST00000371764
  CDS Start-End: 10-2400
aagtgacgcatggtacttgcgcaaagacgacgaggaggctgcgaaaagttaagggccggaccgcaggctgtgctcgcttccggaagtggcttctgcgacaacatgcttgcggacctcggcttaatcggaaccataggcgaggatgacgaggtgccggtggagcccgagtctgactccggggacgaggaagaggaggggcccattgtgctgggcagacgacaaaaagctttggggaagaaccgcagtgctgatttcaaccctgatttcgttttcactgagaaggaggggacgtacgatggcagctgggccctggctgatgtcatgagccaactcaagaagaagagggcagccactacattagatgagaagattgagaaagttcgaaagaaaaggaaaacagaggataaagaagccaagtctgggaagttggaaaaggagaaagaagcaaaggaaggctctgaaccaaaggagcaggaagaccttcaagagaatgatgaggaaggctcagaagatgaagcctcggagactgactactcatcagctgatgagaacatcctcaccaaagcagatacactcaaagtaaaggatcggaagaagaagaagaagaaaggacaggaagcaggaggattttttgaagatgcatctcagtacgatgaaaacctctcgttccaggacatgaacctttcccgccctcttctgaaggccattacagccatgggcttcaagcagcccaccccgatccagaaggcgtgcatacctgtgggtctattggggaaggacatctgtgcctgtgcagccactgggacaggtaaaactgccgcctttgccctgcctgttttggagcgtctgatttataaaccccgccaggctccagtcacccgcgtgctggtgctagtgcccacccgagagctgggcatccaggtgcactctgtcaccagacagctggcccagttctgcaacatcaccacctgcctggctgtgggcggcttggatgtgaagtctcaggaagcagctcttcgggcagcgcctgacatcctcatcgccaccccaggccggctcatcgatcacctccacaactgcccttccttccacctgagcagcatcgaggtgctcatcctggacgaggctgacaggatgctggatgagtactttgaggagcagatgaaggagatcatccgaatgtgttcccaccaccgccagaccatgctcttctcggccaccatgacagacgaggtgaaagatctggcttctgtctccttgaagaatcctgtccggatatttgtgaacagcaacacagatgtggctcccttcctgcggcaggagttcatccggatccggcctaatcgtgaaggagaccgggaagccatcgtggcagctttgttgacgaggaccttcactgaccatgtgatgctgttcacgcaaaccaagaagcaggcccaccgcatgcacatcctcctggggctcatggggctgcaggtgggtgagctccatggcaacttgtcacagacgcagcggctggaggccctccggcgttttaaggatgaacagattgacatcctcgtggccactgatgtggcagcccgtggacttgacattgagggggtcaaaacggtaatcaacttcacaatgcctaataccatcaaacattatgtccaccgggtggggcgaacagcacgtgctggcagggctgggcgctcagtctctctggtgggagaagatgagcggaagatgctgaaggagattgtaaaagctgccaaggcccctgtgaaggccaggatacttccccaagatgtcatcctcaaattccgggacaagattgagaaaatggagaaagatgtgtatgcagttctgcagctagaggcggaggaaaaagagatgcagcagtcagaagcccagatcaatacagcaaagcggctcctggagaaggggaaggaggcagtggtccaagagcccgagaggagctggttccagaccaaagaagagaggaagaaggagaaaattgccaaagctctgcaggaatttgacttggccttaagaggaaagaagaaaaggaagaagtttatgaaggatgccaaaaaaaagggggagatgacagcagaggaaaggtctcagtttgaaatcctcaaggcgcagatgtttgctgaacggctagcgaagaggaatcgcagagccaagcgggcccgagcaatgcccgaggaggagccagtgagaggtcctgccaagaagcaaaagcaggggaagaaatctgtatttgatgaagaactcaccaacacaagcaagaaggccctgaaacagtatcgagctggcccttcctttgaagaaaggaaacagttgggcttgccccaccagagacgaggaggaaactttaaatctaaatccagatacaagaggaggaagtagctgtcgtggcctgaagaaattcatgggggcagcccttaaatcccttccctgtgggaagtcatcctggctggtctgtcttttctccatttgtttaaaaaaaaaacaaaaacaaaaaacaacactttggtgtggtggtatggtacgtagctattttcctaagcatgtctgtcaatctcccttcttgctgattagctttcatatgactatattaaatggaagtatttttgggaaaagagaaaccaa

SEQ ID NO: 125282 - DNA, 824 bp, Homo sapiens
  Payload ID: 4587
  Gene Symbol: DDX27
  Gene Name: DEAD (Asp-Glu-Ala-Asp) box polypeptide 27
  ENST ID: ENST00000462328
  CDS Start-End: 18-527
gtggcttctgcgacaacatgcttgcggacctcggcttaatcggaaccataggcgaggatgacgaggtgccggtggagcccgagtctgactccggggacgaggaagaggaggggcccattgtgctgggcagacgacaaaaagctttggggaagaaccgcagtgctgatttcaaccctgatttcgttttcactgagaaggaggggacgtacgatggcagctgggccctggctgatgtcatgagccaactcaagaagaagagggcagccactacattagatgagaagattgagaaagttcgaaagaaaaggaaaacagaggataaagaagccaagtctgggaagttggaaaaggagaaagaagcaaaggaaggctctgaaccaaaggagcaggaagaccttcaagagaatgatgaggaaggctcagaagatgaagcctcggagactgactactcatcagctgatgagaacatcctcaccaaagcaggcaagttacttcaccatgctgccacaaagtgtcctcatctgtgaaacaaggttgacgatggtcacccctcagaggctgaagtgtggcattggcacttaggacagtgtccagcaggatgcaagtgctttgtaagtctgagccgtggtcatcagctaagtttttctccatagatacactcaaagtaaaggatcggaagaagaagaagaagaaaggacaggaagcaggaggattttttgaagatgcatctcagtacgatgaaaacctctcgttccaggacatgaacctttcccgccctcttctgaaggccattacagccatgggcttcaagcagcccaccccga

SEQ ID NO: 125283 - DNA, 2567 bp, Homo sapiens
  Payload ID: 4587
  Gene Symbol: DDX27
  Gene Name: DEAD (Asp-Glu-Ala-Asp) box polypeptide 27
  ENST ID: ENST00000618172
  CDS Start-End: 34-2331
gtgctcgcttccggaagtggcttctgcgacaacatgcttgcggacctcggcttaatcggaaccataggcgaggatgacgaggtgccggtggagcccgagtctgactccggggacgaggaagaggaggggcccattgtgctgggcagacgacaaaaagctttggggaagaaccgcagtgctgatttcaaccctgatttcgttttcactgagaaggaggggacgtacgatggcagctgggccctggctgatgtcatgagccaactcaagaagaagagggcagccactacattagatgagaagattgagaaagttcgaaagaaaaggaaaacagaggataaagaagccaagtctgggaagttggaaaaggagaaagaagcaaaggaaggctctgaaccaaaggagcaggaagaccttcaagagaatgatgaggaaggctcagaagatgaagcctcggagactgactactcatcagctgatgagaacatcctcaccaaagcagatacactcaaagtaaaggatcggaagaagaagaagaagaaaggacaggaagcaggaggattttttgaagatgcatctcagtacgatgaaaacctctcgttccaggacatgaacctttcccgccctcttctgaaggccattacagccatgggcttcaagcagcccaccccgatccagaaggcgtgcatacctgtgggtctattggggaaggacatctgtgcctgtgcagccactgggacaggtaaaactgccgcctttgccctgcctgttttggagcgtctgatttataaaccccgccaggctccagtcacccgcgtgctggtgctagtgcccacccgagagctgggcatccaggtgcactctgtcaccagacagctggcccagttctgcaacatcaccacctgcctggctgtgggcggcttggatgtgaagtctcaggaagcagctcttcgggcagcgcctgacatcctcatcgccaccccaggccggctcatcgatcacctccacaactgcccttccttccacctgagcagcatcgaggtgctcatcctggacgaggctgacaggatgctggatgagtactttgaggagcagatgaaggagatcatccgaatgtgttcccaccaccgccagaccatgctcttctcggccaccatgacagacgaggtgaaagatctggcttctgtctccttgaagaatcctgtccggatatttgtgaacagcaacacagatgtggctcccttcctgcggcaggagttcatccggatccggcctaatcgtgaaggagaccgggaagccatcgtggcagctttgttgacgaggaccttcactgaccatgtgatgctgttcacgcaaaccaagaagcaggcccaccgcatgcacatcctcctggggctcatggggctgcaggtgggtgagctccatggcaacttgtcacagacgcagcggctggaggccctccggcgttttaaggatgaacagattgacatcctcgtggccactgatgtggcagcccgtggacttgacattgagggggtcaaaacggtaatcaacttcacaatgcctaataccatcaaacattatgtccaccgggtggggcgaacagcacgtgctggcagggctgggcgctcagtctctctggtgggagaagatgagcggaagatgctgaaggagattgtaaaagctgccaaggcccctgtgaaggccaggatacttccccaagatgtcatcctcaaattccgggacaagattgagaaaatggagaaagatgtgtatgcagttctgcagctagaggcggaggaaaaagagatgcagcagtcagaagcccagatcaatacagcaaagcggctcctggagaaggggaaggaggcagtggtccaagagcccgagaggagctggttccagaccaaagaagagaggaagaaggagaaaattgccaaagctctgcaggaatttgacttggccttaagaggaaagaagaaaaggaagaagtttatgaaggatgccaaaaaaaagggggagatgacagcagaggaaaggtctcagtttgaaatcctcaaggcgcagatgtttgctgaacggctagcgaagaggaatcgcagagccaagcgggcccgagcaatgcccgaggaggagccagtgagaggtcctgccaagaagcaaaagcaggggaagaaatctgtatttgatgaagaactcaccaacacaagcaagaaggccctgaaacagtatcgagctggcccttcctttgaagaaaggaaacagttgggcttgccccaccagagacgaggaggaaactttaaatctaaatccagatacaagaggaggaagtagctgtcgtggcctgaagaaattcatgggggcagcccttaaatcccttccctgtgggaagtcatcctggctggtctgtcttttctccatttgtttaaaaaaaaaacaaaaacaaaaaacaacactttggtgtggtggtatggtacgtagctattttcctaagcatgtctgtcaatctcccttcttgctgattagctttcatatgactatattaaatggaagtatttttgggaaaagag

SEQ ID NO: 125284 - DNA, 825 bp, Homo sapiens
  Payload ID: 4587
  Gene Symbol: DDX27
  Gene Name: DEAD (Asp-Glu-Ala-Asp) box polypeptide 27
  ENST ID: ENST00000493252
  CDS Start-End: 1-825
aagtaaaggatcggaagaagaagaagaagaaaggacaggaagcaggaggattttttgaagatgcatctcagtacgatgaaaacctctcgttccaggacatgaacctttcccgccctcttctgaaggccattacagccatgggcttcaagcagcccaccccgatccagaaggcgtgcatacctgtgggtctattggggaaggacatctgtgcctgtgcagccactgggacaggtaaaactgccgcctttgccctgcctgttttggagcgtctgatttataaaccccgccaggctccagtcacccgcgtgctggtgctagtgcccacccgagagctgggcatccaggtgcactctgtcaccagacagctggcccagttctgcaacatcaccacctgcctggctgtgggcggcttggatgtgaagtctcaggaagcagctcttcgggcagcgcctgacatcctcatcgccaccccaggccggctcatcgatcacctccacaactgcccttccttccacctgagcagcatcgaggtgctcatcctggacgaggctgacagcccgcctgtcgacacagcctggccacacgcccccactttgtggcttctgcatttgccatttcctcagcctggagccatctcctgccccttcaggatgctggatgagtactttgaggagcagatgaaggagatcatccgaatgtgttcccaccaccgccagaccatgctcttctcggccaccatgacagacgaggtgaaagatctggcttctgtctccttgaagaatcctgtccggatatttgtgaacagcaacacagatgtggctccct

SEQ ID NO: 125285 - DNA, 2693 bp, Homo sapiens
  Payload ID: 4587
  Gene Symbol: DDX27
  Gene Name: DEAD (Asp-Glu-Ala-Asp) box polypeptide 27
  Uniprot ID: Q96GQ7
  ENST ID: ENST00000622530
  CDS Start-End: 62-2452
atgcgcactcttaagaggtcgaacggggagggcggcaggggctctggaacggaagtgacgcatggtacttgcgcaaagacgacgaggaggctgcgaaaagttaagggccggaccgcaggctgtgctcgcttccggaagtggcttctgcgacaacatgcttgcggacctcggcttaatcggaaccataggcgaggatgacgaggtgccggtggagcccgagtctgactccggggacgaggaagaggaggggcccattgtgctgggcagacgacaaaaagctttggggaagaaccgcagtgctgatttcaaccctgatttcgttttcactgagaaggaggggacgtacgatggcagctgggccctggctgatgtcatgagccaactcaagaagaagagggcagccactacattagatgagaagattgagaaagttcgaaagaaaaggaaaacagaggataaagaagccaagtctgggaagttggaaaaggagaaagaagcaaaggaaggctctgaaccaaaggagcaggaagaccttcaagagaatgatgaggaaggctcagaagatgaagcctcggagactgactactcatcagctgatgagaacatcctcaccaaagcagatacactcaaagtaaaggatcggaagaagaagaagaagaaaggacaggaagcaggaggattttttgaagatgcatctcagtacgatgaaaacctctcgttccaggacatgaacctttcccgccctcttctgaaggccattacagccatgggcttcaagcagcccaccccgatccagaaggcgtgcatacctgtgggtctattggggaaggacatctgtgcctgtgcagccactgggacaggtaaaactgccgcctttgccctgcctgttttggagcgtctgatttataaaccccgccaggctccagtcacccgcgtgctggtgctagtgcccacccgagagctgggcatccaggtgcactctgtcaccagacagctggcccagttctgcaacatcaccacctgcctggctgtgggcggcttggatgtgaagtctcaggaagcagctcttcgggcagcgcctgacatcctcatcgccaccccaggccggctcatcgatcacctccacaactgcccttccttccacctgagcagcatcgaggtgctcatcctggacgaggctgacaggatgctggatgagtactttgaggagcagatgaaggagatcatccgaatgtgttcccaccaccgccagaccatgctcttctcggccaccatgacagacgaggtgaaagatctggcttctgtctccttgaagaatcctgtccggatatttgtgaacagcaacacagatgtggctcccttcctgcggcaggagttcatccggatccggcctaatcgtgaaggagaccgggaagccatcgtggcagctttgttgacgaggaccttcactgaccatgtgatgctgttcacgcaaaccaagaagcaggcccaccgcatgcacatcctcctggggctcatggggctgcaggtgggtgagctccatggcaacttgtcacagacgcagcggctggaggccctccggcgttttaaggatgaacagattgacatcctcgtggccactgatgtggcagcccgtggacttgacattgagggggtcaaaacggtaatcaacttcacaatgcctaataccatcaaacattatgtccaccgggtggggcgaacagcacgtgctggcagggctgggcgctcagtctctctggtgggagaagatgagcggaagatgctgaaggagattgtaaaagctgccaaggcccctgtgaaggccaggatacttccccaagatgtcatcctcaaattccgggacaagattgagaaaatggagaaagatgtgtatgcagttctgcagctagaggcggaggaaaaagagatgcagcagtcagaagcccagatcaatacagcaaagcggctcctggagaaggggaaggaggcagtggtccaagagcccgagaggagctggttccagaccaaagaagagaggaagaaggagaaaattgccaaagctctgcaggaatttgacttggccttaagaggaaagaagaaaaggaagaagtttatgaaggatgccaaaaaaaagggggagatgacagcagaggaaaggtctcagtttgaaatcctcaaggcgcagatgtttgctgaacggctagcgaagaggaatcgcagagccaagcgggcccgagcaatgcccgaggaggagccagtgagaggtcctgccaagaagcaaaagcaggggaagaaatctgtatttgatgaagaactcaccaacacaagcaagaaggccctgaaacagtatcgagctggcccttcctttgaagaaaggaaacagttgggcttgccccaccagagacgaggaggaaactttaaatctaaatccagatacaagaggaggaagtagctgtcgtggcctgaagaaattcatgggggcagcccttaaatcccttccctgtgggaagtcatcctggctggtctgtcttttctccatttgtttaaaaaaaaaacaaaaacaaaaaacaacactttggtgtggtggtatggtacgtagctattttcctaagcatgtctgtcaatctcccttcttgctgattagctttcatatgactatattaaatggaagtatttttgggaaaagagaaacc

SEQ ID NO: 125286 - DNA, 2169 bp, Homo sapiens
  Payload ID: 4588
  Gene Symbol: DDX28
  Gene Name: DEAD (Asp-Glu-Ala-Asp) box polypeptide 28
  Uniprot ID: Q9NUL7
  ENST ID: ENST00000332395
  CDS Start-End: 241-1863
atcgccagcctccagtcctgcctccacgacgcgcccttccccaaggctggccgggtctggatgtcgccatcccctattcggagctacagacctcgcagctgaactcttaaaaagaacctcgcttcttcctcacggtgctccagctccacacaccgtactgagcctcgccagccaccgtacgcgaggtcgcggcgcgtccgtgacgtcactgatgtgcgcttctcccgcactaagggaaacatggctctaacgcggccggtgcggctcttttccctcgtgactcggttgctcctggcgccgcgacggggcctcacggtccgcagtcccgacgaacccctgccggtggtgcgcatcccagtggctctacagcggcagttggaacagcggcagagcaggcggcggaacctcccgaggccggtgctggttcgacccggaccgctgctggtttcggcgcggcggccggagttgaaccagccggcgcgcctcacactgggccgttgggagcgcgcgccgctagcctctcaaggctggaagagtcgacgcgcgcgtcgggaccacttctccatcgagcgcgcgcaacaggaggcgccagcggtgcgaaagctctcgtctaagggcagctttgctgacctgggcctggagccccgtgtgctgcacgcactacaggaggctgcgcctgaagtcgttcagcccacaaccgtgcagtctagcaccatcccctcactacttcgcggccgccatgtcgtttgcgccgcagaaaccggcagtggcaagactctcagctacctcctgccgctgcttcaacggctcttgggccagccaagcctggactcccttcctatccccgcgccccgaggcctggtccttgttccttcccgagaattggcccaacaggtgcgggctgtggcccaacccttgggccgctccttgggcctgctggtgcgggacctggagggaggccacggcatgcgtaggatcaggctgcagctgtccagacagccttcagcagatgtgcttgtggccactccaggggctctgtggaaggccctgaaaagtcgactgatcagtctggagcaactctccttcttggtgttggatgaggcagacacactgctggatgaaagcttcctggaactggtggactacatcttagagaagagccacatagcagaaggcccagctgacttggaagaccccttcaatcccaaagctcagttagtgctggtaggagccacatttcccgaaggtgtaggccagttgctgaataaagtcgccagcccagatgctgtcaccaccatcaccagctccaagctccactgtatcatgcctcatgtgaaacagacatttctgagactgaagggagcagataaggtggccgagctggtgcacatcctcaagcatcgtgacagagcagaaaggactggtccctcaggaactgttctggtgttctgtaatagctccagcactgtgaactggctgggatatattctggatgaccacaaaatccaacacctaaggttgcaggggcaaatgccagccttgatgagggtaggaatcttccagtccttccagaagagctcccgagacatacttctctgcacagacatagcctctcggggcctggacagcactggtgtggagctggttgtcaattatgatttccccccaacgctgcaagattacatccacagagcagggagagtgggccgtgtggggagcgaggtgccaggcaccgtcatcagttttgtgacccatccctgggatgtgagcctggttcagaagattgagctggcggctcgccgaaggagaagtcttccaggactagcatcctcggtgaaagagcctttgccccaagcaacctgattttgacaaatctgattaaaatgtgatgctagaacagggatctttcccagtatcttgagtgggtgaccacacttgtcagtgggaggctctgggctgccctgtcggctccttgagggcgggatgaactgctttgtgacttggaaaggtacgctgctggccagcattggagaagaagctgctgagcatggctttctgtagtctttagcaagacacaagtggattttgactttgtatcatgtcatgatttctaacaataaatgatgtttttatgtgcctcccctaagaataattagcaccggggcggaa

SEQ ID NO: 125287 - DNA, 2408 bp, Homo sapiens
  Payload ID: 4589
  Gene Symbol: DDX31
  Gene Name: DEAD (Asp-Glu-Ala-Asp) box polypeptide 31
  Uniprot ID: Q9H8H2
  ENST ID: ENST00000310532
  CDS Start-End: 153-1910
aaaaaggacagcgagcggggagccccgaggacccccttttccctgcccagggattgagctccagagcctgttagggagctacccagacaggctttagttcctaaagtgctgaggaaacgcacggggcggtaaaggggaggctcgtcggtgagatggcgccggatctcgcttctcagaggcattcagagagcttccccagcgtgaactctcggccgaatgtaattttgccaggccgcgagggacgcagagaggggctgccaccaggcgggggcacgcgcggtagtcttgtccctacccgcccggtgccgccgtccccggctcccctcgggacgagtccgtacagctggagccgttccggacccggaaggggcggtggcgcagggtcctcgcgcgtcccacgtggggtcccgggcccagcagtctgcgcaccgggctcgctgctgcaccacgcgtcacccacgcagaccatggcagccgccgacggttcgctcttcgacaaccccaggacgttctccagacgtcccccagcccaggcgagtcggcaagcaaaggctacgaaaagaaaataccaagcgtccagtgaggctcccccagcgaaacggaggaacgaaacttcatttctcccagccaagaaaactagtgttaaagaaactcagaggacttttaaggggaacgcacaaaaaatgttttctccaaagaagcattcggttagcacaagtgatagaaaccaggaggagagacagtgcattaagacttcatcactgtttaaaaacaaccctgacattccagaactccacagacctgtggtaaagcaggtgcaagaaaaagtgtttacttcagctgcttttcatgagctgggcctccacccacatttaatttccacaataaatacggtcttaaaaatgtctagtatgaccagtgttcagaagcaaagtattcctgtgttgctggaaggcagagatgctctcgtgagatcccagacgggctcaggtaaaactcttgcctattgcatccctgtggtccagtcccttcaagcaatggagtcaaaaatacagcgcagtgatggcccctatgccctggtgctcgtgccaacgagagagctagctctacaaagctttgacactgtccagaaactgcttaagcctttcacctggattgtgcctggagtgttaatgggaggagagaagagaaaatcagaaaaggccagactccgcaaaggaataaatatccttatctcaactcctggacgcctggtggatcatataaaatccacaaagaacattcattttagtcggctgcggtggttggtgtttgatgaagcagacagaatcttggatttgggttttgaaaaggacatcacagtgatacttaatgctgtaaatgctgaatgccaaaaacgacagaatgtcttgctatcagcgacactcacagaaggtgtaacgcggctagctgatatcagtttgcatgatccagtcagtatttctgtcctggacaagagccatgaccagttgaacccaaaggacaaagcggtccaggaggtctgtcctccaccagctggcgacaagctggacagctttgcaataccagagagtctcaagcagcatgtgactgtggttcccagcaaactgaggcttgtctgcctagcggccttcatccttcagaaatgcaagtttgaggaagaccagaagatggttgtctttttctcaagttgcgagctggtggagttccactacagcctcttcctacagaccctgctgagcagctcaggggcgccggcatcagggcagttgccatctgcctccatgcgattaaaattcctacggctgcatggcggcatggagcaggaggaaagaacagcagtgtttcaggaattttcacattccagaagaggcgtccttctttgcacgtgaagaactcaccctaagccagaggaaaggaaccttgcttttaataccatcattatgttgacgagttgataagaagtaccaccgaatggccggaaaatggagtttctaagccacctgattttaaggctgacattaggttttctgttggtctccggtggctgtccttgattgtccctggatggagtgcagtcacctttttcccagaaaggaaagatacctgcagcccgccctgggcgccaactgtcccttggcatcctccttggctgtccggcgcgtgcatttctttttcagaagatgcacctaaatcacctgtgctgctttcctccaccttctccgtatttttttccgcttgaagcatactgttctgtctgtgcagttcttaatttcctctcctcctggggaatttccaccgtgccaggaggctaggagacaaaggagatacggctgtgaagagtcacaatgtcagttctgtgtcccaaataaatgtagactttcgtgctt

SEQ ID NO: 125288 - DNA, 3285 bp, Homo sapiens
  Payload ID: 4589
  Gene Symbol: DDX31
  Gene Name: DEAD (Asp-Glu-Ala-Asp) box polypeptide 31
  Uniprot ID: Q9H8H2
  ENST ID: ENST00000372153
  CDS Start-End: 153-2708
aaaaaggacagcgagcggggagccccgaggacccccttttccctgcccagggattgagctccagagcctgttagggagctacccagacaggctttagttcctaaagtgctgaggaaacgcacggggcggtaaaggggaggctcgtcggtgagatggcgccggatctcgcttctcagaggcattcagagagcttccccagcgtgaactctcggccgaatgtaattttgccaggccgcgagggacgcagagaggggctgccaccaggcgggggcacgcgcggtagtcttgtccctacccgcccggtgccgccgtccccggctcccctcgggacgagtccgtacagctggagccgttccggacccggaaggggcggtggcgcagggtcctcgcgcgtcccacgtggggtcccgggcccagcagtctgcgcaccgggctcgctgctgcaccacgcgtcacccacgcagaccatggcagccgccgacggttcgctcttcgacaaccccaggacgttctccagacgtcccccagcccaggcgagtcggcaagcaaaggctacgaaaagaaaataccaagcgtccagtgaggctcccccagcgaaacggaggaacgaaacttcatttctcccagccaagaaaactagtgttaaagaaactcagaggacttttaaggggaacgcacaaaaaatgttttctccaaagaagcattcggttagcacaagtgatagaaaccaggaggagagacagtgcattaagacttcatcactgtttaaaaacaaccctgacattccagaactccacagacctgtggtaaagcaggtgcaagaaaaagtgtttacttcagctgcttttcatgagctgggcctccacccacatttaatttccacaataaatacggtcttaaaaatgtctagtatgaccagtgttcagaagcaaagtattcctgtgttgctggaaggcagagatgctctcgtgagatcccagacgggctcaggtaaaactcttgcctattgcatccctgtggtccagtcccttcaagcaatggagtcaaaaatacagcgcagtgatggcccctatgccctggtgctcgtgccaacgagagagctagctctacaaagctttgacactgtccagaaactgcttaagcctttcacctggattgtgcctggagtgttaatgggaggagagaagagaaaatcagaaaaggccagactccgcaaaggaataaatatccttatctcaactcctggacgcctggtggatcatataaaatccacaaagaacattcattttagtcggctgcggtggttggtgtttgatgaagcagacagaatcttggatttgggttttgaaaaggacatcacagtgatacttaatgctgtaaatgctgaatgccaaaaacgacagaatgtcttgctatcagcgacactcacagaaggtgtaacgcggctagctgatatcagtttgcatgatccagtcagtatttctgtcctggacaagagccatgaccagttgaacccaaaggacaaagcggtccaggaggtctgtcctccaccagctggcgacaagctggacagctttgcaataccagagagtctcaagcagcatgtgactgtggttcccagcaaactgaggcttgtctgcctagcggccttcatccttcagaaatgcaagtttgaggaagaccagaagatggttgtctttttctcaagttgcgagctggtggagttccactacagcctcttcctacagaccctgctgagcagctcaggggcgccggcatcagggcagttgccatctgcctccatgcgattaaaattcctacggctgcatggcggcatggagcaggaggaaagaacagcagtgtttcaggaattttcacattccagaagaggcgtccttctttgcacggatgttgcagctcggggcttagatctccctcaagtcacgtggattgttcagtacaacgctccatcttcacctgcagaatacatccaccggattggaagaaccgcccggattggctgccatgggagcagcctgctcattttggctccttcggaggcagaatatgtcaactcgttggcttctcacaaaatcaacgtttctgagattaagatggaagatattttgtgtgttctgacaagagatgattgttttaaagggaaacgatggggagcccagaaatcccatgctgttggcccccaggaaatccgagagcgagccacagtcttgcagacggtatttgaagattacgtgcactccagtgagaggagggtctcctgggcaaagaaagctctgcagtccttcatccaagcctacgccacctaccccagggagctgaagcacatcttccacgtccgatccctccaccttgggcatgtggcgaagagcttcggactaagagatgcccccaggaatcttagtgccttgactagaaagaagaggaaagcacacgtgaaaaggcctgaccttcataagaagacccagagtaaacacagcctcgctgaaatcctacgttcggaatactcaagcggcatggaggccgacatcgccaaggtcaaaaagcaaaacgcacctggagagcctggtggccggcccctgcagcacagtctgcagccgacaccctgctttggccgtgggaaaacattaaaatggagaaaaacccaaaaaggtgtacagcgggacagcaagacttcccagaaagtttaaaatctctctgggtcttcgagtggaacctggaagccccgggtggcagtggattgatgtccagttcttgtcagaggaggcttgtgaaaaataactgcgcctttgcctgaataccacgtccccaagaatcagaggggccacagcccttctcctccatgggaggccctggagcctgatagaaatcagtggtgtggggcactgtagagactagccagctcccgacggaaggggtctgtgtcttgtattgatcccatcagtgcccggcactcccttcacccaggtgctgacgtgccggggttgagctggcaccccgggatgtgatgtaagaacgccctgcgcgtcagcctggaacgggcttgattgctgcccttaactgtgttctgaagtttcacagcttggcttcagcctatcagcgcatacattggcatgaattttgtgaattagggtgttaaaaactggaattgaatttgtacaaaaagagaatatatttatcactaattattttcttaatgtaggaatgtaccgttaaaaaggaccaaaagtttttggtctgggtcaaaaaatacgaatgtgttctcag

SEQ ID NO: 125289 - DNA, 4577 bp, Homo sapiens
  Payload ID: 4589
  Gene Symbol: DDX31
  Gene Name: DEAD (Asp-Glu-Ala-Asp) box polypeptide 31
  Uniprot ID: Q9H8H2
  ENST ID: ENST00000372159
  CDS Start-End: 153-2708
aaaaaggacagcgagcggggagccccgaggacccccttttccctgcccagggattgagctccagagcctgttagggagctacccagacaggctttagttcctaaagtgctgaggaaacgcacggggcggtaaaggggaggctcgtcggtgagatggcgccggatctcgcttctcagaggcattcagagagcttccccagcgtgaactctcggccgaatgtaattttgccaggccgcgagggacgcagagaggggctgccaccaggcgggggcacgcgcggtagtcttgtccctacccgcccggtgccgccgtccccggctcccctcgggacgagtccgtacagctggagccgttccggacccggaaggggcggtggcgcagggtcctcgcgcgtcccacgtggggtcccgggcccagcagtctgcgcaccgggctcgctgctgcaccacgcgtcacccacgcagaccatggcagccgccgacggttcgctcttcgacaaccccaggacgttctccagacgtcccccagcccaggcgagtcggcaagcaaaggctacgaaaagaaaataccaagcgtccagtgaggctcccccagcgaaacggaggaacgaaacttcatttctcccagccaagaaaactagtgttaaagaaactcagaggacttttaaggggaacgcacaaaaaatgttttctccaaagaagcattcggttagcacaagtgatagaaaccaggaggagagacagtgcattaagacttcatcactgtttaaaaacaaccctgacattccagaactccacagacctgtggtaaagcaggtgcaagaaaaagtgtttacttcagctgcttttcatgagctgggcctccacccacatttaatttccacaataaatacggtcttaaaaatgtctagtatgaccagtgttcagaagcaaagtattcctgtgttgctggaaggcagagatgctctcgtgagatcccagacgggctcaggtaaaactcttgcctattgcatccctgtggtccagtcccttcaagcaatggagtcaaaaatacagcgcagtgatggcccctatgccctggtgctcgtgccaacgagagagctagctctacaaagctttgacactgtccagaaactgcttaagcctttcacctggattgtgcctggagtgttaatgggaggagagaagagaaaatcagaaaaggccagactccgcaaaggaataaatatccttatctcaactcctggacgcctggtggatcatataaaatccacaaagaacattcattttagtcggctgcggtggttggtgtttgatgaagcagacagaatcttggatttgggttttgaaaaggacatcacagtgatacttaatgctgtaaatgctgaatgccaaaaacgacagaatgtcttgctatcagcgacactcacagaaggtgtaacgcggctagctgatatcagtttgcatgatccagtcagtatttctgtcctggacaagagccatgaccagttgaacccaaaggacaaagcggtccaggaggtctgtcctccaccagctggcgacaagctggacagctttgcaataccagagagtctcaagcagcatgtgactgtggttcccagcaaactgaggcttgtctgcctagcggccttcatccttcagaaatgcaagtttgaggaagaccagaagatggttgtctttttctcaagttgcgagctggtggagttccactacagcctcttcctacagaccctgctgagcagctcaggggcgccggcatcagggcagttgccatctgcctccatgcgattaaaattcctacggctgcatggcggcatggagcaggaggaaagaacagcagtgtttcaggaattttcacattccagaagaggcgtccttctttgcacggatgttgcagctcggggcttagatctccctcaagtcacgtggattgttcagtacaacgctccatcttcacctgcagaatacatccaccggattggaagaaccgcccggattggctgccatgggagcagcctgctcattttggctccttcggaggcagaatatgtcaactcgttggcttctcacaaaatcaacgtttctgagattaagatggaagatattttgtgtgttctgacaagagatgattgttttaaagggaaacgatggggagcccagaaatcccatgctgttggcccccaggaaatccgagagcgagccacagtcttgcagacggtatttgaagattacgtgcactccagtgagaggagggtctcctgggcaaagaaagctctgcagtccttcatccaagcctacgccacctaccccagggagctgaagcacatcttccacgtccgatccctccaccttgggcatgtggcgaagagcttcggactaagagatgcccccaggaatcttagtgccttgactagaaagaagaggaaagcacacgtgaaaaggcctgaccttcataagaagacccagagtaaacacagcctcgctgaaatcctacgttcggaatactcaagcggcatggaggccgacatcgccaaggtcaaaaagcaaaacgcacctggagagcctggtggccggcccctgcagcacagtctgcagccgacaccctgctttggccgtgggaaaacattaaaatggagaaaaacccaaaaaggtgtacagcgggacagcaagacttcccagaaagtttaaaatctctctgggtcttcgagtggaacctggaagccccgggtggcagtggattgatgtccagttcttgtcagaggaggcttgtgaaaaataactgcgcctttgcctgaataccacgtccccaagaatcagaggggccacagcccttctcctccatgggaggccctggagcctgatagaaatcagtggtgtggggcactgtagagactagccagctcccgacggaaggggtctgtgtcttgtattgatcccatcagtgcccggcactcccttcacccaggtgctgacgtgccggggttgagctggcaccccgggatgtgatgtaagaacgccctgcgcgtcagcctggaacgggcttgattgctgcccttaactgtgttctgaagtttcacagcttggcttcagcctatcagcgcatacattggcatgaattttgtgaattagggtgttaaaaactggaattgaatttgtacaaaaagagaatatatttatcactaattattttcttaatgtaggaatgtaccgttaaaaaggaccaaaagtttttggtctgggtcaaaaaatacgaatgtgttctcaggctcgtggtccctcttattttcttctggaaacacgaggttgcatttacatgcattgctccctctttcatgtccactgaaaactcactctctcagggctaattgatttactgttggctttttattatttgcctttgaagtcaaaaggcaccagtatcccaagctttttttccctatcgaatcctgtcttgtcttcaagaaaggtctgggggtctttgtattgtgacccaggccacagctgcccgccccccgcccccgacccaccccgccctgcccctgcattgtgttttctgggaggtttgaaagaggccccctggagcatattgatttcccaataaatgtaagatttgggcacttgcagaggggtccagaagagaaagggttggaggcctccacacctgtgggcaccgctcctgtcctctccactgtgtcttgccttctcagtttccttctcctctgcagtgactgtgccgccctctgtggtctccccaggaccagtgttgaggcaccacttcagtagatccccccagatccttggaaggtctgagtggccacgagagggtggtgagagttggcaaggtgggccttcctgcagggaccacggggggtcagcatccttgcctccgttctagacacaggtgaatgtcagtgggcacccacactggcggagactccagtgtgagggcaaggaggagcctagtgagactggatcctctgcaggtggaaaaataggaccttctcagagttggctgtcacatacaaattaacagggactgtgggtgacgtttctaacaataataattaaaaaacaacaaccctgcagcacatgtcagcctggcgttgggcaagtctgccacctttcttttatttcgatgtgtaatggttcacatgatttggatgagaaaaggagggatcaaactttatagacaaaacccagctgtgtgaaaaacaggattaatgccagtgattggggatgatcaaagagaaaccttactttttctcccccagtactcattccactaaagggcgaattggcagagttcggcatccctggggggaaagagaagtgctagaatcatgcaacgtgtgagtgacgataattccaagatcaaaacttacacacttaatctgctaactcttatggtgagggtttcttgccatagatgctatgtgggtctgtttctaagtagaatcactatattaccccagttaataaagaaacatggatttagcagatttaaggttaatattgtttaaatttaaataaccttaaaataaatctctttctcttcta

SEQ ID NO: 125290 - DNA, 2814 bp, Homo sapiens
  Payload ID: 4589
  Gene Symbol: DDX31
  Gene Name: DEAD (Asp-Glu-Ala-Asp) box polypeptide 31
  ENST ID: ENST00000438527
  CDS Start-End: 94-2334
ggcgcagggtcctcgcgcgtcccacgtggggtcccgggcccagcagtctgcgcaccgggctcgctgctgcaccacgcgtcacccacgcagaccatggcagccgccgacggttcgctcttcgacaaccccaggacgttctccagacgtcccccagcccaggcgagtcggcaagcaaaggctacgaaaagaaaataccaagcgtccagtgaggctcccccagcgaaacggaggaacgaaacttcatttctcccagccaagaaaactagtgttaaagaaactcagaggacttttaaggggaacgcacaaaaaatgttttctccaaagaagcattcggttagcacaagtgatagaaaccaggaggagagacagtgcattaagacttcatcactgtttaaaaacaaccctgacattccagaactccacagacctgtggtaaagcaggtgcaagaaaaagtgtttacttcagctgcttttcatgagctgggcctccacccacatttaatttccacaataaatacggtcttaaaaatgtctagtatgaccagtgttcagaagcaaagtattcctgtgttgctggaaggcagagatgctctcgtgagatcccagacgggctcaggtaaaactcttgcctattgcatccctgtggtccagtcccttcaagcaatggagtcaaaaatacagcgcagtgatggcccctatgccctggtgctcgtgccaacgagagagctagctctacaaagctttgacactgtccagaaactgcttaagcctttcacctggattgtgcctggagtgttaatgggaggagagaagagaaaatcagaaaaggccagactccgcaaaggaataaatatccttatctcaactcctggacgcctggtggatcatataaaatccacaaagaacattcattttagtcggctgcggtggttggtgtttgatgaagcagacagaatcttggatttgggttttgaaaaggacatcacagtgatacttaatgctgtaaatgctgaatgccaaaaacgacagaatgtcttgctatcagcgacactcacagaaggtgtaacgcggctagctgatatcagtttgcatgatccagtcagtatttctgtcctggacaagagccatgaccagttgaacccaaaggacaaagcggtccaggaggtctgtcctccaccagctggcgacaagctggacagctttgcaataccagagagtctcaagcagcatgtgactgtggttcccagcaaactgaggcttgtctgcctagcggccttcatccttcagaaatgcaagtttgaggaagaccagaagatggttgtctttttctcaagttgcgagctggtggagttccactacagcctcttcctacagaccctgctgagcagctcaggggcgccggcatcagggcagttgccatctgcctccatgcgattaaaattcctacggctgcatggcggcatggagcaggaggaaagaacagcagtgtttcaggaattttcacattccagaagaggcgtccttctttgcacggatgttgcagctcggggcttagatctccctcaagtcacgtggattgttcagtacaacgctccatcttcacctgcagaatacatccaccggattggaagaaccgcccggattggctgccatgggagcagcctgctcattttggctccttcggaggcagaatatgtcaactcgttggcttctcacaaaatcaacgtttctgagattaagatggaagatattttgtgtgttctgacaagagatgattgttttaaagggaaacgatggggagcccagaaatcccatgctgttggcccccaggaaatccgagagcgagccacagtcttgcagacggtatttgaagattacgtgcactccagtgagaggagggtctcctgggcaaagaaagctctgcagtccttcatccaagcctacgccacctaccccagggagctgaagcacatcttccacgtccgatccctccaccttgggcatgtggcgaagagcttcggactaagagatgcccccaggaatcttagtgccttgactagaaagaagaggaaagcacacgtgaaaaggcctgaccttcataagaagacccagagtaaacacagcctcgctgaaatcctacgttcggaatactcaagcggcatggaggccgacatcgccaaggtcaaaaagcaaaacgcacctggagagcctggtggccggcccctgcagcacagtctgcagccgacaccctgctttggccgtgggaaaacattaaaatggagaaaaacccaaaaaggtgtacagcgggacagcaagacttcccagaaagtttaaaatctctctgggtcttcgagtggaacctggaagccccgggtggcagtggattgatgtccagttcttgtcagaggaggcttgtgaaaaataactgcgcctttgcctgaataccacgtccccaagaatcagaggggccacagcccttctcctccatgggaggccctggagcctgatagaaatcagtggtgtggggcactgtagagactagccagctcccgacggaaggggtctgtgtcttgtattgatcccatcagtgcccggcactcccttcacccaggtgctgacgtgccggggttgagctggcaccccgggatgtgatgtaagaacgccctgcgcgtcagcctggaacgggcttgattgctgcccttaactgtgttctgaagtttcacagcttggcttcagcctatcagcgcatacattggcatgaattttgtgaattagggtgttaaaaactggaattgaatttgtacaaaaagagaa

SEQ ID NO: 125291 - DNA, 1333 bp, Homo sapiens
  Payload ID: 4589
  Gene Symbol: DDX31
  Gene Name: DEAD (Asp-Glu-Ala-Asp) box polypeptide 31
  Uniprot ID: Q9H8H2
  ENST ID: ENST00000480876
  CDS Start-End: 153-1112
aaaaaggacagcgagcggggagccccgaggacccccttttccctgcccagggattgagctccagagcctgttagggagctacccagacaggctttagttcctaaagtgctgaggaaacgcacggggcggtaaaggggaggctcgtcggtgagatggcgccggatctcgcttctcagaggcattcagagagcttccccagcgtgaactctcggccgaatgtaattttgccaggccgcgagggacgcagagaggggctgccaccaggcgggggcacgcgcggtagtcttgtccctacccgcccggtgccgccgtccccggctcccctcgggacgagtccgtacagctggagccgttccggacccggaaggggcggtggcgcagggtcctcgcgcgtcccacgtggggtcccgggcccagcagtctgcgcaccgggctcgctgctgcaccacgcgtcacccacgcagaccatggcagccgccgacggttcgctcttcgacaaccccaggacgttctccagacgtcccccagcccaggcgagtcggcaagcaaaggctacgaaaagaaaataccaagcgtccagtgaggctcccccagcgaaacggaggaacgaaacttcatttctcccagccaagaaaactagtgttaaagaaactcagaggacttttaaggggaacgcacaaaaaatgttttctccaaagaagcattcggttagcacaagtgatagaaaccaggaggagagacagtgcattaagacttcatcactgtttaaaaacaaccctgacattccagaactccacagacctgtggtaaagcaggtgcaagaaaaagtgtttacttcagctgcttttcatgagctgggcctccacccacatttaatttccacaataaatacggtcttaaaaatgtctagtatgaccagtgttcagaagcaaagtattcctgtgttgctggaaggcagagatgctctcgtgagatcccagacgggctcaggtaaaactcttgcctattgcatccctgtggtccagtcccttcaagcaatggagtcaaaaatacaggtattactgttatccacattttacgaagaagaacagaggcttaggaaagttaaataaccaaggccatgcagcaagtaatggaggaactggatttctacctcagttctgtttggctgcagagaccaagctccttactcttgtgtgaagacttacagtgaaggttaattcctggctcctgtgctatgtaggggccatgcatctgtgtcttccacagtacctaacgtgggaccttttacagaatggtcactcaataaaggtgatttggttttgcagctatc

SEQ ID NO: 125292 - DNA, 1471 bp, Homo sapiens
  Payload ID: 4590
  Gene Symbol: DDX39A
  Gene Name: DEAD (Asp-Glu-Ala-Asp) box polypeptide 39A
  Uniprot ID: O00148
  ENST ID: ENST00000242776
  CDS Start-End: 103-1386
aagaggcaggaagcgcagcaactcgtgtctgagcgcccggcggaaaaccgaagttggaagtgtctcttagcagcgcgcggagaagaacggggagccagcatcatggcagaacaggatgtggaaaacgatcttttggattacgatgaagaggaagagccccaggctcctcaagagagcacaccagctccccctaagaaagacatcaagggatcctacgtttccatccacagctctggcttccgggactttctgctgaagccggagctcctgcgggccatcgtggactgtggctttgagcatccttctgaggtccagcatgagtgcattccccaggccatcctgggcatggacgtcctgtgccaggccaagtccgggatgggcaagacagcggtcttcgtgctggccaccctacagcagattgagcctgtcaacggacaggtgacggtcctggtcatgtgccacacgagggagctggccttccagatcagcaaggaatatgagcgcttttccaagtacatgcccagcgtcaaggtgtctgtgttcttcggtggtctctccatcaagaaggatgaagaagtgttgaagaagaactgtccccatgtcgtggtggggaccccgggccgcatcctggcgctcgtgcggaataggagcttcagcctaaagaatgtgaagcactttgtgctggacgagtgtgacaagatgctggagcagctggacatgcggcgggatgtgcaggagatcttccgcctgacaccacacgagaagcagtgcatgatgttcagcgccaccctgagcaaggacatccggcctgtgtgcaggaagttcatgcaggatcccatggaggtgtttgtggacgacgagaccaagctcacgctgcacggcctgcagcagtactacgtcaaactcaaagacagtgagaagaaccgcaagctctttgatctcttggatgtgctggagtttaaccaggtgataatcttcgtcaagtcagtgcagcgctgcatggccctggcccagctcctcgtggagcagaacttcccggccatcgccatccaccggggcatggcccaggaggagcgcctgtcacgctatcagcagttcaaggatttccagcggcggatcctggtggccaccaatctgtttggccgggggatggacatcgagcgagtcaacatcgtctttaactacgacatgcctgaggactcggacacctacctgcaccgggtggcccgggcgggtcgctttggcaccaaaggcctagccatcacttttgtgtctgacgagaatgatgccaaaatcctcaatgacgtccaggaccggtttgaagttaatgtggcagaacttccagaggaaatcgacatctccacatacatcgagcagagccggtaaccaccacgtgccagagccgcccacccggagccgcccgcatgcagcttcacctcccctttccaggcgccactgttgagaagctaga

SEQ ID NO: 125293 - DNA, 1355 bp, Homo sapiens
  Payload ID: 4590
  Gene Symbol: DDX39A
  Gene Name: DEAD (Asp-Glu-Ala-Asp) box polypeptide 39A
  Uniprot ID: O00148
  ENST ID: ENST00000324340
  CDS Start-End: 65-1033
ggcggaaaaccgaagttggaagtgtctcttagcagcgcgcggagaagaacggggagccagcatcatggcagaacaggatgtggaaaacgatcttttggattacgatgaagaggaagagccccaggctcctcaagagagcacaccagctccccctaagaaagacatcaagggatcctacgtttccatccacagctctggcttccgggactttctgctgaagccggagctcctgcgggccatcgtggactgtggctttgagcatccttctgaggtccagcatgagtgcattccccaggccatcctgggcatggacgtcctgtgccaggccaagtccgggatgggcaagacagcggtcttcgtgctggccaccctacagcagattgagcctgtcaacggacaggtgacggtcctggtcatgtgccacacgagggagctggccttccagatcagcaaggaatatgagcgcttttccaagtacatgcccagcgtcaaggtgtctgtgttcttcggtggtctctccatcaagaaggatgaagaagtgttgaagaagaactgtccccatgtcgtggtggggaccccgggccgcatcctggcgctcgtgcggaataggagcttcagcctaaagaatgtgaagcactttgtgctggacgagtgtgacaagatgctggagcagctggacatgcggcgggatgtgcaggagatcttccgcctgacaccacacgagaagcagtgcatgatgttcagcgccaccctgagcaaggacatccggcctgtgtgcaggaagttcatgcaggatcccatggaggtgtttgtggacgacgagaccaagctcacgctgcacggcctgcagcagtactacgtcaaactcaaagacagtgagaagaaccgcaagctctttgatctcttggatgtgctggagtttaaccagcctgtcacgctatcagcagttcaaggatttccagcggcggatcctggtggccaccaatctgtttggccgggggatggacatcgagcgagtcaacatcgtctttaactacgacatgcctgaggactcggacacctacctgcaccgggtggcccgggcgggtcgctttggcaccaaaggcctagccatcacttttgtgtctgacgagaatgatgccaaaatcctcaatgacgtccaggaccggtttgaagttaatgtggcagaacttccagaggaaatcgacatctccacatacatcgagcagagccggtaaccaccacgtgccagagccgcccacccggagccgcccgcatgcagcttcacctcccctttccaggcgccactgttgagaagctagagattgtatgagaataaacttgttattatggaa

SEQ ID NO: 125294 - DNA, 922 bp, Homo sapiens
  Payload ID: 4590
  Gene Symbol: DDX39A
  Gene Name: DEAD (Asp-Glu-Ala-Asp) box polypeptide 39A
  Uniprot ID: O00148
  ENST ID: ENST00000454233
  CDS Start-End: 119-922
agcagcagcccgacgcaagaggcaggaagcgcagcaactcgtgtctgagcgcccggcggaaaaccgaagttggaagtgtctcttagcagcgcgcggagaagaacggggagccagcatcatggcagaacaggatgtggaaaacgatcttttggattacgatgaagaggaagagccccaggctcctcaagagagcacaccagctccccctaagaaagacatcaagggatcctacgtttccatccacagctctggcttccgggactttctgctgaagccggagctcctgcgggccatcgtggactgtggctttgagcatccttctgaggtccagcatgagtgcattccccaggccatcctgggcatggacgtcctgtgccaggccaagtccgggatgggcaagacagcggtcttcgtgctggccaccctacagcagattgagcctgtcaacggacaggtgacggtcctggtcatgtgccacacgagggagctggccttccagatcagcaaggaatatgagcgcttttccaagtacatgcccagcgtcaaggtgtctgtgttcttcggtggtctctccatcaagaaggatgaagaagtgttgaagaagaactgtccccatgtcgtggtggggaccccgggccgcatcctggcgctcgtgcggaataggagcttcagcctaaagaatgtgaagcactttgtgctggacgagtgtgacaagatgctggagcagctggacatgcggcgggatgtgcaggagatcttccgcctgacaccacacgagaagcagtgcatgatgttcagcgccaccctgagcaaggacatccggcctgtgtgcaggaagttcatgcaggatgtcctctgggaagtgtcgcacaaaggagtcgcccactggaaggttctgggcaggcgagatgcccagaggtga

SEQ ID NO: 125295 - DNA, 585 bp, Homo sapiens
  Payload ID: 4590
  Gene Symbol: DDX39A
  Gene Name: DEAD (Asp-Glu-Ala-Asp) box polypeptide 39A
  ENST ID: ENST00000586993
  CDS Start-End: 211-585
tgcgctaggggtgggccagccgttggcgcgcggtgctcggggctcggggcccgcttctcggaggggctgtcatggcctacggcgctccgagccccacttggagtctgtcagttcgtccgaatagaccccgcggcggcctggggccatttggagagggacgagggggttcaagtgattctcctgcctccaagtagctgggattacagcatcatggcagaacaggatgtggaaaacgatcttttggattacgatgaagaggaagagccccaggctcctcaagagagcacaccagctccccctaagaaagacatcaagggatcctacgtttccatccacagctctggcttccgggactttctgctgaagccggagctcctgcgggccatcgtggactgtggctttgagcatccttctgaggtccagcatgagtgcattccccaggccatcctgggcatggacgtcctgtgccaggccaagtccgggatgggcaagacagcggtcttcgtgctggccaccctacagcagattgagcctgtcaacggacaggtgacggtcctggtcatgtgccacacgagggagctggcc

SEQ ID NO: 125296 - DNA, 484 bp, Homo sapiens
  Payload ID: 4590
  Gene Symbol: DDX39A
  Gene Name: DEAD (Asp-Glu-Ala-Asp) box polypeptide 39A
  ENST ID: ENST00000591275
  CDS Start-End: 160-484
gtgggccagccgttggcgcgcggtgctcggggctcggggcccgcttctcggaggggctgtcatggcctacggcgctccgagccccacttggagtctgtcagttcgtccgaatagaccccgcggcggcctggggccatttggagagggacgaggggcatcatggcagaacaggatgtggaaaacgatcttttggattacgatgaagaggaagagccccaggctcctcaagagagcacaccagctccccctaagaaagacatcaagggatcctacgtttccatccacagctctggcttccgggactttctgctgaagccggagctcctgcgggccatcgtggactgtggctttgagcatccttctgaggtccagcatgagtgcattccccaggccatcctgggcatggacgtcctgtgccaggccaagtccgggatgggcaagacagcggtcttcgtgctggccaccctacagcagattgagcctg

SEQ ID NO: 125297 - DNA, 565 bp, Homo sapiens
  Payload ID: 4590
  Gene Symbol: DDX39A
  Gene Name: DEAD (Asp-Glu-Ala-Asp) box polypeptide 39A
  ENST ID: ENST00000590239
  CDS Start-End: 174-565
ggtgctcggggctcggggcccgcttctcggaggggctgtcatggcctacggcgctccgagccccacttggagtctgtcagttcgtccgaatagaccccgcggcggcctggggccatttggagagggacgagggggcacttggtatgcattagattaataaagcaaagagcatcatggcagaacaggatgtggaaaacgatcttttggattacgatgaagaggaagagccccaggctcctcaagagagcacaccagctccccctaagaaagacatcaagggatcctacgtttccatccacagctctggcttccgggactttctgctgaagccggagctcctgcgggccatcgtggactgtggctttgagcatccttctgaggtccagcatgagtgcattccccaggccatcctgggcatggacgtcctgtgccaggccaagtccgggatgggcaagacagcggtcttcgtgctggccaccctacagcagattgagcctgtcaacggacaggtgacggtcctggtcatgtgccacacgagggagctggccttccagatcagcaagga

SEQ ID NO: 125298 - DNA, 563 bp, Homo sapiens
  Payload ID: 4590
  Gene Symbol: DDX39A
  Gene Name: DEAD (Asp-Glu-Ala-Asp) box polypeptide 39A
  ENST ID: ENST00000590696
  CDS Start-End: 287-563
cgttggcgcgcggtgctcggggctcggggcccgcttctcggaggggctgtcatggcctacggcgctccgagccccacttggagtctgtcagttcgtccgaatagaccccgcggcggcctggggccatttggagagggacgaggggggcagggctgactggaagcggtgctgttttagttggggctgtgaggaaatgcctttctggagcaaaggaggcccaaaagaagtgggggatttgtgacccttccaggcagcaggaacagcaagtgcaaaggtgctgagcatcatggcagaacaggatgtggaaaacgatcttttggattacgatgaagaggaagagccccaggctcctcaagagagcacaccagctccccctaagaaagacatcaagggatcctacgtttccatccacagctctggcttccgggactttctgctgaagccggagctcctgcgggccatcgtggactgtggctttgagcatccttctgaggtccagcatgagtgcattccccaggccatcctgggcatggacgtcctgtgccaggccaagtccgggatgg

SEQ ID NO: 125299 - DNA, 566 bp, Homo sapiens
  Payload ID: 4590
  Gene Symbol: DDX39A
  Gene Name: DEAD (Asp-Glu-Ala-Asp) box polypeptide 39A
  ENST ID: ENST00000590315
  CDS Start-End: 1-566
cgatgaagaggaagagccccaggctcctcaagagagcacaccagctccccctaagaaagacatcaagggatcctacgtttccatccacagctctggcttccgggactttctgctgaagccggagctcctgcgggccatcgtggactgtggctttgagcatccttctgaggtccagcatgagtgcattccccaggccatcctgggcatggacgtcctgtgccaggccaagtccgggatgggcaagacagcggtcttcgtgctggccaccctacagcagattgagcctgtcaacggacaggtgacggtcctggtcatgtgccacacgagggagctggccttccagatcagcaaggaatatgagcgcttttccaagtacatgcccagcgtcaaggatgaagaagtgttgaagaagaactgtccccatgtcgtggtggggaccccgggccgcatcctggcgctcgtgcggaataggagcttcagcctaaagaatgtgaagcactttgtgctggacgagtgtgacaagatgctggagcagctggacatgcggcgggatgtgcaggagatct

SEQ ID NO: 125300 - DNA, 1478 bp, Homo sapiens
  Payload ID: 4590
  Gene Symbol: DDX39A
  Gene Name: DEAD (Asp-Glu-Ala-Asp) box polypeptide 39A
  Uniprot ID: O00148
  ENST ID: ENST00000588692
  CDS Start-End: 1-804
atggcagaacaggatgtggaaaacgatcttttggattacgatgaagaggaagagccccaggctcctcaagagagcacaccagctccccctaagaaagacatcaagggatcctacgtttccatccacagctctggcttccgggactttctgctgaagccggagctcctgcgggccatcgtggactgtggctttgagcatccttctgaggtccagcatgagtgcattccccaggccatcctgggcatggacgtcctgtgccaggccaagtccgggatgggcaagacagcggtcttcgtgctggccaccctacagcagattgagcctgtcaacggacaggtgacggtcctggtcatgtgccacacgagggagctggccttccagatcagcaaggaatatgagcgcttttccaagtacatgcccagcgtcaaggtgtctgtgttcttcggtggtctctccatcaagaaggatgaagaagtgttgaagaagaactgtccccatgtcgtggtggggaccccgggccgcatcctggcgctcgtgcggaataggagcttcagcctaaagaatgtgaagcactttgtgctggacgagtgtgacaagatgctggagcagctggacatgcggcgggatgtgcaggagatcttccgcctgacaccacacgagaagcagtgcatgatgttcagcgccaccctgagcaaggacatccggcctgtgtgcaggaagttcatgcaggatgtcctctgggaagtgtcgcacaaaggagtcgcccactggaaggttctgggcaggcgagatgcccagaggtgatccctgcccgcccctcccacctcccttcccacacagcccatggaggtgtttgtggacgacgagaccaagctcacgctgcacggcctgcagcagtactacgtcaaactcaaagacagtgagaagaaccgcaagctctttgatctcttggatgtgctggagtttaaccaggtgataatcttcgtcaagtcagtgcagcgctgcatggccctggcccagctcctcgtggagcagaacttcccggccatcgccatccaccggggcatggcccaggaggagcgcctgtcacgctatcagcagttcaaggatttccagcggcggatcctggtggccaccaatctgtttggccgggggatggacatcgagcgagtcaacatcgtctttaactacgacatgcctgaggactcggacacctacctgcaccgggtggcccgggcgggtcgctttggcaccaaaggcctagccatcacttttgtgtctgacgagaatgatgccaaaatcctcaatgacgtccaggaccggtttgaagttaatgtggcagaacttccagaggaaatcgacatctccacatacatcgagcagagccggtaaccaccacgtgccagagccgcccacccggagccgcccgcatgcagcttcacctcccctttccaggcgccactgttgagaagctagag

SEQ ID NO: 125301 - DNA, 829 bp, Homo sapiens
  Payload ID: 4590
  Gene Symbol: DDX39A
  Gene Name: DEAD (Asp-Glu-Ala-Asp) box polypeptide 39A
  ENST ID: ENST00000589675
  CDS Start-End: 65-829
ggcggaaaaccgaagttggaagtgtctcttagcagcgcgcggagaagaacggggagccagcatcatggcagaacaggatgtggaaaacgatcttttggattacgatgaagaggaagagccccaggctcctcaagagagcacaccagctccccctaagaaagacatcaagggatcctacgtttccatccacagctctggcttccgggactttctgctgaagccggagctcctgcgggccatcgtggactgtggctttgagcatccttctgagggttctcgtccctcacgctctgcttctcctgcagtccagcatgagtgcattccccaggccatcctgggcatggacgtcctgtgccaggccaagtccgggatgggcaagacagcggtcttcgtgctggccaccctacagcagattgagcctgtcaacggacaggtgacggtcctggtcatgtgccacacgagggagctggccttccagatcagcaaggaatatgagcgcttttccaagtacatgcccagcgtcaaggtgtctgtgttcttcggtggtctctccatcaagaaggatgaagaagtgttgaagaagaactgtccccatgtcgtggtggggaccccgggccgcatcctggcgctcgtgcggaataggagcttcagcctaaagaatgtgaagcactttgtgctggacgagtgtgacaagatgctggagcagctggacatgcggcgggatgtgcaggagatcttccgcctgacaccacacgagaagcagtgcatgatgttcagcgccaccctgagcaaggacatccggcctgtgtgcaggaagttcatgcaggat

SEQ ID NO: 125302 - DNA, 823 bp, Homo sapiens
  Payload ID: 4590
  Gene Symbol: DDX39A
  Gene Name: DEAD (Asp-Glu-Ala-Asp) box polypeptide 39A
  ENST ID: ENST00000592927
  CDS Start-End: 1-291
gtgacggtcctggtcatgtgccacacgagggagctggccttccagatcagcaaggaatatgagcgcttttccaagtacatgcccagcgtcaaggtgtctgtgttcttcggtggtctctccatcaagaaggatgaagaagtgttgaagaagaactgtccccatgtcgtggtggggaccccgggccgcatcctggcgctcgtgcggaataggagcttcagcctaaagaatgtgaagcactttgtgctggacgagtgtgacaagatgctggagcagctgggctcccctccctgaagcgtggctcgaggcgcacgggcacggctgctccgcgccagcgtgtaagtggattgcagctcctcccgcgcctgcgctcgctggccaccccccagcccctcaggcaccaggactggccactcccgcggctcactctgccctcgtcacggtgccactggctccctggcacagacatgcggcgggatgtgcaggagatcttccgcctgacaccacacgagaagcagtgcatgatgttcagcgccaccctgagcaaggacatccggcctgtgtgcaggaagttcatgcaggatcccatggaggtgtttgtggacgacgagaccaagctcacgctgcacggcctgcagcagtactacgtcaaactcaaagacagtgagaagaaccgcaagctctttgatctcttggatgtgctggagtttaaccaggtgataatcttcgtcaagtcagtgcagcgctgcatggccctggcccagctcctcgtggagcagaacttcccggccatcgccatccaccggggcatggcccaggaggagcg

SEQ ID NO: 125303 - DNA, 1529 bp, Homo sapiens
  Payload ID: 4591
  Gene Symbol: DDX39B
  Gene Name: DEAD (Asp-Glu-Ala-Asp) box polypeptide 39B
  ENST ID: ENST00000376177
  CDS Start-End: 5-1282
agttatggcagagaacgatgtggacaatgagctcttggactatgaagatgatgaggtggagacagcagctgggggagatggggctgaggcccctgccaagaaggatgtcaagggctcctatgtctccatccacagctctggctttcgtgacttcctgctcaagccagagttgctccgggccattgtcgactgtggctttgagcatccgtcagaagtccagcatgagtgcatccctcaggccattctgggaatggatgtcctgtgccaggccaagtcgggcatgggaaagacagcagtgtttgtcttggccacactgcaacagctggagccagttactgggcaggtgtctgtactggtgatgtgtcacactcgggagttggcttttcagatcagcaaggaatatgagcgcttctctaaatacatgcccaatgtcaaggttgctgttttttttggtggtctgtctatcaagaaggatgaagaggtgctgaagaagaactgcccgcatatcgtcgtggggactccaggccgtatcctagccctggctcgaaataagagcctcaacctcaaacacattaaacactttattttggatgaatgtgataagatgcttgaacagctcgacatgcgtcgggatgtccaggaaatttttcgcatgaccccccacgagaagcaggtcatgatgttcagtgctaccttgagcaaagagatccgtccagtctgccgcaagttcatgcaagatccaatggagatcttcgtggatgatgagacgaagttgacgctgcatgggttgcagcagtactacgtgaaactgaaggacaacgagaagaaccggaagctctttgaccttctggatgtccttgagttcaaccaggtggtgatctttgtgaagtctgtgcagcggtgcattgccttggcccagctactagtggagcagaacttcccagccattgccatccaccgtgggatgccccaggaggagaggctttctcggtatcagcagtttaaagattttcaacgacgaattcttgtggctaccaacctatttggccgaggcatggacatcgagcgggtgaacattgcttttaattatgacatgcctgaggattctgacacctacctgcatcggtgctaccctctgtctccctccaggtggccagagcaggccggtttggcaccaagggcttggctatcacatttgtgtccgatgagaatgatgccaagatcctcaatgatgtgcaggatcgctttgaggtcaatattagtgagctgcctgatgagatagacatctcctcctacattgaacagacacggtagaagactcgcccattttggaatgtgaccgtctgtccttcaggagaggacaccagggtgggggtgaaggagacactactgcccccacccctgacagcccccaccccatggcttccatcttttgcatcaccaccactcctgaacccccatttctgatttgtcagaatttttttttaacaaaactaaaaatgaaacacatgtgtctgtggtatctataa

SEQ ID NO: 125304 - DNA, 2039 bp, Homo sapiens
  Payload ID: 4591
  Gene Symbol: DDX39B
  Gene Name: DEAD (Asp-Glu-Ala-Asp) box polypeptide 39B
  Uniprot ID: Q13838
  ENST ID: ENST00000383508
  CDS Start-End: 538-1824
cagcatcggccataacaacagaaatggccagtcagtcccaaggtatccagcagcttctgcaagctgagaagcgggcagctgagaaggtggcagatgccagaaagaggaaggcccggcgactgaagcaggcaaaggaggaggcacagatggaggtggagcaataccgcagagagcgagagcacgaattccagagcaagcagcaggcgacaggcattttccaaaggcaagcctggagcgcacggatctgtataaccgcggaaggccctgtttccggtcccttgcgcctgcgctcttgcagccaagaaggcgggaggctggagtagagggaagcctgcaaccggaagtgaaggcagatttccctccttcgtcgctgttgctgccgccatacgcgctctccctgtttagctcttctgttagaaatagtatctttgttttcctttgctgttcctcaatcccctactcttcaccccttgttttcacctattttgcgagaacccatccagatcccccttcccttcttcccctgccggcccagttatggcagagaacgatgtggacaatgagctcttggactatgaagatgatgaggtggagacagcagctgggggagatggggctgaggcccctgccaagaaggatgtcaagggctcctatgtctccatccacagctctggctttcgtgacttcctgctcaagccagagttgctccgggccattgtcgactgtggctttgagcatccgtcagaagtccagcatgagtgcatccctcaggccattctgggaatggatgtcctgtgccaggccaagtcgggcatgggaaagacagcagtgtttgtcttggccacactgcaacagctggagccagttactgggcaggtgtctgtgctggtgatgtgtcacactcgggagttggcttttcagatcagcaaggaatatgagcgcttctctaaatacatgcccaatgtcaaggttgctgttttttttggtggtctgtctatcaagaaggatgaagaggtgctgaagaagaactgcccgcatatcgtcgtggggactccaggccgtatcctagccctggctcgaaataagagcctcaacctcaaacacattaaacactttattttggatgaatgtgataagatgcttgaacagctcgacatgcgtcgggatgtccaggaaatttttcgcatgaccccccacgagaagcaggtcatgatgttcagtgctaccttgagcaaagagatccgtccagtctgccgcaagttcatgcaagatccaatggagatcttcgtggatgatgagacgaagttgacgctgcatgggttgcagcagtactacgtgaaactgaaggacaacgagaagaaccggaagctctttgaccttctggatgtccttgagttcaaccaggtggtgatctttgtgaagtctgtgcagcggtgcattgccttggcccagctactagtggagcagaacttcccagccattgccatccaccgtgggatgccccaggaggagaggctttctcggtatcagcagtttaaagattttcaacgacgaattcttgtggctaccaacctatttggccgaggcatggacatcgagcgggtgaacattgcttttaattatgacatgcctgaggattctgacacctacctgcatcgggtggccagagcaggccggtttggcaccaagggcttggctatcacatttgtgtccgatgagaatgatgccaagatcctcaatgatgtgcaggatcgctttgaggtcaatattagtgagctgcctgatgagatagacatctcctcctacattgaacagacacggtagaagactcgcccattttggaatgtgaccgtctgtccttcaggagaggacaccagggtgggggtgaaggagacactactgcccccacccctgacagcccccaccccatggcttccatcttttgcatcaccaccactcctgaacccccatttctgatttgtcagaatttttttttaacaaaactaaaaatgaaacacatgtgtctgtggtatctataa

SEQ ID NO: 125305 - DNA, 2133 bp, Homo sapiens
  Payload ID: 4591
  Gene Symbol: DDX39B
  Gene Name: DEAD (Asp-Glu-Ala-Asp) box polypeptide 39B
  Uniprot ID: Q13838
  ENST ID: ENST00000396172
  CDS Start-End: 632-1918
ctcagctagggcctgccggttcctagtgcgtgcccagcagtcctcaggtcaccttcactaccgggccaaggaccccgtgggaactcgcagccttcgccacactcgttcctcgcgcatccatggaggggtgcctacagagaagacctgcgtggcaaaaacctaaacgaagagatgaggggcatggagaggagtaggataagagaataaagataacagtgggggggagacgttagtttcctttatatcttttgttactggcggtagcagtgaagttagaaacggttttaaaacaaatttcagacaggcattttccaaaggcaagcctggagcgcacggatctgtataaccgcggaaggccctgtttccggtcccttgcgcctgcgctcttgcagccaagaaggcgggaggctggagtagagggaagcctgcaaccggaagtgaaggcagatttccctccttcgtcgctgttgctgccgccatacgcgctctccctgtttagctcttctgttagaaatagtatctttgttttcctttgctgttcctcaatcccctactcttcaccccttgttttcacctattttgcgagaacccatccagatcccccttcccttcttcccctgccggcccagttatggcagagaacgatgtggacaatgagctcttggactatgaagatgatgaggtggagacagcagctgggggagatggggctgaggcccctgccaagaaggatgtcaagggctcctatgtctccatccacagctctggctttcgtgacttcctgctcaagccagagttgctccgggccattgtcgactgtggctttgagcatccgtcagaagtccagcatgagtgcatccctcaggccattctgggaatggatgtcctgtgccaggccaagtcgggcatgggaaagacagcagtgtttgtcttggccacactgcaacagctggagccagttactgggcaggtgtctgtactggtgatgtgtcacactcgggagttggcttttcagatcagcaaggaatatgagcgcttctctaaatacatgcccaatgtcaaggttgctgttttttttggtggtctgtctatcaagaaggatgaagaggtgctgaagaagaactgcccgcatatcgtcgtggggactccaggccgtatcctagccctggctcgaaataagagcctcaacctcaaacacattaaacactttattttggatgaatgtgataagatgcttgaacagctcgacatgcgtcgggatgtccaggaaatttttcgcatgaccccccacgagaagcaggtcatgatgttcagtgctaccttgagcaaagagatccgtccagtctgccgcaagttcatgcaagatccaatggagatcttcgtggatgatgagacgaagttgacgctgcatgggttgcagcagtactacgtgaaactgaaggacaacgagaagaaccggaagctctttgaccttctggatgtccttgagttcaaccaggtggtgatctttgtgaagtctgtgcagcggtgcattgccttggcccagctactagtggagcagaacttcccagccattgccatccaccgtgggatgccccaggaggagaggctttctcggtatcagcagtttaaagattttcaacgacgaattcttgtggctaccaacctatttggccgaggcatggacatcgagcgggtgaacattgcttttaattatgacatgcctgaggattctgacacctacctgcatcgggtggccagagcaggccggtttggcaccaagggcttggctatcacatttgtgtccgatgagaatgatgccaagatcctcaatgatgtgcaggatcgctttgaggtcaatattagtgagctgcctgatgagatagacatctcctcctacattgaacagacacggtagaagactcgcccattttggaatgtgaccgtctgtccttcaggagaggacaccagggtgggggtgaaggagacactactgcccccacccctgacagcccccaccccatggcttccatcttttgcatcaccaccactcctgaacccccatttctgatttgtcagaatttttttttaacaaaactaaaaatgaaacacatgtgtctgtggtatctataa

SEQ ID NO: 125306 - DNA, 1529 bp, Homo sapiens
  Payload ID: 4591
  Gene Symbol: DDX39B
  Gene Name: DEAD (Asp-Glu-Ala-Asp) box polypeptide 39B
  ENST ID: ENST00000400293
  CDS Start-End: 5-1282
agttatggcagagaacgatgtggacaatgagctcttggactatgaagatgatgaggtggagacagcagctgggggagatggggctgaggcccctgccaagaaggatgtcaagggctcctatgtctccatccacagctctggctttcgtgacttcctgctcaagccagagttgctccgggccattgtcgactgtggctttgagcatccgtcagaagtccagcatgagtgcatccctcaggccattctgggaatggatgtcctgtgccaggccaagtcgggcatgggaaagacagcagtgtttgtcttggccacactgcaacagctggagccagttactgggcaggtgtctgtgctggtgatgtgtcacactcgggagttggcttttcagatcagcaaggaatatgagcgcttctctaaatacatgcccaatgtcaaggttgctgttttttttggtggtctgtctatcaagaaggatgaagaggtgctgaagaagaactgcccgcatatcgtcgtggggactccaggccgtatcctagccctggctcgaaataagagcctcaacctcaaacacattaaacactttattttggatgaatgtgataagatgcttgaacagctcgacatgcgtcgggatgtccaggaaatttttcgcatgaccccccacgagaagcaggtcatgatgttcagtgctaccttgagcaaagagatccgtccagtctgccgcaagttcatgcaagatccaatggagatcttcgtggatgatgagacgaagttgacgctgcatgggttgcagcagtactacgtgaaactgaaggacaacgagaagaaccggaagctctttgaccttctggatgtccttgagttcaaccaggtggtgatctttgtgaagtctgtgcagcggtgcattgccttggcccagctactagtggagcagaacttcccagccattgccatccaccgtgggatgccccaggaggagaggctttctcggtatcagcagtttaaagattttcaacgacgaattcttgtggctaccaacctatttggccgaggcatggacatcgagcgggtgaacattgcttttaattatgacatgcctgaggattctgacacctacctgcatcggtgctaccctctgtctccctccaggtggccagagcaggccggtttggcaccaagggcttggctatcacatttgtgtccgatgagaatgatgccaagatcctcaatgatgtgcaggatcgctttgaggtcaatattagtgagctgcctgatgagatagacatctcctcctacattgaacagacacggtagaagactcgcccattttggaatgtgaccgtctgtccttcaggagaggacaccagggtgggggtgaaggagacactactgcccccacccctgacagcccccaccccatggcttccatcttttgcatcaccaccactcctgaacccccatttctgatttgtcagaatttttttttaacaaaactaaaaatgaaacacatgtgtctgtggtatctataa

SEQ ID NO: 125307 - DNA, 2003 bp, Homo sapiens
  Payload ID: 4591
  Gene Symbol: DDX39B
  Gene Name: DEAD (Asp-Glu-Ala-Asp) box polypeptide 39B
  Uniprot ID: Q13838
  ENST ID: ENST00000400295
  CDS Start-End: 502-1788
ctcagctagggcctgccggttcctagtgcgtgcccagcagtcctcaggtcaccttcactaccgggccaaggaccccgtgggaactcgcagccttcgccacactcgttcctcgcgcatccacggaggggtgcctacagagaagacctgcgtggcaaaaacctaaacgaagagatgaggggcatggagaggagtaggataagagaataaagataacagtgggggggagacgttagtttcctttatatcttttgttactggcggtagcagtgaagttagaaacggttttaaaacaaatttcagacaggcattttccaaaggcaagcctggagcgcacggatctgtataaccgcggaaggccctgtttccggtcccttgcgcctgcgctcttgcagccaagaaggcgggaggctggagtagagggaagcctgcaaccggaagtgaaggcagatttccctccttcgtcgctgttgctgccgccatacgcgctctccctgtttagttatggcagagaacgatgtggacaatgagctcttggactatgaagatgatgaggtggagacagcagctgggggagatggggctgaggcccctgccaagaaggatgtcaagggctcctatgtctccatccacagctctggctttcgtgacttcctgctcaagccagagttgctccgggccattgtcgactgtggctttgagcatccgtcagaagtccagcatgagtgcatccctcaggccattctgggaatggatgtcctgtgccaggccaagtcgggcatgggaaagacagcagtgtttgtcttggccacactgcaacagctggagccagttactgggcaggtgtctgtgctggtgatgtgtcacactcgggagttggcttttcagatcagcaaggaatatgagcgcttctctaaatacatgcccaatgtcaaggttgctgttttttttggtggtctgtctatcaagaaggatgaagaggtgctgaagaagaactgcccgcatatcgtcgtggggactccaggccgtatcctagccctggctcgaaataagagcctcaacctcaaacacattaaacactttattttggatgaatgtgataagatgcttgaacagctcgacatgcgtcgggatgtccaggaaatttttcgcatgaccccccacgagaagcaggtcatgatgttcagtgctaccttgagcaaagagatccgtccagtctgccgcaagttcatgcaagatccaatggagatcttcgtggatgatgagacgaagttgacgctgcatgggttgcagcagtactacgtgaaactgaaggacaacgagaagaaccggaagctctttgaccttctggatgtccttgagttcaaccaggtggtgatctttgtgaagtctgtgcagcggtgcattgccttggcccagctactagtggagcagaacttcccagccattgccatccaccgtgggatgccccaggaggagaggctttctcggtatcagcagtttaaagattttcaacgacgaattcttgtggctaccaacctatttggccgaggcatggacatcgagcgggtgaacattgcttttaattatgacatgcctgaggattctgacacctacctgcatcgggtggccagagcaggccggtttggcaccaagggcttggctatcacatttgtgtccgatgagaatgatgccaagatcctcaatgatgtgcaggatcgctttgaggtcaatattagtgagctgcctgatgagatagacatctcctcctacattgaacagacacggtagaagactcgcccattttggaatgtgaccgtctgtccttcaggagaggacaccagggtgggggtgaaggagacactactgcccccacccctgacagcccccaccccatggcttccatcttttgcatcaccaccactcctgaacccccatttctgatttgtcagaatttttttttaacaaaactaaaaatgaaacacatgtgtctgtggtatctataa

SEQ ID NO: 125308 - DNA, 2133 bp, Homo sapiens
  Payload ID: 4591
  Gene Symbol: DDX39B
  Gene Name: DEAD (Asp-Glu-Ala-Asp) box polypeptide 39B
  Uniprot ID: Q13838
  ENST ID: ENST00000400296
  CDS Start-End: 632-1918
ctcagctagggcctgccggttcctagtgcgtgcccagcagtcctcaggtcaccttcactaccgggccaaggaccccgtgggaactcgcagccttcgccacactcgttcctcgcgcatccacggaggggtgcctacagagaagacctgcgtggcaaaaacctaaacgaagagatgaggggcatggagaggagtaggataagagaataaagataacagtgggggggagacgttagtttcctttatatcttttgttactggcggtagcagtgaagttagaaacggttttaaaacaaatttcagacaggcattttccaaaggcaagcctggagcgcacggatctgtataaccgcggaaggccctgtttccggtcccttgcgcctgcgctcttgcagccaagaaggcgggaggctggagtagagggaagcctgcaaccggaagtgaaggcagatttccctccttcgtcgctgttgctgccgccatacgcgctctccctgtttagctcttctgttagaaatagtatctttgttttcctttgctgttcctcaatcccctactcttcaccccttgttttcacctattttgcgagaacccatccagatcccccttcccttcttcccctgccggcccagttatggcagagaacgatgtggacaatgagctcttggactatgaagatgatgaggtggagacagcagctgggggagatggggctgaggcccctgccaagaaggatgtcaagggctcctatgtctccatccacagctctggctttcgtgacttcctgctcaagccagagttgctccgggccattgtcgactgtggctttgagcatccgtcagaagtccagcatgagtgcatccctcaggccattctgggaatggatgtcctgtgccaggccaagtcgggcatgggaaagacagcagtgtttgtcttggccacactgcaacagctggagccagttactgggcaggtgtctgtgctggtgatgtgtcacactcgggagttggcttttcagatcagcaaggaatatgagcgcttctctaaatacatgcccaatgtcaaggttgctgttttttttggtggtctgtctatcaagaaggatgaagaggtgctgaagaagaactgcccgcatatcgtcgtggggactccaggccgtatcctagccctggctcgaaataagagcctcaacctcaaacacattaaacactttattttggatgaatgtgataagatgcttgaacagctcgacatgcgtcgggatgtccaggaaatttttcgcatgaccccccacgagaagcaggtcatgatgttcagtgctaccttgagcaaagagatccgtccagtctgccgcaagttcatgcaagatccaatggagatcttcgtggatgatgagacgaagttgacgctgcatgggttgcagcagtactacgtgaaactgaaggacaacgagaagaaccggaagctctttgaccttctggatgtccttgagttcaaccaggtggtgatctttgtgaagtctgtgcagcggtgcattgccttggcccagctactagtggagcagaacttcccagccattgccatccaccgtgggatgccccaggaggagaggctttctcggtatcagcagtttaaagattttcaacgacgaattcttgtggctaccaacctatttggccgaggcatggacatcgagcgggtgaacattgcttttaattatgacatgcctgaggattctgacacctacctgcatcgggtggccagagcaggccggtttggcaccaagggcttggctatcacatttgtgtccgatgagaatgatgccaagatcctcaatgatgtgcaggatcgctttgaggtcaatattagtgagctgcctgatgagatagacatctcctcctacattgaacagacacggtagaagactcgcccattttggaatgtgaccgtctgtccttcaggagaggacaccagggtgggggtgaaggagacactactgcccccacccctgacagcccccaccccatggcttccatcttttgcatcaccaccactcctgaacccccatttctgatttgtcagaatttttttttaacaaaactaaaaatgaaacacatgtgtctgtggtatctataa

SEQ ID NO: 125309 - DNA, 561 bp, Homo sapiens
  Payload ID: 4591
  Gene Symbol: DDX39B
  Gene Name: DEAD (Asp-Glu-Ala-Asp) box polypeptide 39B
  ENST ID: ENST00000428107
  CDS Start-End: 1-561
actcagaggagagggacataggaaagccaatggagatcttcgtggatgatgagacgaagttgacgctgcatgggttgcagcagtactacgtgaaactgaaggacaacgagaagaaccggaagctctttgaccttctggatgtccttgagttcaaccaggtggtgatctttgtgaagtctgtgcagcggtgcattgccttggcccagctactagtggagcagaacttcccagccattgccatccaccgtgggatgccccaggaggagaggctttctcggtatcagcagtttaaagattttcaacgacgaattcttgtggctaccaacctatttggccgaggcatggacatcgagcgggtgaacattgcttttaattatgacatgcctgaggattctgacacctacctgcatcgggtggccagagcaggccggtttggcaccaagggcttggctatcacatttgtgtccgatgagaatgatgccaagatcctcaatgatgtgcaggatcgctttgaggtcaatattagtgagctgcctgatgagatagacatctcctcctaca

SEQ ID NO: 125310 - DNA, 2133 bp, Homo sapiens
  Payload ID: 4591
  Gene Symbol: DDX39B
  Gene Name: DEAD (Asp-Glu-Ala-Asp) box polypeptide 39B
  Uniprot ID: Q13838
  ENST ID: ENST00000453138
  CDS Start-End: 632-1918
ctcagctagggcctgccggttcctagtgcgtgcccagcagtcctcaggtcaccttcactaccgggccaaggaccccgtgggaactcgcagccttcgccacactcgttcctcgcgcatccacggaggggtgcctacagagaagacctgcgtggcaaaaacctaaacgaagagatgaggggcatggagaggagtaggataagagaataaagataacagtgggggggagacgttagtttcctttatatattttgttactggcggtagcagtgaagttagaaacggttttaaaacaaatttcagacaggcattttccaaaggcaagcctggagcgcacggatctgtataaccgcggaaggccctgtttccggtcccttgcgcctgcgctcttgcagccaagaaggcgggaggctggagtagagggaagcctgcaaccggaagtgaaggcagatttccctccttcgtcgctgttgctgccgccatacgcgctctccctgtttagctcttctgttagaaatagtatctttgttttcctttgctgttcctcaatcccctactcttcaccccttgttttcacctattttgcgagaacccatccagatcccccttcccttcttcccctgccggcccagttatggcagagaacgatgtggacaatgagctcttggactatgaagatgatgaggtggagacagcagctgggggagatggggctgaggcccctgccaagaaggatgtcaagggctcctatgtctccatccacagctctggctttcgtgacttcctgctcaagccagagttgctccgggccattgtcgactgtggctttgagcatccgtcagaagtccagcatgagtgcatccctcaggccattctgggaatggatgtcctgtgccaggccaagtcgggcatgggaaagacagcagtgtttgtcttggccacactgcaacagctggagccagttactgggcaggtgtctgtgctggtgatgtgtcacactcgggagttggcttttcagatcagcaaggaatatgagcgcttctctaaatacatgcccaatgtcaaggttgctgttttttttggtggtctgtctatcaagaaggatgaagaggtgctgaagaagaactgcccgcatatcgtcgtggggactccaggccgtatcctagccctggctcgaaataagagcctcaacctcaaacacattaaacactttattttggatgaatgtgataagatgcttgaacagctcgacatgcgtcgggatgtccaggaaatttttcgcatgaccccccacgagaagcaggtcatgatgttcagtgctaccttgagcaaagagatccgtccagtctgccgcaagttcatgcaagatccaatggagatcttcgtggatgatgagacgaagttgacgctgcatgggttgcagcagtactacgtgaaactgaaggacaacgagaagaaccggaagctctttgaccttctggatgtccttgagttcaaccaggtggtgatctttgtgaagtctgtgcagcggtgcattgccttggcccagctactagtggagcagaacttcccagccattgccatccaccgtgggatgccccaggaggagaggctttctcggtatcagcagtttaaagattttcaacgacgaattcttgtggctaccaacctatttggccgaggcatggacatcgagcgggtgaacattgcttttaattatgacatgcctgaggattctgacacctacctgcatcgggtggccagagcaggccggtttggcaccaagggcttggctatcacatttgtgtccgatgagaatgatgccaagatcctcaatgatgtgcaggatcgctttgaggtcaatattagtgagctgcctgatgagatagacatctcctcctacattgaacagacacggtagaagactcgcccattttggaatgtgaccgtctgtccttcaggagaggacaccagggtgggggtgaaggagacactactgcccccacccctgacagcccccaccccatggcttccatcttttgcatcaccaccactcctgaacccccatttctgatttgtcagaatttttttttaacaaaactaaaaatgaaacacatgtgtctgtggtatctataa

SEQ ID NO: 125311 - DNA, 561 bp, Homo sapiens; identical to SEQ ID NO: 125309
  Payload ID: 4591
  Gene Symbol: DDX39B
  Gene Name: DEAD (Asp-Glu-Ala-Asp) box polypeptide 39B
  ENST ID: ENST00000412386
  CDS Start-End: 1-561

SEQ ID NO: 125312 - DNA, 633 bp, Homo sapiens
  Payload ID: 4591
  Gene Symbol: DDX39B
  Gene Name: DEAD (Asp-Glu-Ala-Asp) box polypeptide 39B
  ENST ID: ENST00000428291
  CDS Start-End: 43-633
cgtcgctgttgctgccgccatacgcgctctccctgtttagttatggcagagaacgatgtggacaatgagctcttggactatgaagatgatgaggtggagacagcagctgggggagatggggctgaggcccctgccaagaaggatgtcaagggctcctatgtctccatccacagctctggctttcgtgacttcctgctcaagccagagttgctccgggccattgtcgactgtggctttgagcatccgtcagaagtccagcatgagtgcatccctcaggccattctgggaatggatgtcctgtgccaggccaagtcgggcatgggaaagacagcagtgtttgtcttggccacactgcaacagctggagccagttactgggcaggtgtgtttttgtgacagtcacttccctagaggggataatgaagagctacatttaccatatgtctccgtctacttcctgcctaaggtgtctgtactggtgatgtgtcacactcgggagttggcttttcagatcagcaaggaatatgagcgcttctctaaatacatgcccaatgtcaaggttgctgttttttttggtggtctgtctatcaagaaggatgaagaggtgctgaagaagaactgcccgcatatcgtc

SEQ ID NO: 125313 - DNA, 583 bp, Homo sapiens
  Payload ID: 4591
  Gene Symbol: DDX39B
  Gene Name: DEAD (Asp-Glu-Ala-Asp) box polypeptide 39B
  ENST ID: ENST00000455324
  CDS Start-End: 175-583
ttcgtcgctgttgctgccgccatacgcgctctccctgtttagggtggagacatgaattttgtttttttgtggccgagccatttgtcttgcaccgcccctcccccccatgctaattacacaaggcttgcttaaacagcggaagggaggatactgagaagtgggaggctgagagctatgggaggtggacggcggccatatgatgttttcttttcgaaagttatggcagagaacgatgtggacaatgagctcttggactatgaagatgatgaggtggagacagcagctgggggagatggggctgaggcccctgccaagaaggatgtcaagggctcctatgtctccatccacagctctggctttcgtgacttcctgctcaagccagagttgctccgggccattgtcgactgtggctttgagcatccgtcagaagtccagcatgagtgcatccctcaggccattctgggaatggatgtcctgtgccaggccaagtcgggcatgggaaagacagcagtgtttgtcttggccacactgcaacagctggagccagttactgggcaggtgtctgtactggtgatgtgtcaca

SEQ ID NO: 125314 - DNA, 2003 bp, Homo sapiens
  Payload ID: 4591
  Gene Symbol: DDX39B
  Gene Name: DEAD (Asp-Glu-Ala-Asp) box polypeptide 39B
  Uniprot ID: Q13838
  ENST ID: ENST00000441425
  CDS Start-End: 502-1788
ctcagctagggcctgccggttcctagtgcgtgcccagcagtcctcaggtcaccttcactaccgggccaaggaccccgtgggaactcgcagccttcgccacactcgttcctcgcgcatccacggaggggtgcctacagagaagacctgcgtggcaaaaacctaaacgaagagatgaggggcatggagaggagtaggataagagaataaagataacagtgggggggagacgttagtttcctttatatattttgttactggcggtagcagtgaagttagaaacggttttaaaacaaatttcagacaggcattttccaaaggcaagcctggagcgcacggatctgtataaccgcggaaggccctgtttccggtcccttgcgcctgcgctcttgcagccaagaaggcgggaggctggagtagagggaagcctgcaaccggaagtgaaggcagatttccctccttcgtcgctgttgctgccgccatacgcgctctccctgtttagttatggcagagaacgatgtggacaatgagctcttggactatgaagatgatgaggtggagacagcagctgggggagatggggctgaggcccctgccaagaaggatgtcaagggctcctatgtctccatccacagctctggctttcgtgacttcctgctcaagccagagttgctccgggccattgtcgactgtggctttgagcatccgtcagaagtccagcatgagtgcatccctcaggccattctgggaatggatgtcctgtgccaggccaagtcgggcatgggaaagacagcagtgtttgtcttggccacactgcaacagctggagccagttactgggcaggtgtctgtgctggtgatgtgtcacactcgggagttggcttttcagatcagcaaggaatatgagcgcttctctaaatacatgcccaatgtcaaggttgctgttttttttggtggtctgtctatcaagaaggatgaagaggtgctgaagaagaactgcccgcatatcgtcgtggggactccaggccgtatcctagccctggctcgaaataagagcctcaacctcaaacacattaaacactttattttggatgaatgtgataagatgcttgaacagctcgacatgcgtcgggatgtccaggaaatttttcgcatgaccccccacgagaagcaggtcatgatgttcagtgctaccttgagcaaagagatccgtccagtctgccgcaagttcatgcaagatccaatggagatcttcgtggatgatgagacgaagttgacgctgcatgggttgcagcagtactacgtgaaactgaaggacaacgagaagaaccggaagctctttgaccttctggatgtccttgagttcaaccaggtggtgatctttgtgaagtctgtgcagcggtgcattgccttggcccagctactagtggagcagaacttcccagccattgccatccaccgtgggatgccccaggaggagaggctttctcggtatcagcagtttaaagattttcaacgacgaattcttgtggctaccaacctatttggccgaggcatggacatcgagcgggtgaacattgcttttaattatgacatgcctgaggattctgacacctacctgcatcgggtggccagagcaggccggtttggcaccaagggcttggctatcacatttgtgtccgatgagaatgatgccaagatcctcaatgatgtgcaggatcgctttgaggtcaatattagtgagctgcctgatgagatagacatctcctcctacattgaacagacacggtagaagactcgcccattttggaatgtgaccgtctgtccttcaggagaggacaccagggtgggggtgaaggagacactactgcccccacccctgacagcccccaccccatggcttccatcttttgcatcaccaccactcctgaacccccatttctgatttgtcagaatttttttttaacaaaactaaaaatgaaacacatgtgtctgtggtatctataa

SEQ ID NO: 125315 - DNA, 1529 bp, Homo sapiens; identical to SEQ ID NO: 125306
  Payload ID: 4591
  Gene Symbol: DDX39B
  Gene Name: DEAD (Asp-Glu-Ala-Asp) box polypeptide 39B
  ENST ID: ENST00000446341
  CDS Start-End: 5-1282

SEQ ID NO: 125316 - DNA, 932 bp, Homo sapiens
  Payload ID: 4591
  Gene Symbol: DDX39B
  Gene Name: DEAD (Asp-Glu-Ala-Asp) box polypeptide 39B
  ENST ID: ENST00000452908
  CDS Start-End: 238-932
cttcgctacaatccgtttccatctgcgcttctccgcacccatcccgtcacatgggttcctgatacccttttcacaggcgatggtctggtcgctggggcctagttgctcttctgttagaaatagtatctttgttttcctttgctgttcctcaatcccctactcttcaccccttgttttcacctattttgcgagaacccatccagatcccccttcccttcttcccctgccggcccagttatggcagagaacgatgtggacaatgagctcttggactatgaagatgatgaggtggagacagcagctgggggagatggggctgaggcccctgccaagaaggatgtcaagggctcctatgtctccatccacagctctggctttcgtgacttcctgctcaagccagagttgctccgggccattgtcgactgtggctttgagcatccgtcagaagtccagcatgagtgcatccctcaggccattctgggaatggatgtcctgtgccaggccaagtcgggcatgggaaagacagcagtgtttgtcttggccacactgcaacagctggagccagttactgggcaggtgtctgtgctggtgatgtgtcacactcgggagttggcttttcagatcagcaaggaatatgagcgcttctctaaatacatgcccaatgtcaaggttgctgttttttttggtggtctgtctatcaagaaggatgaagaggtgctgaagaagaactgcccgcatatcgtcgtggggactccaggccgtatcctagccctggctcgaaataagagcctcaacctcaaacacattaaacactttattttggatgaatgtgataagatgcttgaacagctcgacatgcgtcgggatgtccaggaaatttttcgcatgaccccccacgagaagcaggtcatgatgttcagtgctaccttgag

SEQ ID NO: 125317 - DNA, 2133 bp, Homo sapiens
  Payload ID: 4591
  Gene Symbol: DDX39B
  Gene Name: DEAD (Asp-Glu-Ala-Asp) box polypeptide 39B
  Uniprot ID: Q13838
  ENST ID: ENST00000415689
  CDS Start-End: 632-1918
ctcagctagggcctgccggttcctagtgcgtgcccagcagtcctcaggtcaccttcactaccgggccaaggaccccgtgggaactcgcagccttcgccacactcgttcctcgcgcatccacggaggggtgcctacagagaagacctgcgtggcaaaaacctaaacgaagagatgaggggcatggagaggagtaggataagagaataaagataacagtgggggggagacgttagtttcctttatatcttttgttactggcggtagcagtgaagttagaaacggttttaaaacaaatttcagacaggcattttccaaaggcaagcctggagcgcacggatctgtataaccgcggaaggccctgtttccggtcccttgcgcctgcgctcttgcagccaagaaggcgggaggctggagtagagggaagcctgcaaccggaagtgaaggcacatttccctccttcgtcgctgttgctgccgccatacgcgctctccctgtttagctcttctgttagaaatagtatctttgttttcctttgctgttcctcaatcccctactcttcaccccttgttttcacctattttgcgagaacccatccagatcccccttcccttcttcccctgccggcccagttatggcagagaacgatgtggacaatgagctcttggactatgaagatgatgaggtggagacagcagctgggggagatggggctgaggcccctgccaagaaggatgtcaagggctcctatgtctccatccacagctctggctttcgtgacttcctgctcaagccagagttgctccgggccattgtcgactgtggctttgagcatccgtcagaagtccagcatgagtgcatccctcaggccattctgggaatggatgtcctgtgccaggccaagtcgggcatgggaaagacagcagtgtttgtcttggccacactgcaacagctggagccagttactgggcaggtgtctgtgctggtgatgtgtcacactcgggagttggcttttcagatcagcaaggaatatgagcgcttctctaaatacatgcccaatgtcaaggttgctgttttttttggtggtctgtctatcaagaaggatgaagaggtgctgaagaagaactgcccgcatatcgtcgtggggactccaggccgtatcctagccctggctcgaaataagagcctcaacctcaaacacattaaacactttattttggatgaatgtgataagatgcttgaacagctcgacatgcgtcgggatgtccaggaaatttttcgcatgaccccccacgagaagcaggtcatgatgttcagtgctaccttgagcaaagagatccgtccagtctgccgcaagttcatgcaagatccaatggagatcttcgtggatgatgagacgaagttgacgctgcatgggttgcagcagtactacgtgaaactgaaggacaacgagaagaaccggaagctctttgaccttctggatgtccttgagttcaaccaggtggtgatctttgtgaagtctgtgcagcggtgcattgccttggcccagctactagtggagcagaacttcccagccattgccatccaccgtgggatgccccaggaggagaggctttctcggtatcagcagtttaaagattttcaacgacgaattcttgtggctaccaacctatttggccgaggcatggacatcgagcgggtgaacattgcttttaattatgacatgcctgaggattctgacacctacctgcatcgggtggccagagcaggccggtttggcaccaagggcttggctatcacatttgtgtccgatgagaatgatgccaagatcctcaatgatgtgcaggatcgctttgaggtcaatattagtgagctgcctgatgagatagacatctcctcctacattgaacagacacggtagaagactcgcccattttggaatgtgaccgtctgtccttcaggagaggacaccagggtgggggtgaaggagacactactgcccccacccctgacagcccccaccccatggcttccatcttttgcatcaccaccactcctgaacccccatttctgatttgtcagaatttttttttaacaaaactaaaaatgaaacacatgtgtctgtggtatctataa

SEQ ID NO: 125318 - DNA, 659 bp, Homo sapiens
  Payload ID: 4591
  Gene Symbol: DDX39B
  Gene Name: DEAD (Asp-Glu-Ala-Asp) box polypeptide 39B
  ENST ID: ENST00000453799
  CDS Start-End: 373-659
cccttttcacaggcgatggtctggtcgctggggcctagttggttcgctatttccttagcttgcatccctttcgagagcaaagagctcctgggggaaggaagggaagctaaggggggacccaatccaagatggtgtcctcggcgccattgtgttcgttttgctcccttcttccaatgggttcttctcatattggaggcctcagcatcaatgagaggcggcgctcggcgtcccttggtcttgctcttctgttagaaatagtatctttgttttcctttgctgttcctcaatcccctactcttcaccccttgttttcacctattttgcgagaacccatccagatcccccttcccttcttcccctgccggcccagttatggcagagaacgatgtggacaatgagctcttggactatgaagatgatgaggtggagacagcagctgggggagatggggctgaggcccctgccaagaaggatgtcaagggctcctatgtctccatccacagctctggctttcgtgacttcctgctcaagccagagttgctccgggccattgtcgactgtggctttgagcatccgtcagaagtccagcatgagtgcatccctcaggccattctgggaatggatgtcctgtgccaggccaagtcgggcatgggaaagac

SEQ ID NO: 125319 - DNA, 561 bp, Homo sapiens; identical to SEQ ID NO: 125309
  Payload ID: 4591
  Gene Symbol: DDX39B
  Gene Name: DEAD (Asp-Glu-Ala-Asp) box polypeptide 39B
  ENST ID: ENST00000455400
  CDS Start-End: 1-561

SEQ ID NO: 125320 - DNA, 659 bp, Homo sapiens
  Payload ID: 4591
  Gene Symbol: DDX39B
  Gene Name: DEAD (Asp-Glu-Ala-Asp) box polypeptide 39B
  ENST ID: ENST00000457900
  CDS Start-End: 373-659
cccttttcacaggcgatggtctggtcgctggggcctagttggttcgctatttccttagcttgcatccctttcgagagcaaagagctcctgggggaaggaagggaagctaaggggggacccaatccaagatggtgtcctcggcgccattgtgttcgttttgctcccttcttccaatgggttcttctcatattggaggcctcagcatcaatgagaggcggtgctcggcgtcccttggtcttgctcttctgttagaaatagtatctttgttttcctttgctgttcctcaatcccctactcttcaccccttgttttcacctattttgcgagaacccatccagatcccccttcccttcttcccctgccggcccagttatggcagagaacgatgtggacaatgagctcttggactatgaagatgatgaggtggagacagcagctgggggagatggggctgaggcccctgccaagaaggatgtcaagggctcctatgtctccatccacagctctggctttcgtgacttcctgctcaagccagagttgctccgggccattgtcgactgtggctttgagcatccgtcagaagtccagcatgagtgcatccctcaggccattctgggaatggatgtcctgtgccaggccaagtcgggcatgggaaagac

SEQ ID NO: 125321 - DNA, 2133 bp, Homo sapiens
  Payload ID: 4591
  Gene Symbol: DDX39B
  Gene Name: DEAD (Asp-Glu-Ala-Asp) box polypeptide 39B
  Uniprot ID: Q13838
  ENST ID: ENST00000413678
  CDS Start-End: 632-1918
ctcagctagggcctgccggttcctagtgcgtgcccagcagtcctcaggtcaccttcactaccgggccaaggaccccgtgggaactcgcagccttcgccacactcgttcctcgcgcatccacggaggggtgcctacagagaagacctgcgtggcaaaaacctaaacgaagagatgaggggcatggagaggagtaggataagagaataaagataacagtgggggggagacgttagtttcctttatatcttttgttactggaggtagcagtgaagttagaaacggttttaaaacaaatttcagacaggcattttccaaaggcaagcctggagcgcacggatctgtataaccgcggaaggccctgtttccggtcccttgcgcctgcgctcttgcagccaagaaggcgggaggctggagtagagggaagcctgcaaccggaagtgaaggcagatttccctccttcgtcgctgttgctgccgccatacgcgctctccctgtttagctcttctgttagaaatagtatctttgttttcctttgctgttcctcaatcccctactcttcaccccttgttttcacctattttgcgagaacccatccagatcccccttcccttcttcccctgccggcccagttatggcagagaacgatgtggacaatgagctcttggactatgaagatgatgaggtggagacagcagctgggggagatggggctgaggcccctgccaagaaggatgtcaagggctcctatgtctccatccacagctctggctttcgtgacttcctgctcaagccagagttgctccgggccattgtcgactgtggctttgagcatccgtcagaagtccagcatgagtgcatccctcaggccattctgggaatggatgtcctgtgccaggccaagtcgggcatgggaaagacagcagtgtttgtcttggccacactgcaacagctggagccagttactgggcaggtgtctgtgctggtgatgtgtcacactcgggagttggcttttcagatcagcaaggaatatgagcgcttctctaaatacatgcccaatgtcaaggttgctgttttttttggtggtctgtctatcaagaaggatgaagaggtgctgaagaagaactgcccgcatatcgtcgtggggactccaggccgtatcctagccctggctcgaaataagagcctcaacctcaaacacattaaacactttattttggatgaatgtgataagatgcttgaacagctcgacatgcgtcgggatgtccaggaaatttttcgcatgaccccccacgagaagcaggtcatgatgttcagtgctaccttgagcaaagagatccgtccagtctgccgcaagttcatgcaagatccaatggagatcttcgtggatgatgagacgaagttgacgctgcatgggttgcagcagtactacgtgaaactgaaggacaacgagaagaaccggaagctctttgaccttctggatgtccttgagttcaaccaggtggtgatctttgtgaagtctgtgcagcggtgcattgccttggcccagctactagtggagcagaacttcccagccattgccatccaccgtgggatgccccaggaggagaggctttctcggtatcagcagtttaaagattttcaacgacgaattcttgtggctaccaacctatttggccgaggcatggacatcgagcgggtgaacattgcttttaattatgacatgcctgaggattctgacacctacctgcatcgggtggccagagcaggccggtttggcaccaagggcttggctatcacatttgtgtccgatgagaatgatgccaagatcctcaatgatgtgcaggatcgctttgaggtcaatattagtgagctgcctgatgagatagacatctcctcctacattgaacagacacggtagaagactcgcccattttggaatgtgaccgtctgtccttcaggagaggacaccagggtgggggtgaaggagacactactgcccccacccctgacagcccccaccccatggcttccatcttttgcatcaccaccactcctgaacccccatttctgatttgtcagaatttttttttaacaaaactaaaaatgaaacacatgtgtctgtggtatctataa

SEQ ID NO: 125322 - DNA, 591 bp, Homo sapiens
  Payload ID: 4591
  Gene Symbol: DDX39B
  Gene Name: DEAD (Asp-Glu-Ala-Asp) box polypeptide 39B
  ENST ID: ENST00000411415
  CDS Start-End: 30-591
cattgtgttcgttttgctcccttcttccaatgggttcttctcatattggaggcctcagcatcaatgagaggcggtgctcggcgtcccttggtcttgttatggcagagaacgatgtggacaatgagctcttggactatgaagatgatgaggtggagacagcagctgggggagatggggctgaggcccctgccaagaaggatgtcaagggctcctatgtctccatccacagctctggctttcgtgacttcctgctcaagccagagttgctccgggccattgtcgactgtggctttgagcatccgtcagaagtccagcatgagtgcatccctcaggccattctgggaatggatgtcctgtgccaggccaagtcgggcatgggaaagacagcagtgtttgtcttggccacactgcaacagctggagccagttactgggcaggtgtctgtgctggtgatgtgtcacactcgggagttggcttttcagatcagcaaggaatatgagcgcttctctaaatacatgcccaatgtcaaggttgctgttttttttggtggtctgtctatcaagaaggatgaagaggtgctgaagaagaact

SEQ ID NO: 125323 - DNA, 583 bp, Homo sapiens
  Payload ID: 4591
  Gene Symbol: DDX39B
  Gene Name: DEAD (Asp-Glu-Ala-Asp) box polypeptide 39B
  ENST ID: ENST00000429022
  CDS Start-End: 175-583
ttcgtcgctgttgctgccgccatacgcgctctccctgtttagggtggagacatgaattttgtttttttgtggccgagccatttgtcttgcaccgcccctcccccccatgctaattacacaaggcttgcttaaacagcggaagggaggatactgagaagtgggaggctgagagctatgggaggtggacggcggccatatgatgttttcttttcgaaagttatggcagagaacgatgtggacaatgagctcttggactatgaagatgatgaggtggagacagcagctgggggagatggggctgaggcccctgccaagaaggatgtcaagggctcctatgtctccatccacagctctggctttcgtgacttcctgctcaagccagagttgctccgggccattgtcgactgtggctttgagcatccgtcagaagtccagcatgagtgcatccctcaggccattctgggaatggatgtcctgtgccaggccaagtcgggcatgggaaagacagcagtgtttgtcttggccacactgcaacagctggagccagttactgggcaggtgtctgtgctggtgatgtgtcaca

SEQ ID NO: 125324 - DNA, 561 bp, Homo sapiens; identical to SEQ ID NO: 125309
  Payload ID: 4591
  Gene Symbol: DDX39B
  Gene Name: DEAD (Asp-Glu-Ala-Asp) box polypeptide 39B
  ENST ID: ENST00000422243
  CDS Start-End: 1-561

SEQ ID NO: 125325 - DNA, 817 bp, Homo sapiens
  Payload ID: 4591
  Gene Symbol: DDX39B
  Gene Name: DEAD (Asp-Glu-Ala-Asp) box polypeptide 39B
  ENST ID: ENST00000428098
  CDS Start-End: 104-817
accggaagtgaaggcagatttccctccttcgtcgctgttgctgccgccatacgcgctctccctgtttagatcccccttcccttcttcccctgccggcccagttatggcagagaacgatgtggacaatgagctcttggactatgaagatgatgaggtggagacagcagctgggggagatggggctgaggcccctgccaagaaggatgtcaagggctcctatgtctccatccacagctctggctttcgtgacttcctgctcaagccagagttgctccgggccattgtcgactgtggctttgagcatccgtcagaagtccagcatgagtgcatccctcaggccattctgggaatggatgtcctgtgccaggccaagtcgggcatgggaaagacagcagtgtttgtcttggccacactgcaacagctggagccagttactgggcaggtgtctgtactggtgatgtgtcacactcgggagttggcttttcagatcagcaaggaatatgagcgcttctctaaatacatgcccaatgtcaaggttgctgttttttttggtggtctgtctatcaagaaggatgaagaggtgctgaagaagaactgcccgcatatcgtcgtggggactccaggccgtatcctagccctggctcgaaataagagcctcaacctcaaacacattaaacactttattttggatgaatgtgataagatgcttgaacagctcgacatgcgtcgggatgtccaggaaatttttcgcatgaccccccacgagaagcaggtcatgatgttcagtgctaccttgagcaaagagatccgtccagtc

SEQ ID NO: 125326 - DNA, 928 bp, Homo sapiens
  Payload ID: 4591
  Gene Symbol: DDX39B
  Gene Name: DEAD (Asp-Glu-Ala-Asp) box polypeptide 39B
  ENST ID: ENST00000420958
  CDS Start-End: 222-928
ccaagtgtttacgatacgattggtgtcattgtatgtttctccaaaaggagtctcaccttcgtagcgtaacagtgatgtgagaccacttgctcttctgttagaaatagtatctttgttttcctttgctgttcctcaatcccctactcttcaccccttgttttcacctattttgcgagaacccatccagatcccccttcccttcttcccctgccggcccagttatggcagagaacgatgtggacaatgagctcttggactatgaagatgatgaggtggagacagcagctgggggagatggggctgaggcccctgccaagaaggatgtcaagggctcctatgtctccatccacagctctggctttcgtgacttcctgctcaagccagagttgctccgggccattgtcgactgtggctttgagcatccgtcagaagtccagcatgagtgcatccctcaggccattctgggaatggatgtcctgtgccaggccaagtcgggcatgggaaagacagcagtgtttgtcttggccacactgcaacagctggagccagttactgggcaggtgtctgtgctggtgatgtgtcacactcgggagttggcttttcagatcagcaaggaatatgagcgcttctctaaatacatgcccaatgtcaaggttgctgttttttttggtggtctgtctatcaagaaggatgaagaggtgctgaagaagaactgcccgcatatcgtcgtggggactccaggccgtatcctagccctggctcgaaataagagcctcaacctcaaacacattaaacactttattttggatgaatgtgataagatgcttgaacagctcgacatgcgtcgggatgtccaggaaatttttcgcatgaccccccacgagaagcaggtcatgatgttcagtgctaccttgagcaaagagatccg

SEQ ID NO: 125327 - DNA, 932 bp, Homo sapiens; identical to SEQ ID NO: 125316
  Payload ID: 4591
  Gene Symbol: DDX39B
  Gene Name: DEAD (Asp-Glu-Ala-Asp) box polypeptide 39B
  ENST ID: ENST00000451051
  CDS Start-End: 238-932

SEQ ID NO: 125328 - DNA, 914 bp, Homo sapiens
  Payload ID: 4591
  Gene Symbol: DDX39B
  Gene Name: DEAD (Asp-Glu-Ala-Asp) box polypeptide 39B
  ENST ID: ENST00000415390
  CDS Start-End: 178-914
ttgctgccgccatacgcgctctccctgtttagctcttctgttagaaatagtatctttgttttcctttgctgttcctcaatcccctactcttcaccccttgttttcacctattttgcgagaacccatccagatcccccttcccttcttcccctgccggcccagttatggcagagaacgatgtggacaatgagctcttggactatgaagatgatgaggtggagacagcagctgggggagatggggctgaggcccctgccaagaaggatgtcaagggctcctatgtctccatccacagctctggctttcgtgacttcctgctcaagccagagttgctccgggccattgtcgactgtggctttgagcatccgtcagaaggttgctgttttttttggtggtctgtctatcaagaaggatgaagaggtgctgaagaagaactgcccgcatatcgtcgtggggactccaggccgtatcctagccctggctcgaaataagagcctcaacctcaaacacattaaacactttattttggatgaatgtgataagatgcttgaacagctcgacatgcgtcgggatgtccaggaaatttttcgcatgaccccccacgagaagcaggtcatgatgttcagtgctaccttgagcaaagagatccgtccagtctgccgcaagttcatgcaagatccaatggagatcttcgtggatgatgagacgaagttgacgctgcatgggttgcagcagtactacgtgaaactgaaggacaacgagaagaaccggaagctctttgaccttctggatgtccttgagttcaaccaggtggtgatctttgtgaagtctgtgcagcggtgcattgccttggcccagctactagtggagcagaacttcccagccattgccatccaccgtgggatgccccagga

SEQ ID NO: 125329 - DNA, 659 bp, Homo sapiens; identical to SEQ ID NO: 125320
  Payload ID: 4591
  Gene Symbol: DDX39B
  Gene Name: DEAD (Asp-Glu-Ala-Asp) box polypeptide 39B
  ENST ID: ENST00000441901
  CDS Start-End: 373-659

SEQ ID NO: 125330 - DNA, 2039 bp, Homo sapiens
  Payload ID: 4591
  Gene Symbol: DDX39B
  Gene Name: DEAD (Asp-Glu-Ala-Asp) box polypeptide 39B
  Uniprot ID: Q13838
  ENST ID: ENST00000412106
  CDS Start-End: 538-1824
cagcatcggccataacaacagaaatggccagtcagtcccaaggtatccagcagcttctgcaagctgagaagcgggcagctgagaaggtggcagatgccagaaagaggaaggcccggcgactgaagcaggcaaaggaggaggcacagatggaggtggagcaataccgcagagagcgagagcacgaattccagagcaagcagcaggcgacaggcattttccaaaggcaagcctggagcgcacggatctgtataaccgcggaaggccctgtttccggtcccttgcgcctgcgctcttgcagccaagaaggcgggaggctggagtagagggaagcctgcaaccggaagtgaaggcacatttccctccttcgtcgctgttgctgccgccatacgcgctctccctgtttagctcttctgttagaaatagtatctttgttttcctttgctgttcctcaatcccctactcttcaccccttgttttcacctattttgcgagaacccatccagatcccccttcccttcttcccctgccggcccagttatggcagagaacgatgtggacaatgagctcttggactatgaagatgatgaggtggagacagcagctgggggagatggggctgaggcccctgccaagaaggatgtcaagggctcctatgtctccatccacagctctggctttcgtgacttcctgctcaagccagagttgctccgggccattgtcgactgtggctttgagcatccgtcagaagtccagcatgagtgcatccctcaggccattctgggaatggatgtcctgtgccaggccaagtcgggcatgggaaagacagcagtgtttgtcttggccacactgcaacagctggagccagttactgggcaggtgtctgtgctggtgatgtgtcacactcgggagttggcttttcagatcagcaaggaatatgagcgcttctctaaatacatgcccaatgtcaaggttgctgttttttttggtggtctgtctatcaagaaggatgaagaggtgctgaagaagaactgcccgcatatcgtcgtggggactccaggccgtatcctagccctggctcgaaataagagcctcaacctcaaacacattaaacactttattttggatgaatgtgataagatgcttgaacagctcgacatgcgtcgggatgtccaggaaatttttcgcatgaccccccacgagaagcaggtcatgatgttcagtgctaccttgagcaaagagatccgtccagtctgccgcaagttcatgcaagatccaatggagatcttcgtggatgatgagacgaagttgacgctgcatgggttgcagcagtactacgtgaaactgaaggacaacgagaagaaccggaagctctttgaccttctggatgtccttgagttcaaccaggtggtgatctttgtgaagtctgtgcagcggtgcattgccttggcccagctactagtggagcagaacttcccagccattgccatccaccgtgggatgccccaggaggagaggctttctcggtatcagcagtttaaagattttcaacgacgaattcttgtggctaccaacctatttggccgaggcatggacatcgagcgggtgaacattgcttttaattatgacatgcctgaggattctgacacctacctgcatcgggtggccagagcaggccggtttggcaccaagggcttggctatcacatttgtgtccgatgagaatgatgccaagatcctcaatgatgtgcaggatcgctttgaggtcaatattagtgagctgcctgatgagatagacatctcctcctacattgaacagacacggtagaagactcgcccattttggaatgtgaccgtctgtccttcaggagaggacaccagggtgggggtgaaggagacactactgcccccacccctgacagcccccaccccatggcttccatcttttgcatcaccaccactcctgaacccccatttctgatttgtcagaatttttttttaacaaaactaaaaatgaaacacatgtgtctgtggtatctataa

SEQ ID NO: 125331 - DNA, 720 bp, Homo sapiens
  Payload ID: 4591
  Gene Symbol: DDX39B
  Gene Name: DEAD (Asp-Glu-Ala-Asp) box polypeptide 39B
  ENST ID: ENST00000456976
  CDS Start-End: 345-720
cgctgttgctgccgccatacgcgctctccctgtttagggtggagacatgaattttgtttttttgtggccgagccatttgtcttgcaccgcccctcccccccatgctaattacacaaggcttgcttaaacagcggaagggaggatactgagaagtgggaggctgagagctatgggaggtggacggcggccatatgatgttttcttttcgaaagctcttctgttagaaatagtatctttgttttcctttgctgttcctcaatcccctactcttcaccccttgttttcacctattttgcgagaacccatccagatcccccttcccttcttcccctgccggcccagttatggcagagaacgatgtggacaatgagctcttggactatgaagatgatgaggtggagacagcagctgggggagatggggctgaggcccctgccaagaaggatgtcaagggctcctatgtctccatccacagctctggctttcgtgacttcctgctcaagccagagttgctccgggccattgtcgactgtggctttgagcatccgtcagaagtccagcatgagtgcatccctcaggccattctgggaatggatgtcctgtgccaggccaagtcgggcatgggaaagacagcagtgtttgtcttggccacactgcaacagctggagccagttactgggcaggtgtctgtactggtgatgtgtcacactcgggagttgg

SEQ ID NO: 125332 - DNA, 2039 bp, Homo sapiens; identical to SEQ ID NO: 125304
  Payload ID: 4591
  Gene Symbol: DDX39B
  Gene Name: DEAD (Asp-Glu-Ala-Asp) box polypeptide 39B
  Uniprot ID: Q13838
  ENST ID: ENST00000456666
  CDS Start-End: 538-1824

SEQ ID NO: 125333 - DNA, 1529 bp, Homo sapiens; identical to SEQ ID NO: 125306
  Payload ID: 4591
  Gene Symbol: DDX39B
  Gene Name: DEAD (Asp-Glu-Ala-Asp) box polypeptide 39B
  ENST ID: ENST00000430703
  CDS Start-End: 5-1282

SEQ ID NO: 125334 - DNA, 406 bp, Homo sapiens
  Payload ID: 4591
  Gene Symbol: DDX39B
  Gene Name: DEAD (Asp-Glu-Ala-Asp) box polypeptide 39B
  ENST ID: ENST00000427927
  CDS Start-End: 1-406
tggccacactgcaacagctggagccagttactgggcaggtgtctgtactggtgatgtgtcacactcgggagttggcttttcagatcagcaaggaatatgagcgcttctctaaatacatgcccaatgtcaaggttgctgttttttttggtggtctgtctatcaagaaggatgaagaggtgctgaagaagaactgcccgcatatcgtcgtggggactccaggccgtatcctagccctggctcgaaataagagcctcaacctcaaacacattaaacactttattttggatgaatgtgataagatgcttgaacagctcgacatgcgtcgggatgtccaggaaatttttcgcatgaccccccacgagaagcaggtcatgatgttcagtgctaccttgagcaaagagatccg

SEQ ID NO: 125335 - DNA, 720 bp, Homo sapiens
  Payload ID: 4591
  Gene Symbol: DDX39B
  Gene Name: DEAD (Asp-Glu-Ala-Asp) box polypeptide 39B
  ENST ID: ENST00000414881
  CDS Start-End: 345-720
cgctgttgctgccgccatacgcgctctccctgtttagggtggagacatgaattttgtttttttgtggccgagccatttgtcttgcaccgcccctcccccccatgctaattacacaaggcttgcttaaacagcggaagggaggatactgagaagtgggaggctgagagctatgggaggtggacggcggccatatgatgttttcttttcgaaagctcttctgttagaaatagtatctttgttttcctttgctgttcctcaatcccctactcttcaccccttgttttcacctattttgcgagaacccatccagatcccccttcccttcttcccctgccggcccagttatggcagagaacgatgtggacaatgagctcttggactatgaagatgatgaggtggagacagcagctgggggagatggggctgaggcccctgccaagaaggatgtcaagggctcctatgtctccatccacagctctggctttcgtgacttcctgctcaagccagagttgctccgggccattgtcgactgtggctttgagcatccgtcagaagtccagcatgagtgcatccctcaggccattctgggaatggatgtcctgtgccaggccaagtcgggcatgggaaagacagcagtgtttgtcttggccacactgcaacagctggagccagttactgggcaggtgtctgtgctggtgatgtgtcacactcgggagttgg

SEQ ID NO: 125336 - DNA, 817 bp, Homo sapiens
  Payload ID: 4591
  Gene Symbol: DDX39B
  Gene Name: DEAD (Asp-Glu-Ala-Asp) box polypeptide 39B
  ENST ID: ENST00000449100
  CDS Start-End: 104-817
accggaagtgaaggcagatttccctccttcgtcgctgttgctgccgccatacgcgctctccctgtttagatcccccttcccttcttcccctgccggcccagttatggcagagaacgatgtggacaatgagctcttggactatgaagatgatgaggtggagacagcagctgggggagatggggctgaggcccctgccaagaaggatgtcaagggctcctatgtctccatccacagctctggctttcgtgacttcctgctcaagccagagttgctccgggccattgtcgactgtggctttgagcatccgtcagaagtccagcatgagtgcatccctcaggccattctgggaatggatgtcctgtgccaggccaagtcgggcatgggaaagacagcagtgtttgtcttggccacactgcaacagctggagccagttactgggcaggtgtctgtgctggtgatgtgtcacactcgggagttggcttttcagatcagcaaggaatatgagcgcttctctaaatacatgcccaatgtcaaggttgctgttttttttggtggtctgtctatcaagaaggatgaagaggtgctgaagaagaactgcccgcatatcgtcgtggggactccaggccgtatcctagccctggctcgaaataagagcctcaacctcaaacacattaaacactttattttggatgaatgtgataagatgcttgaacagctcgacatgcgtcgggatgtccaggaaatttttcgcatgaccccccacgagaagcaggtcatgatgttcagtgctaccttgagcaaagagatccgtccagtc

SEQ ID NO: 125337 - DNA, 583 bp, Homo sapiens
  Payload ID: 4591
  Gene Symbol: DDX39B
  Gene Name: DEAD (Asp-Glu-Ala-Asp) box polypeptide 39B
  ENST ID: ENST00000452163
  CDS Start-End: 187-583
agatttccctccttcgtcgctgttgctgccgccatacgcgctctccctgtttagctcttctgttagaaatagtatctttgttttcctttgctgttcctcaatcccctactcttcaccccttgttttcacctattttgcgagaacccatccagatcccccttcccttcttcccctgccggcccagttatggcagagaacgatgtggacaatgagctcttggactatgaagatgatgaggtggagacagcagctgggggagatggggctgaggcccctgccaagaaggatgtcaagggctcctatgtctccatccacagctctggctttcgtgacttcctgctcaagccagagttgctccgggccattgtcgactgtggctttgagcatccgtcagaagtccagcatgagtgcatccctcaggccattctgggaatggatgtcctgtgccaggccaagtcgggcatgggaaagacagcagtgtttgtcttggccacactgcaacagctggagccagttactgggcaggtgtgtttttgtgacagtcacttccctagaggggataatgaagagctacatttaccat

SEQ ID NO: 125338 - DNA, 817 bp, Homo sapiens; identical to SEQ ID NO: 125336
  Payload ID: 4591
  Gene Symbol: DDX39B
  Gene Name: DEAD (Asp-Glu-Ala-Asp) box polypeptide 39B
  ENST ID: ENST00000446272
  CDS Start-End: 104-817

SEQ ID NO: 125339 - DNA, 1005 bp, Homo sapiens
  Payload ID: 4591
  Gene Symbol: DDX39B
  Gene Name: DEAD (Asp-Glu-Ala-Asp) box polypeptide 39B
  ENST ID: ENST00000439927
  CDS Start-End: 139-1005
ttggatttttctcaccttgacttgcccaacttaatttggagtgccttccaagtgtttacgatacgattggtgtcattgtatgtttctccaaaaggagtctcaccttcgtagcgtaacagtgatgtgagaccacttgttatggcagagaacgatgtggacaatgagctcttggactatgaagatgatgaggtggagacagcagctgggggagatggggctgaggcccctgccaagaaggatgtcaagggctcctatgtctccatccacagctctggctttcgtgacttcctgctcaagccagagttgctccgggccattgtcgactgtggctttgagcatccgtcagaagtccagcatgagtgcatccctcaggccattctgggaatggatgtcctgtgccaggccaagtcgggcatgggaaagacagcagtgtttgtcttggccacactgcaacagctggagccagttactgggcaggtgtctgtactggtgatgtgtcacactcgggagttggcttttcagatcagcaaggaatatgagcgcttctctaaatacatgcccaatgtcaaggttgctgttttttttggtggtctgtctatcaagaaggatgaagaggtgctgaagaagaactgcccgcatatcgtcgtggggactccaggccgtatcctagccctggctcgaaataagagcctcaacctcaaacacattaaacactttattttggatgaatgtgataagatgcttgaacagctcgacatgcgtcgggatgtccaggaaatttttcgcatgaccccccacgagaagcaggtcatgatgttcagtgctaccttgagcaaagagatccgtccagtctgccgcaagttcatgcaagatccaatggagatcttcgtggatgatgagacgaagttgacgctgcatgggttgcagcagtactacgtgaaactgaaggacaacgagaagaaccggaagctctttgaccttctggatgtccttgagttcaaccag

SEQ ID NO: 125340 - DNA, 561 bp, Homo sapiens; identical to SEQ ID NO: 125309
  Payload ID: 4591
  Gene Symbol: DDX39B
  Gene Name: DEAD (Asp-Glu-Ala-Asp) box polypeptide 39B
  ENST ID: ENST00000417995
  CDS Start-End: 1-561

SEQ ID NO: 125341 - DNA, 566 bp, Homo sapiens
  Payload ID: 4591
  Gene Symbol: DDX39B
  Gene Name: DEAD (Asp-Glu-Ala-Asp) box polypeptide 39B
  ENST ID: ENST00000416325
  CDS Start-End: 1-566
tggccacactgcaacagctggagccagttactgggcaggtgtctgtactggtgatgtgtcacactcgggagttggcttttcagatcagcaaggaatatgagcgcttctctaaatacatgcccaatgtcaaggttgctgttttttttggtggtctgtctatcaagaaggatgaagaggtgctgaagaagaactgcccgcatatcgtcgtggggactccaggccgtatcctagccctggctcgaaataagagcctcaacctcaaacacattaaacactttattttggatgaatgtgataagatgcttgaacagctcgacatgcgtcgggatgtccaggaaatttttcgcatgaccccccacgagaagcaggtcatgatgttcagtgctaccttgagcaaagagatccgtccagtctgccgcaagttcatgcaagatccaatggagatcttcgtggatgatgagacgaagttgacgctgcatgggttgcagcagtactacgtgaaactgaaggacaacgagaagaaccggaagctctttgaccttctggatgtccttgagttcaaccag

SEQ ID NO: 125342 - DNA, 928 bp, Homo sapiens
  Payload ID: 4591
  Gene Symbol: DDX39B
  Gene Name: DEAD (Asp-Glu-Ala-Asp) box polypeptide 39B
  ENST ID: ENST00000436995
  CDS Start-End: 222-928
ccaagtgtttacgatacgattggtgtcattgtatgtttctccaaaaggagtctcaccttcgtagcgtaacagtgatgtgagaccacttgctcttctgttagaaatagtatctttgttttcctttgctgttcctcaatcccctactcttcaccccttgttttcacctattttgcgagaacccatccagatcccccttcccttcttcccctgccggcccagttatggcagagaacgatgtggacaatgagctcttggactatgaagatgatgaggtggagacagcagctgggggagatggggctgaggcccctgccaagaaggatgtcaagggctcctatgtctccatccacagctctggctttcgtgacttcctgctcaagccagagttgctccgggccattgtcgactgtggctttgagcatccgtcagaagtccagcatgagtgcatccctcaggccattctgggaatggatgtcctgtgccaggccaagtcgggcatgggaaagacagcagtgtttgtcttggccacactgcaacagctggagccagttactgggcaggtgtctgtactggtgatgtgtcacactcgggagttggcttttcagatcagcaaggaatatgagcgcttctctaaatacatgcccaatgtcaaggttgctgttttttttggtggtctgtctatcaagaaggatgaagaggtgctgaagaagaactgcccgcatatcgtcgtggggactccaggccgtatcctagccctggctcgaaataagagcctcaacctcaaacacattaaacactttattttggatgaatgtgataagatgcttgaacagctcgacatgcgtcgggatgtccaggaaatttttcgcatgaccccccacgagaagcaggtcatgatgttcagtgctaccttgagcaaagagatccg

SEQ ID NO: 125343 - DNA, 63 bp, Homo sapiens
  Payload ID: 4591
  Gene Symbol: DDX39B
  Gene Name: DEAD (Asp-Glu-Ala-Asp) box polypeptide 39B
  ENST ID: ENST00000434740
  CDS Start-End: 1-63
tggccacactgcaacagctggagccagttactgggcaggtgtctgtactggtgatgtgtcaca

SEQ ID NO: 125344 - DNA, 591 bp, Homo sapiens; identical to SEQ ID NO: 125322
  Payload ID: 4591
  Gene Symbol: DDX39B
  Gene Name: DEAD (Asp-Glu-Ala-Asp) box polypeptide 39B
  ENST ID: ENST00000445783
  CDS Start-End: 30-591

SEQ ID NO: 125345 - DNA, 817 bp, Homo sapiens; identical to SEQ ID NO: 125325
  Payload ID: 4591
  Gene Symbol: DDX39B
  Gene Name: DEAD (Asp-Glu-Ala-Asp) box polypeptide 39B
  ENST ID: ENST00000444726
  CDS Start-End: 104-817

SEQ ID NO: 125346 - DNA, 75 bp, Homo sapiens
  Payload ID: 4591
  Gene Symbol: DDX39B
  Gene Name: DEAD (Asp-Glu-Ala-Asp) box polypeptide 39B
  ENST ID: ENST00000433987
  CDS Start-End: 1-75
tggccacactgcaacagctggagccagttactgggcaggtgtctgtactggtgatgtgtcacactcgggagttgg

SEQ ID NO: 125347 - DNA, 561 bp, Homo sapiens; identical to SEQ ID NO: 125309
  Payload ID: 4591
  Gene Symbol: DDX39B
  Gene Name: DEAD (Asp-Glu-Ala-Asp) box polypeptide 39B
  ENST ID: ENST00000433293
  CDS Start-End: 1-561

SEQ ID NO: 125348 - DNA, 583 bp, Homo sapiens; identical to SEQ ID NO: 125337
  Payload ID: 4591
  Gene Symbol: DDX39B
  Gene Name: DEAD (Asp-Glu-Ala-Asp) box polypeptide 39B
  ENST ID: ENST00000439857
  CDS Start-End: 187-583

SEQ ID NO: 125349 - DNA, 583 bp, Homo sapiens; identical to SEQ ID NO: 125323
  Payload ID: 4591
  Gene Symbol: DDX39B
  Gene Name: DEAD (Asp-Glu-Ala-Asp) box polypeptide 39B
  ENST ID: ENST00000415515
  CDS Start-End: 175-583

SEQ ID NO: 125350 - DNA, 2003 bp, Homo sapiens
  Payload ID: 4591
  Gene Symbol: DDX39B
  Gene Name: DEAD (Asp-Glu-Ala-Asp) box polypeptide 39B
  Uniprot ID: Q13838
  ENST ID: ENST00000412330
  CDS Start-End: 502-1788
ctcagctagggcctgccggttcctagtgcgtgcccagcagtcctcaggtcaccttcactaccgggccaaggaccccgtgggaactcgcagccttcgccacactcgttcctcgcgcatccacggaggggtgcctacagagaagacctgcgtggcaaaaacctaaacgaagagatgaggggcatggagaggagtaggataagagaataaagataacagtggggggcagacgttagtttcctttatatcttttgttactggcggtagcagtgaagttagaaacggttttaaaacaaatttcagacaggcattttccaaaggcaagcctggagcgcacggatctgtataaccgcggaaggccctgtttccggtcccttgcgcctgcgctcttgcagccaagaaggcgggaggctggagtagagggaagcctgcaaccggaagtgaaggcagatttccctccttcgtcgctgttgctgccgccatacgcgctctccctgtttagttatggcagagaacgatgtggacaatgagctcttggactatgaagatgatgaggtggagacagcagctgggggagatggggctgaggcccctgccaagaaggatgtcaagggctcctatgtctccatccacagctctggctttcgtgacttcctgctcaagccagagttgctccgggccattgtcgactgtggctttgagcatccgtcagaagtccagcatgagtgcatccctcaggccattctgggaatggatgtcctgtgccaggccaagtcgggcatgggaaagacagcagtgtttgtcttggccacactgcaacagctggagccagttactgggcaggtgtctgtgctggtgatgtgtcacactcgggagttggcttttcagatcagcaaggaatatgagcgcttctctaaatacatgcccaatgtcaaggttgctgttttttttggtggtctgtctatcaagaaggatgaagaggtgctgaagaagaactgcccgcatatcgtcgtggggactccaggccgtatcctagccctggctcgaaataagagcctcaacctcaaacacattaaacactttattttggatgaatgtgataagatgcttgaacagctcgacatgcgtcgggatgtccaggaaatttttcgcatgaccccccacgagaagcaggtcatgatgttcagtgctaccttgagcaaagagatccgtccagtctgccgcaagttcatgcaagatccaatggagatcttcgtggatgatgagacgaagttgacgctgcatgggttgcagcagtactacgtgaaactgaaggacaacgagaagaaccggaagctctttgaccttctggatgtccttgagttcaaccaggtggtgatctttgtgaagtctgtgcagcggtgcattgccttggcccagctactagtggagcagaacttcccagccattgccatccaccgtgggatgccccaggaggagaggctttctcggtatcagcagtttaaagattttcaacgacgaattcttgtggctaccaacctatttggccgaggcatggacatcgagcgggtgaacattgcttttaattatgacatgcctgaggattctgacacctacctgcatcgggtggccagagcaggccggtttggcaccaagggcttggctatcacatttgtgtccgatgagaatgatgccaagatcctcaatgatgtgcaggatcgctttgaggtcaatattagtgagctgcctgatgagatagacatctcctcctacattgaacagacacggtagaagactcgcccattttggaatgtgaccgtctgtccttcaggagaggacaccagggtgggggtgaaggagacactactgcccccacccctgacagcccccaccccatggcttccatcttttgcatcaccaccactcctgaacccccatttctgatttgtcagaatttttttttaacaaaactaaaaatgaaacacatgtgtctgtggtatctataa

SEQ ID NO: 125351 - DNA, 914 bp, Homo sapiens; identical to SEQ ID NO: 125328
  Payload ID: 4591
  Gene Symbol: DDX39B
  Gene Name: DEAD (Asp-Glu-Ala-Asp) box polypeptide 39B
  ENST ID: ENST00000452792
  CDS Start-End: 178-914

SEQ ID NO: 125352 - DNA, 2133 bp, Homo sapiens; identical to SEQ ID NO: 125305
  Payload ID: 4591
  Gene Symbol: DDX39B
  Gene Name: DEAD (Asp-Glu-Ala-Asp) box polypeptide 39B
  Uniprot ID: Q13838
  ENST ID: ENST00000430784
  CDS Start-End: 632-1918

SEQ ID NO: 125353 - DNA, 1005 bp, Homo sapiens; identical to SEQ ID NO: 125339
  Payload ID: 4591
  Gene Symbol: DDX39B
  Gene Name: DEAD (Asp-Glu-Ala-Asp) box polypeptide 39B
  ENST ID: ENST00000427214
  CDS Start-End: 139-1005

SEQ ID NO: 125354 - DNA, 1201 bp, Homo sapiens
  Payload ID: 4591
  Gene Symbol: DDX39B
  Gene Name: DEAD (Asp-Glu-Ala-Asp) box polypeptide 39B
  ENST ID: ENST00000420337
  CDS Start-End: 1-986
tggccacactgcaacagctggagccagttactgggcaggtgtctgtactggtgatgtgtcacactcgggagttggcttttcagatcagcaaggaatatgagcgcttctctaaatacatgcccaatgtcaaggttgctgttttttttggtggtctgtctatcaagaaggatgaagaggtgctgaagaagaactgcccgcatatcgtcgtggggactccaggccgtatcctagccctggctcgaaataagagcctcaacctcaaacacattaaacactttattttggatgaatgtgataagatgcttgaacagctcgacatgcgtcgggatgtccaggaaatttttcgcatgaccccccacgagaagcaggtcatgatgttcagtgctaccttgagcaaagagatccgtccagtctgccgcaagttcatgcaagatccaatggagatcttcgtggatgatgagacgaagttgacgctgcatgggttgcagcagtactacgtgaaactgaaggacaacgagaagaaccggaagctctttgaccttctggatgtccttgagttcaaccaggtggtgatctttgtgaagtctgtgcagcggtgcattgccttggcccagctactagtggagcagaacttcccagccattgccatccaccgtgggatgccccaggaggagaggctttctcggtatcagcagtttaaagattttcaacgacgaattcttgtggctaccaacctatttggccgaggcatggacatcgagcgggtgaacattgcttttaattatgacatgcctgaggattctgacacctacctgcatcgggtggccagagcaggccggtttggcaccaagggcttggctatcacatttgtgtccgatgagaatgatgccaagatcctcaatgatgtgcaggatcgctttgaggtcaatattagtgagctgcctgatgagatagacatctcctcctacattgaacagacacggtagaagactcgcccattttggaatgtgaccgtctgtccttcaggagaggacaccagggtgggggtgaaggagacactactgcccccacccctgacagcccccaccccatggcttccatcttttgcatcaccaccactcctgaacccccatttctgatttgtcagaatttttttttaacaaaactaaaaatgaaacacatgtgtctgtggtatctataa

SEQ ID NO: 125355 - DNA, 928 bp, Homo sapiens; identical to SEQ ID NO: 125326
  Payload ID: 4591
  Gene Symbol: DDX39B
  Gene Name: DEAD (Asp-Glu-Ala-Asp) box polypeptide 39B
  ENST ID: ENST00000436919
  CDS Start-End: 222-928

SEQ ID NO: 125356 - DNA, 583 bp, Homo sapiens; identical to SEQ ID NO: 125313
  Payload ID: 4591
  Gene Symbol: DDX39B
  Gene Name: DEAD (Asp-Glu-Ala-Asp) box polypeptide 39B
  ENST ID: ENST00000418897
  CDS Start-End: 175-583

SEQ ID NO: 125357 - DNA, 2003 bp, Homo sapiens
  Payload ID: 4591
  Gene Symbol: DDX39B
  Gene Name: DEAD (Asp-Glu-Ala-Asp) box polypeptide 39B
  Uniprot ID: Q13838
  ENST ID: ENST00000456476
  CDS Start-End: 502-1788
ctcagctagggcctgccggttcctagtgcgtgcccagcagtcctcaggtcaccttcactaccgggccaaggaccccgtgggaactcgcagccttcgccacactcgttcctcgcgcatccacggaggggtgcctacagagaagacctgcgtggcaaaaacctaaacgaagagatgaggggcatggagaggagtaggataagagaataaagataacagtgggggggagacgttagtttcctttatatcttttgttactggcggtagcagtgaagttagaaacggttttaaaacaaatttcagacaggcattttccaaaggcaagcctggagcgcacggatctgtataaccgcggaaggccctgtttccggtcccttgcgcctgcgctcttgcagccaagaaggcgggaggctggagtagagggaagcctgcaaccggaagtgaaggcacatttccctccttcgtcgctgttgctgccgccatacgcgctctccctgtttagttatggcagagaacgatgtggacaatgagctcttggactatgaagatgatgaggtggagacagcagctgggggagatggggctgaggcccctgccaagaaggatgtcaagggctcctatgtctccatccacagctctggctttcgtgacttcctgctcaagccagagttgctccgggccattgtcgactgtggctttgagcatccgtcagaagtccagcatgagtgcatccctcaggccattctgggaatggatgtcctgtgccaggccaagtcgggcatgggaaagacagcagtgtttgtcttggccacactgcaacagctggagccagttactgggcaggtgtctgtgctggtgatgtgtcacactcgggagttggcttttcagatcagcaaggaatatgagcgcttctctaaatacatgcccaatgtcaaggttgctgttttttttggtggtctgtctatcaagaaggatgaagaggtgctgaagaagaactgcccgcatatcgtcgtggggactccaggccgtatcctagccctggctcgaaataagagcctcaacctcaaacacattaaacactttattttggatgaatgtgataagatgcttgaacagctcgacatgcgtcgggatgtccaggaaatttttcgcatgaccccccacgagaagcaggtcatgatgttcagtgctaccttgagcaaagagatccgtccagtctgccgcaagttcatgcaagatccaatggagatcttcgtggatgatgagacgaagttgacgctgcatgggttgcagcagtactacgtgaaactgaaggacaacgagaagaaccggaagctctttgaccttctggatgtccttgagttcaaccaggtggtgatctttgtgaagtctgtgcagcggtgcattgccttggcccagctactagtggagcagaacttcccagccattgccatccaccgtgggatgccccaggaggagaggctttctcggtatcagcagtttaaagattttcaacgacgaattcttgtggctaccaacctatttggccgaggcatggacatcgagcgggtgaacattgcttttaattatgacatgcctgaggattctgacacctacctgcatcgggtggccagagcaggccggtttggcaccaagggcttggctatcacatttgtgtccgatgagaatgatgccaagatcctcaatgatgtgcaggatcgctttgaggtcaatattagtgagctgcctgatgagatagacatctcctcctacattgaacagacacggtagaagactcgcccattttggaatgtgaccgtctgtccttcaggagaggacaccagggtgggggtgaaggagacactactgcccccacccctgacagcccccaccccatggcttccatcttttgcatcaccaccactcctgaacccccatttctgatttgtcagaatttttttttaacaaaactaaaaatgaaacacatgtgtctgtggtatctataa

SEQ ID NO: 125358 - DNA, 720 bp, Homo sapiens; identical to SEQ ID NO: 125335
  Payload ID: 4591
  Gene Symbol: DDX39B
  Gene Name: DEAD (Asp-Glu-Ala-Asp) box polypeptide 39B
  ENST ID: ENST00000412246
  CDS Start-End: 345-720

SEQ ID NO: 125359 - DNA, 583 bp, Homo sapiens
  Payload ID: 4591
  Gene Symbol: DDX39B
  Gene Name: DEAD (Asp-Glu-Ala-Asp) box polypeptide 39B
  ENST ID: ENST00000415036
  CDS Start-End: 187-583
acatttccctccttcgtcgctgttgctgccgccatacgcgctctccctgtttagctcttctgttagaaatagtatctttgttttcctttgctgttcctcaatcccctactcttcaccccttgttttcacctattttgcgagaacccatccagatcccccttcccttcttcccctgccggcccagttatggcagagaacgatgtggacaatgagctcttggactatgaagatgatgaggtggagacagcagctgggggagatggggctgaggcccctgccaagaaggatgtcaagggctcctatgtctccatccacagctctggctttcgtgacttcctgctcaagccagagttgctccgggccattgtcgactgtggctttgagcatccgtcagaagtccagcatgagtgcatccctcaggccattctgggaatggatgtcctgtgccaggccaagtcgggcatgggaaagacagcagtgtttgtcttggccacactgcaacagctggagccagttactgggcaggtgtgtttttgtgacagtcacttccctagaggggataatgaagagctacatttaccat

SEQ ID NO: 125360 - DNA, 720 bp, Homo sapiens; identical to SEQ ID NO: 125335
  Payload ID: 4591
  Gene Symbol: DDX39B
  Gene Name: DEAD (Asp-Glu-Ala-Asp) box polypeptide 39B
  ENST ID: ENST00000413544
  CDS Start-End: 345-720

SEQ ID NO: 125361 - DNA, 817 bp, Homo sapiens; identical to SEQ ID NO: 125336
  Payload ID: 4591
  Gene Symbol: DDX39B
  Gene Name: DEAD (Asp-Glu-Ala-Asp) box polypeptide 39B
  ENST ID: ENST00000438301
  CDS Start-End: 104-817

SEQ ID NO: 125362 - DNA, 659 bp, Homo sapiens; identical to SEQ ID NO: 125320
  Payload ID: 4591
  Gene Symbol: DDX39B
  Gene Name: DEAD (Asp-Glu-Ala-Asp) box polypeptide 39B
  ENST ID: ENST00000414451
  CDS Start-End: 373-659

SEQ ID NO: 125363 - DNA, 1529 bp, Homo sapiens; identical to SEQ ID NO: 125306
  Payload ID: 4591
  Gene Symbol: DDX39B
  Gene Name: DEAD (Asp-Glu-Ala-Asp) box polypeptide 39B
  ENST ID: ENST00000438578
  CDS Start-End: 5-1282

SEQ ID NO: 125364 - DNA, 2003 bp, Homo sapiens
  Payload ID: 4591
  Gene Symbol: DDX39B
  Gene Name: DEAD (Asp-Glu-Ala-Asp) box polypeptide 39B
  Uniprot ID: Q13838
  ENST ID: ENST00000431360
  CDS Start-End: 502-1788
ctcagctagggcctgccggttcctagtgcgtgcccagcagtcctcaggtcaccttcactaccgggccaaggaccccgtgggaactcgcagccttcgccacactcgttcctcgcgcatccatggaggggtgcctacagagaagacctgcgtggcaaaaacctaaacgaagagatgaggggcatggagaggagtaggataagagaataaagataacagtgggggggagacgttagtttcctttatatcttttgttactggcggtagcagtgaagttagaaacggttttaaaacaaatttcagacaggcattttccaaaggcaagcctggagcgcacggatctgtataaccgcggaaggccctgtttccggtcccttgcgcctgcgctcttgcagccaagaaggcgggaggctggagtagagggaagcctgcaaccggaagtgaaggcagatttccctccttcgtcgctgttgctgccgccatacgcgctctccctgtttagttatggcagagaacgatgtggacaatgagctcttggactatgaagatgatgaggtggagacagcagctgggggagatggggctgaggcccctgccaagaaggatgtcaagggctcctatgtctccatccacagctctggctttcgtgacttcctgctcaagccagagttgctccgggccattgtcgactgtggctttgagcatccgtcagaagtccagcatgagtgcatccctcaggccattctgggaatggatgtcctgtgccaggccaagtcgggcatgggaaagacagcagtgtttgtcttggccacactgcaacagctggagccagttactgggcaggtgtctgtactggtgatgtgtcacactcgggagttggcttttcagatcagcaaggaatatgagcgcttctctaaatacatgcccaatgtcaaggttgctgttttttttggtggtctgtctatcaagaaggatgaagaggtgctgaagaagaactgcccgcatatcgtcgtggggactccaggccgtatcctagccctggctcgaaataagagcctcaacctcaaacacattaaacactttattttggatgaatgtgataagatgcttgaacagctcgacatgcgtcgggatgtccaggaaatttttcgcatgaccccccacgagaagcaggtcatgatgttcagtgctaccttgagcaaagagatccgtccagtctgccgcaagttcatgcaagatccaatggagatcttcgtggatgatgagacgaagttgacgctgcatgggttgcagcagtactacgtgaaactgaaggacaacgagaagaaccggaagctctttgaccttctggatgtccttgagttcaaccaggtggtgatctttgtgaagtctgtgcagcggtgcattgccttggcccagctactagtggagcagaacttcccagccattgccatccaccgtgggatgccccaggaggagaggctttctcggtatcagcagtttaaagattttcaacgacgaattcttgtggctaccaacctatttggccgaggcatggacatcgagcgggtgaacattgcttttaattatgacatgcctgaggattctgacacctacctgcatcgggtggccagagcaggccggtttggcaccaagggcttggctatcacatttgtgtccgatgagaatgatgccaagatcctcaatgatgtgcaggatcgctttgaggtcaatattagtgagctgcctgatgagatagacatctcctcctacattgaacagacacggtagaagactcgcccattttggaatgtgaccgtctgtccttcaggagaggacaccagggtgggggtgaaggagacactactgcccccacccctgacagcccccaccccatggcttccatcttttgcatcaccaccactcctgaacccccatttctgatttgtcagaatttttttttaacaaaactaaaaatgaaacacatgtgtctgtggtatctataa

SEQ ID NO: 125365 - DNA, 932 bp, Homo sapiens
  Payload ID: 4591
  Gene Symbol: DDX39B
  Gene Name: DEAD (Asp-Glu-Ala-Asp) box polypeptide 39B
  ENST ID: ENST00000444267
  CDS Start-End: 238-932
cttcgctacaatccgtttccatctgcgcttctccgcacccatcccgtcacatgggttcctgatacccttttcacaggcgatggtctggtcgctggggcctagttgctcttctgttagaaatagtatctttgttttcctttgctgttcctcaatcccctactcttcaccccttgttttcacctattttgcgagaacccatccagatcccccttcccttcttcccctgccggcccagttatggcagagaacgatgtggacaatgagctcttggactatgaagatgatgaggtggagacagcagctgggggagatggggctgaggcccctgccaagaaggatgtcaagggctcctatgtctccatccacagctctggctttcgtgacttcctgctcaagccagagttgctccgggccattgtcgactgtggctttgagcatccgtcagaagtccagcatgagtgcatccctcaggccattctgggaatggatgtcctgtgccaggccaagtcgggcatgggaaagacagcagtgtttgtcttggccacactgcaacagctggagccagttactgggcaggtgtctgtactggtgatgtgtcacactcgggagttggcttttcagatcagcaaggaatatgagcgcttctctaaatacatgcccaatgtcaaggttgctgttttttttggtggtctgtctatcaagaaggatgaagaggtgctgaagaagaactgcccgcatatcgtcgtggggactccaggccgtatcctagccctggctcgaaataagagcctcaacctcaaacacattaaacactttattttggatgaatgtgataagatgcttgaacagctcgacatgcgtcgggatgtccaggaaatttttcgcatgaccccccacgagaagcaggtcatgatgttcagtgctaccttgag

SEQ ID NO: 125366 - DNA, 583 bp, Homo sapiens; identical to SEQ ID NO: 125337
  Payload ID: 4591
  Gene Symbol: DDX39B
  Gene Name: DEAD (Asp-Glu-Ala-Asp) box polypeptide 39B
  ENST ID: ENST00000419020
  CDS Start-End: 187-583

SEQ ID NO: 125367 - DNA, 720 bp, Homo sapiens; identical to SEQ ID NO: 125335
  Payload ID: 4591
  Gene Symbol: DDX39B
  Gene Name: DEAD (Asp-Glu-Ala-Asp) box polypeptide 39B
  ENST ID: ENST00000423951
  CDS Start-End: 345-720

SEQ ID NO: 125368 - DNA, 720 bp, Homo sapiens; identical to SEQ ID NO: 125331
  Payload ID: 4591
  Gene Symbol: DDX39B
  Gene Name: DEAD (Asp-Glu-Ala-Asp) box polypeptide 39B
  ENST ID: ENST00000419913
  CDS Start-End: 345-720

SEQ ID NO: 125369 - DNA, 817 bp, Homo sapiens
  Payload ID: 4591
  Gene Symbol: DDX39B
  Gene Name: DEAD (Asp-Glu-Ala-Asp) box polypeptide 39B
  ENST ID: ENST00000455645
  CDS Start-End: 104-817
accggaagtgaaggcacatttccctccttcgtcgctgttgctgccgccatacgcgctctccctgtttagatcccccttcccttcttcccctgccggcccagttatggcagagaacgatgtggacaatgagctcttggactatgaagatgatgaggtggagacagcagctgggggagatggggctgaggcccctgccaagaaggatgtcaagggctcctatgtctccatccacagctctggctttcgtgacttcctgctcaagccagagttgctccgggccattgtcgactgtggctttgagcatccgtcagaagtccagcatgagtgcatccctcaggccattctgggaatggatgtcctgtgccaggccaagtcgggcatgggaaagacagcagtgtttgtcttggccacactgcaacagctggagccagttactgggcaggtgtctgtgctggtgatgtgtcacactcgggagttggcttttcagatcagcaaggaatatgagcgcttctctaaatacatgcccaatgtcaaggttgctgttttttttggtggtctgtctatcaagaaggatgaagaggtgctgaagaagaactgcccgcatatcgtcgtggggactccaggccgtatcctagccctggctcgaaataagagcctcaacctcaaacacattaaacactttattttggatgaatgtgataagatgcttgaacagctcgacatgcgtcgggatgtccaggaaatttttcgcatgaccccccacgagaagcaggtcatgatgttcagtgctaccttgagcaaagagatccgtccagtc

SEQ ID NO: 125370 - DNA, 2133 bp, Homo sapiens
  Payload ID: 4591
  Gene Symbol: DDX39B
  Gene Name: DEAD (Asp-Glu-Ala-Asp) box polypeptide 39B
  Uniprot ID: Q13838
  ENST ID: ENST00000448296
  CDS Start-End: 632-1918
ctcagctagggcctgccggttcctagtgcgtgcccagcagtcctcaggtcaccttcactaccgggccaaggaccccgtgggaactcgcagccttcgccacactcgttcctcgcgcatccacggaggggtgcctacagagaagacctgcgtggcaaaaacctaaacgaagagatgaggggcatggagaggagtaggataagagaataaagataacagtggggggcagacgttagtttcctttatatcttttgttactggcggtagcagtgaagttagaaacggttttaaaacaaatttcagacaggcattttccaaaggcaagcctggagcgcacggatctgtataaccgcggaaggccctgtttccggtcccttgcgcctgcgctcttgcagccaagaaggcgggaggctggagtagagggaagcctgcaaccggaagtgaaggcagatttccctccttcgtcgctgttgctgccgccatacgcgctctccctgtttagctcttctgttagaaatagtatctttgttttcctttgctgttcctcaatcccctactcttcaccccttgttttcacctattttgcgagaacccatccagatcccccttcccttcttcccctgccggcccagttatggcagagaacgatgtggacaatgagctcttggactatgaagatgatgaggtggagacagcagctgggggagatggggctgaggcccctgccaagaaggatgtcaagggctcctatgtctccatccacagctctggctttcgtgacttcctgctcaagccagagttgctccgggccattgtcgactgtggctttgagcatccgtcagaagtccagcatgagtgcatccctcaggccattctgggaatggatgtcctgtgccaggccaagtcgggcatgggaaagacagcagtgtttgtcttggccacactgcaacagctggagccagttactgggcaggtgtctgtgctggtgatgtgtcacactcgggagttggcttttcagatcagcaaggaatatgagcgcttctctaaatacatgcccaatgtcaaggttgctgttttttttggtggtctgtctatcaagaaggatgaagaggtgctgaagaagaactgcccgcatatcgtcgtggggactccaggccgtatcctagccctggctcgaaataagagcctcaacctcaaacacattaaacactttattttggatgaatgtgataagatgcttgaacagctcgacatgcgtcgggatgtccaggaaatttttcgcatgaccccccacgagaagcaggtcatgatgttcagtgctaccttgagcaaagagatccgtccagtctgccgcaagttcatgcaagatccaatggagatcttcgtggatgatgagacgaagttgacgctgcatgggttgcagcagtactacgtgaaactgaaggacaacgagaagaaccggaagctctttgaccttctggatgtccttgagttcaaccaggtggtgatctttgtgaagtctgtgcagcggtgcattgccttggcccagctactagtggagcagaacttcccagccattgccatccaccgtgggatgccccaggaggagaggctttctcggtatcagcagtttaaagattttcaacgacgaattcttgtggctaccaacctatttggccgaggcatggacatcgagcgggtgaacattgcttttaattatgacatgcctgaggattctgacacctacctgcatcgggtggccagagcaggccggtttggcaccaagggcttggctatcacatttgtgtccgatgagaatgatgccaagatcctcaatgatgtgcaggatcgctttgaggtcaatattagtgagctgcctgatgagatagacatctcctcctacattgaacagacacggtagaagactcgcccattttggaatgtgaccgtctgtccttcaggagaggacaccagggtgggggtgaaggagacactactgcccccacccctgacagcccccaccccatggcttccatcttttgcatcaccaccactcctgaacccccatttctgatttgtcagaatttttttttaacaaaactaaaaatgaaacacatgtgtctgtggtatctataa

SEQ ID NO: 125371 - DNA, 413 bp, Homo sapiens
  Payload ID: 4591
  Gene Symbol: DDX39B
  Gene Name: DEAD (Asp-Glu-Ala-Asp) box polypeptide 39B
  ENST ID: ENST00000455806
  CDS Start-End: 1-413
tggccacactgcaacagctggagccagttactgggcaggtgtctgtactggtgatgtgtcacactcgggagttggcttttcagatcagcaaggaatatgagcgcttctctaaatacatgcccaatgtcaaggttgctgttttttttggtggtctgtctatcaagaaggatgaagaggtgctgaagaagaactgcccgcatatcgtcgtggggactccaggccgtatcctagccctggctcgaaataagagcctcaacctcaaacacattaaacactttattttggatgaatgtgataagatgcttgaacagctcgacatgcgtcgggatgtccaggaaatttttcgcatgaccccccacgagaagcaggtcatgatgttcagtgctaccttgagcaaagagatccgtccagtc

SEQ ID NO: 125372 - DNA, 633 bp, Homo sapiens; identical to SEQ ID NO: 125312
  Payload ID: 4591
  Gene Symbol: DDX39B
  Gene Name: DEAD (Asp-Glu-Ala-Asp) box polypeptide 39B
  ENST ID: ENST00000428450
  CDS Start-End: 43-633

SEQ ID NO: 125373 - DNA, 633 bp, Homo sapiens
  Payload ID: 4591
  Gene Symbol: DDX39B
  Gene Name: DEAD (Asp-Glu-Ala-Asp) box polypeptide 39B
  ENST ID: ENST00000416183
  CDS Start-End: 43-633
cgtcgctgttgctgccgccatacgcgctctccctgtttagttatggcagagaacgatgtggacaatgagctcttggactatgaagatgatgaggtggagacagcagctgggggagatggggctgaggcccctgccaagaaggatgtcaagggctcctatgtctccatccacagctctggctttcgtgacttcctgctcaagccagagttgctccgggccattgtcgactgtggctttgagcatccgtcagaagtccagcatgagtgcatccctcaggccattctgggaatggatgtcctgtgccaggccaagtcgggcatgggaaagacagcagtgtttgtcttggccacactgcaacagctggagccagttactgggcaggtgtgtttttgtgacagtcacttccctagaggggataatgaagagctacatttaccatatgtctccgtatacttcctgcctaaggtgtctgtgctggtgatgtgtcacactcgggagttggcttttcagatcagcaaggaatatgagcgcttctctaaatacatgcccaatgtcaaggttgctgttttttttggtggtctgtctatcaagaaggatgaagaggtgctgaagaagaactgcccgcatatcgtc

SEQ ID NO: 125374 - DNA, 583 bp, Homo sapiens; identical to SEQ ID NO: 125337
  Payload ID: 4591
  Gene Symbol: DDX39B
  Gene Name: DEAD (Asp-Glu-Ala-Asp) box polypeptide 39B
  ENST ID: ENST00000449010
  CDS Start-End: 187-583

SEQ ID NO: 125375 - DNA, 192 bp, Homo sapiens
  Payload ID: 4591
  Gene Symbol: DDX39B
  Gene Name: DEAD (Asp-Glu-Ala-Asp) box polypeptide 39B
  ENST ID: ENST00000433789
  CDS Start-End: 1-192
tggccacactgcaacagctggagccagttactgggcaggtgtctgtactggtgatgtgtcacactcgggagttggcttttcagatcagcaaggaatatgagcgcttctctaaatacatgcccaatgtcaaggttgctgttttttttggtggtctgtctatcaagaaggatgaagaggtgctgaagaagaact

SEQ ID NO: 125376 - DNA, 1005 bp, Homo sapiens
  Payload ID: 4591
  Gene Symbol: DDX39B
  Gene Name: DEAD (Asp-Glu-Ala-Asp) box polypeptide 39B
  ENST ID: ENST00000435182
  CDS Start-End: 139-1005
ttggatttttctcaccttgacttgcccaacttaatttggagtgccttccaagtgtttacgatacgattggtgtcattgtatgtttctccaaaaggagtctcaccttcgtagcgtaacagtgatgtgagaccacttgttatggcagagaacgatgtggacaatgagctcttggactatgaagatgatgaggtggagacagcagctgggggagatggggctgaggcccctgccaagaaggatgtcaagggctcctatgtctccatccacagctctggctttcgtgacttcctgctcaagccagagttgctccgggccattgtcgactgtggctttgagcatccgtcagaagtccagcatgagtgcatccctcaggccattctgggaatggatgtcctgtgccaggccaagtcgggcatgggaaagacagcagtgtttgtcttggccacactgcaacagctggagccagttactgggcaggtgtctgtgctggtgatgtgtcacactcgggagttggcttttcagatcagcaaggaatatgagcgcttctctaaatacatgcccaatgtcaaggttgctgttttttttggtggtctgtctatcaagaaggatgaagaggtgctgaagaagaactgcccgcatatcgtcgtggggactccaggccgtatcctagccctggctcgaaataagagcctcaacctcaaacacattaaacactttattttggatgaatgtgataagatgcttgaacagctcgacatgcgtcgggatgtccaggaaatttttcgcatgaccccccacgagaagcaggtcatgatgttcagtgctaccttgagcaaagagatccgtccagtctgccgcaagttcatgcaagatccaatggagatcttcgtggatgatgagacgaagttgacgctgcatgggttgcagcagtactacgtgaaactgaaggacaacgagaagaaccggaagctctttgaccttctggatgtccttgagttcaaccag

SEQ ID NO: 125377 - DNA, 817 bp, Homo sapiens; identical to SEQ ID NO: 125336
  Payload ID: 4591
  Gene Symbol: DDX39B
  Gene Name: DEAD (Asp-Glu-Ala-Asp) box polypeptide 39B
  ENST ID: ENST00000438433
  CDS Start-End: 104-817

SEQ ID NO: 125378 - DNA, 1201 bp, Homo sapiens; identical to SEQ ID NO: 125354
  Payload ID: 4591
  Gene Symbol: DDX39B
  Gene Name: DEAD (Asp-Glu-Ala-Asp) box polypeptide 39B
  ENST ID: ENST00000426766
  CDS Start-End: 1-986

SEQ ID NO: 125379 - DNA, 561 bp, Homo sapiens; identical to SEQ ID NO: 125309
  Payload ID: 4591
  Gene Symbol: DDX39B
  Gene Name: DEAD (Asp-Glu-Ala-Asp) box polypeptide 39B
  ENST ID: ENST00000417023
  CDS Start-End: 1-561

SEQ ID NO: 125380 - DNA, 932 bp, Homo sapiens; identical to SEQ ID NO: 125316
  Payload ID: 4591
  Gene Symbol: DDX39B
  Gene Name: DEAD (Asp-Glu-Ala-Asp) box polypeptide 39B
  ENST ID: ENST00000444480
  CDS Start-End: 238-932

SEQ ID NO: 125381 - DNA, 394 bp, Homo sapiens
  Payload ID: 4591
  Gene Symbol: DDX39B
  Gene Name: DEAD (Asp-Glu-Ala-Asp) box polypeptide 39B
  ENST ID: ENST00000427652
  CDS Start-End: 1-394
tggccacactgcaacagctggagccagttactgggcaggtgtctgtactggtgatgtgtcacactcgggagttggcttttcagatcagcaaggaatatgagcgcttctctaaatacatgcccaatgtcaaggttgctgttttttttggtggtctgtctatcaagaaggatgaagaggtgctgaagaagaactgcccgcatatcgtcgtggggactccaggccgtatcctagccctggctcgaaataagagcctcaacctcaaacacattaaacactttattttggatgaatgtgataagatgcttgaacagctcgacatgcgtcgggatgtccaggaaatttttcgcatgaccccccacgagaagcaggtcatgatgttcagtgctaccttgag

SEQ ID NO: 125382 - DNA, 1005 bp, Homo sapiens; identical to SEQ ID NO: 125376
  Payload ID: 4591
  Gene Symbol: DDX39B
  Gene Name: DEAD (Asp-Glu-Ala-Asp) box polypeptide 39B
  ENST ID: ENST00000414088
  CDS Start-End: 139-1005

SEQ ID NO: 125383 - DNA, 2003 bp, Homo sapiens
  Payload ID: 4591
  Gene Symbol: DDX39B
  Gene Name: DEAD (Asp-Glu-Ala-Asp) box polypeptide 39B
  Uniprot ID: Q13838
  ENST ID: ENST00000416863
  CDS Start-End: 502-1788
ctcagctagggcctgccggttcctagtgcgtgcccagcagtcctcaggtcaccttcactaccgggccaaggaccccgtgggaactcgcagccttcgccacactcgttcctcgcgcatccacggaggggtgcctacagagaagacctgcgtggcaaaaacctaaacgaagagatgaggggcatggagaggagtaggataagagaataaagataacagtgggggggagacgttagtttcctttatatcttttgttactggaggtagcagtgaagttagaaacggttttaaaacaaatttcagacaggcattttccaaaggcaagcctggagcgcacggatctgtataaccgcggaaggccctgtttccggtcccttgcgcctgcgctcttgcagccaagaaggcgggaggctggagtagagggaagcctgcaaccggaagtgaaggcagatttccctccttcgtcgctgttgctgccgccatacgcgctctccctgtttagttatggcagagaacgatgtggacaatgagctcttggactatgaagatgatgaggtggagacagcagctgggggagatggggctgaggcccctgccaagaaggatgtcaagggctcctatgtctccatccacagctctggctttcgtgacttcctgctcaagccagagttgctccgggccattgtcgactgtggctttgagcatccgtcagaagtccagcatgagtgcatccctcaggccattctgggaatggatgtcctgtgccaggccaagtcgggcatgggaaagacagcagtgtttgtcttggccacactgcaacagctggagccagttactgggcaggtgtctgtgctggtgatgtgtcacactcgggagttggcttttcagatcagcaaggaatatgagcgcttctctaaatacatgcccaatgtcaaggttgctgttttttttggtggtctgtctatcaagaaggatgaagaggtgctgaagaagaactgcccgcatatcgtcgtggggactccaggccgtatcctagccctggctcgaaataagagcctcaacctcaaacacattaaacactttattttggatgaatgtgataagatgcttgaacagctcgacatgcgtcgggatgtccaggaaatttttcgcatgaccccccacgagaagcaggtcatgatgttcagtgctaccttgagcaaagagatccgtccagtctgccgcaagttcatgcaagatccaatggagatcttcgtggatgatgagacgaagttgacgctgcatgggttgcagcagtactacgtgaaactgaaggacaacgagaagaaccggaagctctttgaccttctggatgtccttgagttcaaccaggtggtgatctttgtgaagtctgtgcagcggtgcattgccttggcccagctactagtggagcagaacttcccagccattgccatccaccgtgggatgccccaggaggagaggctttctcggtatcagcagtttaaagattttcaacgacgaattcttgtggctaccaacctatttggccgaggcatggacatcgagcgggtgaacattgcttttaattatgacatgcctgaggattctgacacctacctgcatcgggtggccagagcaggccggtttggcaccaagggcttggctatcacatttgtgtccgatgagaatgatgccaagatcctcaatgatgtgcaggatcgctttgaggtcaatattagtgagctgcctgatgagatagacatctcctcctacattgaacagacacggtagaagactcgcccattttggaatgtgaccgtctgtccttcaggagaggacaccagggtgggggtgaaggagacactactgcccccacccctgacagcccccaccccatggcttccatcttttgcatcaccaccactcctgaacccccatttctgatttgtcagaatttttttttaacaaaactaaaaatgaaacacatgtgtctgtggtatctataa

SEQ ID NO: 125384 - DNA, 1529 bp, Homo sapiens; identical to SEQ ID NO: 125306
  Payload ID: 4591
  Gene Symbol: DDX39B
  Gene Name: DEAD (Asp-Glu-Ala-Asp) box polypeptide 39B
  ENST ID: ENST00000453488
  CDS Start-End: 5-1282

SEQ ID NO: 125385 - DNA, 591 bp, Homo sapiens; identical to SEQ ID NO: 125322
  Payload ID: 4591
  Gene Symbol: DDX39B
  Gene Name: DEAD (Asp-Glu-Ala-Asp) box polypeptide 39B
  ENST ID: ENST00000441479
  CDS Start-End: 30-591

SEQ ID NO: 125386 - DNA, 1529 bp, Homo sapiens; identical to SEQ ID NO: 125303
  Payload ID: 4591
  Gene Symbol: DDX39B
  Gene Name: DEAD (Asp-Glu-Ala-Asp) box polypeptide 39B
  ENST ID: ENST00000450987
  CDS Start-End: 5-1282

SEQ ID NO: 125387 - DNA, 914 bp, Homo sapiens; identical to SEQ ID NO: 125328
  Payload ID: 4591
  Gene Symbol: DDX39B
  Gene Name: DEAD (Asp-Glu-Ala-Asp) box polypeptide 39B
  ENST ID: ENST00000431908
  CDS Start-End: 178-914

SEQ ID NO: 125388 - DNA, 583 bp, Homo sapiens; identical to SEQ ID NO: 125337
  Payload ID: 4591
  Gene Symbol: DDX39B
  Gene Name: DEAD (Asp-Glu-Ala-Asp) box polypeptide 39B
  ENST ID: ENST00000417491
  CDS Start-End: 187-583

SEQ ID NO: 125389 - DNA, 633 bp, Homo sapiens; identical to SEQ ID NO: 125373
  Payload ID: 4591
  Gene Symbol: DDX39B
  Gene Name: DEAD (Asp-Glu-Ala-Asp) box polypeptide 39B
  ENST ID: ENST00000433291
  CDS Start-End: 43-633

SEQ ID NO: 125390 - DNA, 633 bp, Homo sapiens; identical to SEQ ID NO: 125373
  Payload ID: 4591
  Gene Symbol: DDX39B
  Gene Name: DEAD (Asp-Glu-Ala-Asp) box polypeptide 39B
  ENST ID: ENST00000432433
  CDS Start-End: 43-633

SEQ ID NO: 125391 - DNA, 290 bp, Homo sapiens
  Payload ID: 4591
  Gene Symbol: DDX39B
  Gene Name: DEAD (Asp-Glu-Ala-Asp) box polypeptide 39B
  ENST ID: ENST00000457121
  CDS Start-End: 1-290
tggccacactgcaacagctggagccagttactgggcaggtgtgtttttgtgacagtcacttccctagaggggataatgaagagctacatttaccatatgtctccgtctacttcctgcctaaggtgtctgtactggtgatgtgtcacactcgggagttggcttttcagatcagcaaggaatatgagcgcttctctaaatacatgcccaatgtcaaggttgctgttttttttggtggtctgtctatcaagaaggatgaagaggtgctgaagaagaactgcccgcatatcgtc

SEQ ID NO: 125392 - DNA, 591 bp, Homo sapiens; identical to SEQ ID NO: 125322
  Payload ID: 4591
  Gene Symbol: DDX39B
  Gene Name: DEAD (Asp-Glu-Ala-Asp) box polypeptide 39B
  ENST ID: ENST00000439691
  CDS Start-End: 30-591

SEQ ID NO: 125393 - DNA, 633 bp, Homo sapiens; identical to SEQ ID NO: 125373
  Payload ID: 4591
  Gene Symbol: DDX39B
  Gene Name: DEAD (Asp-Glu-Ala-Asp) box polypeptide 39B
  ENST ID: ENST00000442717
  CDS Start-End: 43-633

SEQ ID NO: 125394 - DNA, 928 bp, Homo sapiens; identical to SEQ ID NO: 125326
  Payload ID: 4591
  Gene Symbol: DDX39B
  Gene Name: DEAD (Asp-Glu-Ala-Asp) box polypeptide 39B
  ENST ID: ENST00000449863
  CDS Start-End: 222-928

SEQ ID NO: 125395 - DNA, 591 bp, Homo sapiens
  Payload ID: 4591
  Gene Symbol: DDX39B
  Gene Name: DEAD (Asp-Glu-Ala-Asp) box polypeptide 39B
  ENST ID: ENST00000449757
  CDS Start-End: 30-591
cattgtgttcgttttgctcccttcttccaatgggttcttctcatattggaggcctcagcatcaatgagaggcggcgctcggcgtcccttggtcttgttatggcagagaacgatgtggacaatgagctcttggactatgaagatgatgaggtggagacagcagctgggggagatggggctgaggcccctgccaagaaggatgtcaagggctcctatgtctccatccacagctctggctttcgtgacttcctgctcaagccagagttgctccgggccattgtcgactgtggctttgagcatccgtcagaagtccagcatgagtgcatccctcaggccattctgggaatggatgtcctgtgccaggccaagtcgggcatgggaaagacagcagtgtttgtcttggccacactgcaacagctggagccagttactgggcaggtgtctgtactggtgatgtgtcacactcgggagttggcttttcagatcagcaaggaatatgagcgcttctctaaatacatgcccaatgtcaaggttgctgttttttttggtggtctgtctatcaagaaggatgaagaggtgctgaagaagaact

SEQ ID NO: 125396 - DNA, 583 bp, Homo sapiens; identical to SEQ ID NO: 125323
  Payload ID: 4591
  Gene Symbol: DDX39B
  Gene Name: DEAD (Asp-Glu-Ala-Asp) box polypeptide 39B
  ENST ID: ENST00000438883
  CDS Start-End: 175-583

SEQ ID NO: 125397 - DNA, 96 bp, Homo sapiens
  Payload ID: 4591
  Gene Symbol: DDX39B
  Gene Name: DEAD (Asp-Glu-Ala-Asp) box polypeptide 39B
  ENST ID: ENST00000451465
  CDS Start-End: 1-96
tggccacactgcaacagctggagccagttactgggcaggtgtgtttttgtgacagtcacttccctagaggggataatgaagagctacatttaccat

SEQ ID NO: 125398 - DNA, 633 bp, Homo sapiens; identical to SEQ ID NO: 125373
  Payload ID: 4591
  Gene Symbol: DDX39B
  Gene Name: DEAD (Asp-Glu-Ala-Asp) box polypeptide 39B
  ENST ID: ENST00000432466
  CDS Start-End: 43-633

SEQ ID NO: 125399 - DNA, 720 bp, Homo sapiens; identical to SEQ ID NO: 125335
  Payload ID: 4591
  Gene Symbol: DDX39B
  Gene Name: DEAD (Asp-Glu-Ala-Asp) box polypeptide 39B
  ENST ID: ENST00000426189
  CDS Start-End: 345-720

SEQ ID NO: 125400 - DNA, 561 bp, Homo sapiens; identical to SEQ ID NO: 125309
  Payload ID: 4591
  Gene Symbol: DDX39B
  Gene Name: DEAD (Asp-Glu-Ala-Asp) box polypeptide 39B
  ENST ID: ENST00000445602
  CDS Start-End: 1-561

SEQ ID NO: 125401 - DNA, 1005 bp, Homo sapiens; identical to SEQ ID NO: 125376
  Payload ID: 4591
  Gene Symbol: DDX39B
  Gene Name: DEAD (Asp-Glu-Ala-Asp) box polypeptide 39B
  ENST ID: ENST00000417558
  CDS Start-End: 139-1005

SEQ ID NO: 125402 - DNA, 928 bp, Homo sapiens; identical to SEQ ID NO: 125342
  Payload ID: 4591
  Gene Symbol: DDX39B
  Gene Name: DEAD (Asp-Glu-Ala-Asp) box polypeptide 39B
  ENST ID: ENST00000419338
  CDS Start-End: 222-928

SEQ ID NO: 125403 - DNA, 914 bp, Homo sapiens; identical to SEQ ID NO: 125328
  Payload ID: 4591
  Gene Symbol: DDX39B
  Gene Name: DEAD (Asp-Glu-Ala-Asp) box polypeptide 39B
  ENST ID: ENST00000427489
  CDS Start-End: 178-914

SEQ ID NO: 125404 - DNA, 2039 bp, Homo sapiens; identical to SEQ ID NO: 125304
  Payload ID: 4591
  Gene Symbol: DDX39B
  Gene Name: DEAD (Asp-Glu-Ala-Asp) box polypeptide 39B
  Uniprot ID: Q13838
  ENST ID: ENST00000445218
  CDS Start-End: 538-1824

SEQ ID NO: 125405 - DNA, 583 bp, Homo sapiens; identical to SEQ ID NO: 125337
  Payload ID: 4591
  Gene Symbol: DDX39B
  Gene Name: DEAD (Asp-Glu-Ala-Asp) box polypeptide 39B
  ENST ID: ENST00000452414
  CDS Start-End: 187-583

SEQ ID NO: 125406 - DNA, 591 bp, Homo sapiens; identical to SEQ ID NO: 125322
  Payload ID: 4591
  Gene Symbol: DDX39B
  Gene Name: DEAD (Asp-Glu-Ala-Asp) box polypeptide 39B
  ENST ID: ENST00000442537
  CDS Start-End: 30-591

SEQ ID NO: 125407 - DNA, 932 bp, Homo sapiens; identical to SEQ ID NO: 125316
  Payload ID: 4591
  Gene Symbol: DDX39B
  Gene Name: DEAD (Asp-Glu-Ala-Asp) box polypeptide 39B
  ENST ID: ENST00000415027
  CDS Start-End: 238-932

SEQ ID NO: 125408 - DNA, 2039 bp, Homo sapiens; identical to SEQ ID NO: 125304
  Payload ID: 4591
  Gene Symbol: DDX39B
  Gene Name: DEAD (Asp-Glu-Ala-Asp) box polypeptide 39B
  Uniprot ID: Q13838
  ENST ID: ENST00000414440
  CDS Start-End: 538-1824

SEQ ID NO: 125409 - DNA, 659 bp, Homo sapiens; identical to SEQ ID NO: 125320
  Payload ID: 4591
  Gene Symbol: DDX39B
  Gene Name: DEAD (Asp-Glu-Ala-Asp) box polypeptide 39B
  ENST ID: ENST00000425047
  CDS Start-End: 373-659

SEQ ID NO: 125410 - DNA, 914 bp, Homo sapiens; identical to SEQ ID NO: 125328
  Payload ID: 4591
  Gene Symbol: DDX39B
  Gene Name: DEAD (Asp-Glu-Ala-Asp) box polypeptide 39B
  ENST ID: ENST00000448000
  CDS Start-End: 178-914

SEQ ID NO: 125411 - DNA, 914 bp, Homo sapiens; identical to SEQ ID NO: 125328
  Payload ID: 4591
  Gene Symbol: DDX39B
  Gene Name: DEAD (Asp-Glu-Ala-Asp) box polypeptide 39B
  ENST ID: ENST00000427425
  CDS Start-End: 178-914

SEQ ID NO: 125412 - DNA, 1201 bp, Homo sapiens; identical to SEQ ID NO: 125354
  Payload ID: 4591
  Gene Symbol: DDX39B
  Gene Name: DEAD (Asp-Glu-Ala-Asp) box polypeptide 39B
  ENST ID: ENST00000448800
  CDS Start-End: 1-986

SEQ ID NO: 125413 - DNA, 591 bp, Homo sapiens; identical to SEQ ID NO: 125395
  Payload ID: 4591
  Gene Symbol: DDX39B
  Gene Name: DEAD (Asp-Glu-Ala-Asp) box polypeptide 39B
  ENST ID: ENST00000417136
  CDS Start-End: 30-591

SEQ ID NO: 125414 - DNA, 1005 bp, Homo sapiens; identical to SEQ ID NO: 125376
  Payload ID: 4591
  Gene Symbol: DDX39B
  Gene Name: DEAD (Asp-Glu-Ala-Asp) box polypeptide 39B
  ENST ID: ENST00000455916
  CDS Start-End: 139-1005

SEQ ID NO: 125415 - DNA, 928 bp, Homo sapiens; identical to SEQ ID NO: 125326
  Payload ID: 4591
  Gene Symbol: DDX39B
  Gene Name: DEAD (Asp-Glu-Ala-Asp) box polypeptide 39B
  ENST ID: ENST00000416969
  CDS Start-End: 222-928

SEQ ID NO: 125416 - DNA, 659 bp, Homo sapiens; identical to SEQ ID NO: 125320
  Payload ID: 4591
  Gene Symbol: DDX39B
  Gene Name: DEAD (Asp-Glu-Ala-Asp) box polypeptide 39B
  ENST ID: ENST00000443933
  CDS Start-End: 373-659

SEQ ID NO: 125417 - DNA, 1005 bp, Homo sapiens
  Payload ID: 4591
  Gene Symbol: DDX39B
  Gene Name: DEAD (Asp-Glu-Ala-Asp) box polypeptide 39B
  ENST ID: ENST00000438449
  CDS Start-End: 139-1005
ttggatttttctcaccttgacttggccaacttaatttggagtgccttccaagtgtttacgatacgattggtgtcattgtatgtttctccaaaaggagtctcaccttcgtagcgtaacagtgatgtgagaccacttgttatggcagagaacgatgtggacaatgagctcttggactatgaagatgatgaggtggagacagcagctgggggagatggggctgaggcccctgccaagaaggatgtcaagggctcctatgtctccatccacagctctggctttcgtgacttcctgctcaagccagagttgctccgggccattgtcgactgtggctttgagcatccgtcagaagtccagcatgagtgcatccctcaggccattctgggaatggatgtcctgtgccaggccaagtcgggcatgggaaagacagcagtgtttgtcttggccacactgcaacagctggagccagttactgggcaggtgtctgtgctggtgatgtgtcacactcgggagttggcttttcagatcagcaaggaatatgagcgcttctctaaatacatgcccaatgtcaaggttgctgttttttttggtggtctgtctatcaagaaggatgaagaggtgctgaagaagaactgcccgcatatcgtcgtggggactccaggccgtatcctagccctggctcgaaataagagcctcaacctcaaacacattaaacactttattttggatgaatgtgataagatgcttgaacagctcgacatgcgtcgggatgtccaggaaatttttcgcatgaccccccacgagaagcaggtcatgatgttcagtgctaccttgagcaaagagatccgtccagtctgccgcaagttcatgcaagatccaatggagatcttcgtggatgatgagacgaagttgacgctgcatgggttgcagcagtactacgtgaaactgaaggacaacgagaagaaccggaagctctttgaccttctggatgtccttgagttcaaccag

SEQ ID NO: 125418 - DNA, 583 bp, Homo sapiens; identical to SEQ ID NO: 125323
  Payload ID: 4591
  Gene Symbol: DDX39B
  Gene Name: DEAD (Asp-Glu-Ala-Asp) box polypeptide 39B
  ENST ID: ENST00000448658
  CDS Start-End: 175-583

SEQ ID NO: 125419 - DNA, 914 bp, Homo sapiens; identical to SEQ ID NO: 125328
  Payload ID: 4591
  Gene Symbol: DDX39B
  Gene Name: DEAD (Asp-Glu-Ala-Asp) box polypeptide 39B
  ENST ID: ENST00000446328
  CDS Start-End: 178-914

SEQ ID NO: 125420 - DNA, 932 bp, Homo sapiens; identical to SEQ ID NO: 125316
  Payload ID: 4591
  Gene Symbol: DDX39B
  Gene Name: DEAD (Asp-Glu-Ala-Asp) box polypeptide 39B
  ENST ID: ENST00000432189
  CDS Start-End: 238-932

SEQ ID NO: 125421 - DNA, 1224 bp, Homo sapiens
  Payload ID: 4591
  Gene Symbol: DDX39B
  Gene Name: DEAD (Asp-Glu-Ala-Asp) box polypeptide 39B
  ENST ID: ENST00000437943
  CDS Start-End: 1-977
tggccacactgcaacagctggagccagttactgggcaggtgtctgtactggtgatgtgtcacactcgggagttggcttttcagatcagcaaggaatatgagcgcttctctaaatacatgcccaatgtcaaggttgctgttttttttggtggtctgtctatcaagaaggatgaagaggtgctgaagaagaactgcccgcatatcgtcgtggggactccaggccgtatcctagccctggctcgaaataagagcctcaacctcaaacacattaaacactttattttggatgaatgtgataagatgcttgaacagctcgacatgcgtcgggatgtccaggaaatttttcgcatgaccccccacgagaagcaggtcatgatgttcagtgctaccttgagcaaagagatccgtccagtctgccgcaagttcatgcaagatccaatggagatcttcgtggatgatgagacgaagttgacgctgcatgggttgcagcagtactacgtgaaactgaaggacaacgagaagaaccggaagctctttgaccttctggatgtccttgagttcaaccaggtggtgatctttgtgaagtctgtgcagcggtgcattgccttggcccagctactagtggagcagaacttcccagccattgccatccaccgtgggatgccccaggaggagaggctttctcggtatcagcagtttaaagattttcaacgacgaattcttgtggctaccaacctatttggccgaggcatggacatcgagcgggtgaacattgcttttaattatgacatgcctgaggattctgacacctacctgcatcggtgctaccctctgtctccctccaggtggccagagcaggccggtttggcaccaagggcttggctatcacatttgtgtccgatgagaatgatgccaagatcctcaatgatgtgcaggatcgctttgaggtcaatattagtgagctgcctgatgagatagacatctcctcctacattgaacagacacggtagaagactcgcccattttggaatgtgaccgtctgtccttcaggagaggacaccagggtgggggtgaaggagacactactgcccccacccctgacagcccccaccccatggcttccatcttttgcatcaccaccactcctgaacccccatttctgatttgtcagaatttttttttaacaaaactaaaaatgaaacacatgtgtctgtggtatctataa

SEQ ID NO: 125422 - DNA, 2003 bp, Homo sapiens; identical to SEQ ID NO: 125364
  Payload ID: 4591
  Gene Symbol: DDX39B
  Gene Name: DEAD (Asp-Glu-Ala-Asp) box polypeptide 39B
  Uniprot ID: Q13838
  ENST ID: ENST00000458640
  CDS Start-End: 502-1788

SEQ ID NO: 125423 - DNA, 932 bp, Homo sapiens; identical to SEQ ID NO: 125365
  Payload ID: 4591
  Gene Symbol: DDX39B
  Gene Name: DEAD (Asp-Glu-Ala-Asp) box polypeptide 39B
  ENST ID: ENST00000456662
  CDS Start-End: 238-932

SEQ ID NO: 125424 - DNA, 539 bp, Homo sapiens
  Payload ID: 4591
  Gene Symbol: DDX39B
  Gene Name: DEAD (Asp-Glu-Ala-Asp) box polypeptide 39B
  ENST ID: ENST00000432549
  CDS Start-End: 1-539
gttgctgttttttttggtggtctgtctatcaagaaggatgaagaggtgctgaagaagaactgcccgcatatcgtcgtggggactccaggccgtatcctagccctggctcgaaataagagcctcaacctcaaacacattaaacactttattttggatgaatgtgataagatgcttgaacagctcgacatgcgtcgggatgtccaggaaatttttcgcatgaccccccacgagaagcaggtcatgatgttcagtgctaccttgagcaaagagatccgtccagtctgccgcaagttcatgcaagatccaatggagatcttcgtggatgatgagacgaagttgacgctgcatgggttgcagcagtactacgtgaaactgaaggacaacgagaagaaccggaagctctttgaccttctggatgtccttgagttcaaccaggtggtgatctttgtgaagtctgtgcagcggtgcattgccttggcccagctactagtggagcagaacttcccagccattgccatccaccgtgggatgccccagga

SEQ ID NO: 125425 - DNA, 928 bp, Homo sapiens; identical to SEQ ID NO: 125326
  Payload ID: 4591
  Gene Symbol: DDX39B
  Gene Name: DEAD (Asp-Glu-Ala-Asp) box polypeptide 39B
  ENST ID: ENST00000446909
  CDS Start-End: 222-928

SEQ ID NO: 125426 - DNA, 583 bp, Homo sapiens; identical to SEQ ID NO: 125323
  Payload ID: 4591
  Gene Symbol: DDX39B
  Gene Name: DEAD (Asp-Glu-Ala-Asp) box polypeptide 39B
  ENST ID: ENST00000418760
  CDS Start-End: 175-583

SEQ ID NO: 125427 - DNA, 857 bp, Homo sapiens
  Payload ID: 4591
  Gene Symbol: DDX39B
  Gene Name: DEAD (Asp-Glu-Ala-Asp) box polypeptide 39B
  ENST ID: ENST00000493350
  CDS Start-End: 1-424
ggatgtccaggaaatttttcgcatgaccccccacgagaagcaggtcatgatgttcagtgctaccttgagcaaagagatccgtccagtctgccgcaagttcatgcaagatccaatggagatcttcgtggatgatgagacgaagttgacgctgcatgggttgcagcagtactacgtgaaactgaaggacaacgagaagaaccggaagctctttgaccttctggatgtccttgagttcaaccaggtggtgatctttgtgaagtctgtgcagcggtgcattgccttggcccagctactagtggagcagaacttcccagccattgccatccaccgtgggatgccccaggaggagagtttaaagattttcaacgacgaattcttgtggctaccaacctatttggccgaggcatggacatcgagcgggtgaacattgcttttaattatgacatgcctgaggattctgacacctacctgcatcgggtggccagagcaggccggtttggcaccaagggcttggctatcacatttgtgtccgatgagaatgatgccaagatcctcaatgatgtgcaggatcgctttgaggtcaatattagtgagctgcctgatgagatagacatctcctcctacattgaacagacacggtagaagactcgcccattttggaatgtgaccgtctgtccttcaggagaggacaccagggtgggggtgaaggagacactactgcccccacccctgacagcccccaccccatggcttccatcttttgcatcaccaccactcctgaacccccatttctgatttgtcagaatttttttttaacaaaactaaaaatgaaacacatgtgtctgtggtatctataa

SEQ ID NO: 125428 - DNA, 857 bp, Homo sapiens; identical to SEQ ID NO: 125427
  Payload ID: 4591
  Gene Symbol: DDX39B
  Gene Name: DEAD (Asp-Glu-Ala-Asp) box polypeptide 39B
  ENST ID: ENST00000464411
  CDS Start-End: 1-424

SEQ ID NO: 125429 - DNA, 857 bp, Homo sapiens; identical to SEQ ID NO: 125427
  Payload ID: 4591
  Gene Symbol: DDX39B
  Gene Name: DEAD (Asp-Glu-Ala-Asp) box polypeptide 39B
  ENST ID: ENST00000482080
  CDS Start-End: 1-424

SEQ ID NO: 125430 - DNA, 857 bp, Homo sapiens; identical to SEQ ID NO: 125427
  Payload ID: 4591
  Gene Symbol: DDX39B
  Gene Name: DEAD (Asp-Glu-Ala-Asp) box polypeptide 39B
  ENST ID: ENST00000484344
  CDS Start-End: 1-424

SEQ ID NO: 125431 - DNA, 857 bp, Homo sapiens; identical to SEQ ID NO: 125427
  Payload ID: 4591
  Gene Symbol: DDX39B
  Gene Name: DEAD (Asp-Glu-Ala-Asp) box polypeptide 39B
  ENST ID: ENST00000495997
  CDS Start-End: 1-424

SEQ ID NO: 125432 - DNA, 857 bp, Homo sapiens; identical to SEQ ID NO: 125427
  Payload ID: 4591
  Gene Symbol: DDX39B
  Gene Name: DEAD (Asp-Glu-Ala-Asp) box polypeptide 39B
  ENST ID: ENST00000497007
  CDS Start-End: 1-424

SEQ ID NO: 125433 - DNA, 857 bp, Homo sapiens; identical to SEQ ID NO: 125427
  Payload ID: 4591
  Gene Symbol: DDX39B
  Gene Name: DEAD (Asp-Glu-Ala-Asp) box polypeptide 39B
  ENST ID: ENST00000493860
  CDS Start-End: 1-424

SEQ ID NO: 125434 - DNA, 857 bp, Homo sapiens; identical to SEQ ID NO: 125427
  Payload ID: 4591
  Gene Symbol: DDX39B
  Gene Name: DEAD (Asp-Glu-Ala-Asp) box polypeptide 39B
  ENST ID: ENST00000484566
  CDS Start-End: 1-424

SEQ ID NO: 125435 - DNA, 1210 bp, Homo sapiens
  Payload ID: 4591
  Gene Symbol: DDX39B
  Gene Name: DEAD (Asp-Glu-Ala-Asp) box polypeptide 39B
  ENST ID: ENST00000467694
  CDS Start-End: 468-1210
gtcaccttcactaccgggccaaggaccccgtgggaactcgcagccttcgccacactcgttcctcgcgcatccacggaggggtgcctacagagaagacctgcgtggcaaaaacctaaacgaagagatgaggggcatggagaggagtaggataagagaataaagataacagtgggggggagacgttagtttcctttatatcttttgttactggcggtagcagtgaagttagaaacggttttaaaacaaatttcagacaggcattttccaaaggcaagcctggagcgcacggatctgtataaccgcggaaggccctgtttccggtcccttgcgcctgcgctcttgcagccaagaaggcgggaggctggagtagagggaagcctgcaaccggaagtgaaggcacatttccctccttcgtcgctgttgctgccgccatacgcgctctccctgtttagttatggcagagaacgatgtggacaatgagctcttggactatgaagatgatgaggtggagacagcagctgggggagatggggctgaggcccctgccaagaaggatgtcaagggctcctatgtctccatccacagctctggctttcgtgacttcctgctcaagccagagttgctccgggccattgtcgactgtggctttgagcatccgtcagaaggttgctgttttttttggtggtctgtctatcaagaaggatgaagaggtgctgaagaagaactgcccgcatatcgtcgtggggactccaggccgtatcctagccctggctcgaaataagagcctcaacctcaaacacattaaacactttattttggatgaatgtgataagatgcttgaacagctcgacatgcgtcgggatgtccaggaaatttttcgcatgaccccccacgagaagcaggtcatgatgttcagtgctaccttgagcaaagagatccgtccagtctgccgcaagttcatgcaagatccaatggagatcttcgtggatgatgagacgaagttgacgctgcatgggttgcagcagtactacgtgaaactgaaggacaacgagaagaaccggaagctctttgaccttctggatgtccttgagttcaaccaggtggtgatctttgtgaagtctgtgcagcggtgcattgccttggcccagctactagtggagcagaacttcccagccattgccatccaccgtgggatgccccaggaggagag

SEQ ID NO: 125436 - DNA, 2778 bp, Homo sapiens
  Payload ID: 4592
  Gene Symbol: DDX4
  Gene Name: DEAD (Asp-Glu-Ala-Asp) box polypeptide 4
  Uniprot ID: Q9NQI0
  ENST ID: ENST00000353507
  CDS Start-End: 100-2172
acctgacgcagtgggcgtcttgcacgtgcagccgtttaagtcgcgtgggcgcctgcgagggcttgggagagcaagccgcggagagaacttgaagccaccatgggagatgaagattgggaagcagaaatcaaccctcatatgtcttcctatgttcccatatttgagaaggataggtattctggagaaaatggagacaattttaacaggactccagcttcatcatcagaaatggatgatggaccttctcgaagagatcatttcatgaaaagtggatttgcctctgggcggaattttggaaacagagatgctggtgagtgtaataagcgagataatacatccacaatgggtggttttggagttggaaagagttttggaaacagaggtttttcaaacagcaggtttgaagatggtgatagctctggtttctggagagagtctagtaatgactgcgaagataatccaacacggaacagagggttttccaagagaggcgataatgacttagacccagacgaatgtatgcagcgcactggtggcctttttggttctagaagaccagtattaagtggcacaggtaatggtgatacttctcaaagcagaagtggcagtggaagtgaacgaggtggttacaaaggtttaaatgaagaagtaataacaggctctggaaagaattcttggaagtcagaagcagaaggaggagaaagtagtgatactcaaggaccaaaagtgacctacataccccctcctccacctgaggatgaggactccatctttgcacattatcagacaggcataaacttcgacaaatacgacactattcttgtggaagtgtctggacatgatgcaccaccagcaattctgacttttgaagaagctaatctctgtcagacactgaataacaacattgctaaagctggttatactaagcttactcctgtgcaaaaatacagtattcctatcatacttgcaggacgagatttgatggcttgcgctcaaacagggtctgggaagactgcggcttttctcctaccaattttggctcatatgatgcatgatggaataactgccagtcgttttaaagagttgcaggaaccagagtgtattattgtagcaccaactcgagaattggtcaaccagatttatttggaagccagaaaattttcttttgggacttgtgtaagagctgttgttatatatgggggaacccagctgggacattcaattcgacaaatagtacaaggctgtaatatattatgtgctactcctggaagactgatggatatcataggcaaagaaaagattggtctcaaacagatcaaatacttagttttggatgaagctgatcgcatgttggatatgggttttggtccagaaatgaagaagttaatttcttgcccaggaatgccatcaaaggaacagcgccaaacccttatgttcagtgcaacttttccagaggaaattcaaaggttggctgcagagtttttaaagtcaaattatctgtttgttgctgttggacaagtgggtggagcatgtagagatgttcagcagaccgttctccaagttggccagttctcaaaaagagaaaagctcgttgaaattctgcgaaacataggggatgaaagaactatggtctttgttgaaactaagaaaaaagcagattttattgcaacttttctttgtcaagaaaaaatatcaactacaagtattcatggtgatcgggaacagagagagcgggagcaagctcttggagattttcgctttggaaagtgcccagttcttgttgctacttcagtagctgccagagggctggatattgaaaatgtgcaacatgttatcaattttgatcttccttctaccattgatgaatatgttcatcgaattgggcgtactggtcgttgtgggaatactggcagagcaatttccttttttgatcttgaatcggataaccatttagcacagcctctagtaaaagtattgacagatgctcaacaggatgttcctgcatggttggaagaaattgcctttagtacatacattcctggcttcagtggtagtacaagaggaaacgtgtttgcatcagttgataccagaaagggcaagagcactttgaacacagctgggttttcttcttcacaagctcccaatccagtagatgatgagtcatgggattaaagccaaaacatccttcaagtctgtggttttgatgcagagaagaaaatagttttgatttttgagtttttaacagaagtataaaacttaacattctcatagctcctgtccttgtattctcactcctacacttaaaaaaaaaatccttactgactagttatgtgagatgctaaaacttacaacattgcagttactgatacaaatggtgttaactgggaatattaaagcattctaaatgtctttcttatttctggtatattctttagggggcttagacatgtttaatgtttaaatgccaagtcttactatagtgtttattgatcttataaaacaagcaaataggatatgatacacttttggttaaaaattactgggtctcatttttacttgagtctttaaaacagtagtgtgtcactataatgtgataatctttaagagaaagtagaatacttaagcctttcaaagtgattttgatttttagatcatcagatgtatgatgaaaatggttaaatgtttgtgatgggagctctgtactcaatggcataacaatgtttatttttataatatacaatctttccttgaaataaaggatgaaacacttttccctta

SEQ ID NO: 125437 - DNA, 2324 bp, Homo sapiens
  Payload ID: 4592
  Gene Symbol: DDX4
  Gene Name: DEAD (Asp-Glu-Ala-Asp) box polypeptide 4
  Uniprot ID: Q9NQI0
  ENST ID: ENST00000354991
  CDS Start-End: 15-2087
aacttgaagccaccatgggagatgaagattgggaagcagaaatcaaccctcatatgtcttcctatgttcccatatttgagaaggataggtattctggagaaaatggagacaattttaacaggactccagcttcatcatcagaaatggatgatggaccttctcgaagagatcatttcatgaaaagtggatttgcctctgggcggaattttggaaacagagatgctggtgagtgtaataagcgagataatacatccacaatgggtggttttggagttggaaagagttttggaaacagaggtttttcaaacagcaggtttgaagatggtgatagctctggtttctggagagagtctagtaatgactgcgaagataatccaacacggaacagagggttttccaagagaggcgataatgacttagacccagacgaatgtatgcagcgcactggtggcctttttggttctagaagaccagtattaagtggcacaggtaatggtgatacttctcaaagcagaagtggcagtggaagtgaacgaggtggttacaaaggtttaaatgaagaagtaataacaggctctggaaagaattcttggaagtcagaagcagaaggaggagaaagtagtgatactcaaggaccaaaagtgacctacataccccctcctccacctgaggatgaggactccatctttgcacattatcagacaggcataaacttcgacaaatacgacactattcttgtggaagtgtctggacatgatgcaccaccagcaattctgacttttgaagaagctaatctctgtcagacactgaataacaacattgctaaagctggttatactaagcttactcctgtgcaaaaatacagtattcctatcatacttgcaggacgagatttgatggcttgcgctcaaacagggtctgggaagactgcggcttttctcctaccaattttggctcatatgatgcatgatggaataactgccagtcgttttaaagagttgcaggaaccagagtgtattattgtagcaccaactcgagaattggtcaaccagatttatttggaagccagaaaattttcttttgggacttgtgtaagagctgttgttatatatgggggaacccagctgggacattcaattcgacaaatagtacaaggctgtaatatattatgtgctactcctggaagactgatggatatcataggcaaagaaaagattggtctcaaacagatcaaatacttagttttggatgaagctgatcgcatgttggatatgggttttggtccagaaatgaagaagttaatttcttgcccaggaatgccatcaaaggaacagcgccaaacccttatgttcagtgcaacttttccagaggaaattcaaaggttggctgcagagtttttaaagtcaaattatctgtttgttgctgttggacaagtgggtggagcatgtagagatgttcagcagaccgttctccaagttggccagttctcaaaaagagaaaagctcgttgaaattctgcgaaacataggggatgaaagaactatggtctttgttgaaactaagaaaaaagcagattttattgcaacttttctttgtcaagaaaaaatatcaactacaagtattcatggtgatcgggaacagagagagcgggagcaagctcttggagattttcgctttggaaagtgcccagttcttgttgctacttcagtagctgccagagggctggatattgaaaatgtgcaacatgttatcaattttgatcttccttctaccattgatgaatatgttcatcgaattgggcgtactggtcgttgtgggaatactggcagagcaatttccttttttgatcttgaatcggataaccatttagcacagcctctagtaaaagtattgacagatgctcaacaggatgttcctgcatggttggaagaaattgcctttagtacatacattcctggcttcagtggtagtacaagaggaaacgtgtttgcatcagttgataccagaaagggcaagagcactttgaacacagctgggttttcttcttcacaagctcccaatccagtagatgatgagtcatgggattaaagccaaaacatccttcaagtctgtggttttgatgcagagaagaaaatagttttgatttttgagtttttaacagaagtataaaacttaacattctcatagctcctgtccttgtattctcactcctacacttaaaaaaaaaatccttactgactagttatgtgagatgctaaaacttacaacattgcagttactgatacaaatggtgttaactgggaatattaaagcattctaaatgtc

SEQ ID NO: 125438 - DNA, 567 bp, Homo sapiens
  Payload ID: 4592
  Gene Symbol: DDX4
  Gene Name: DEAD (Asp-Glu-Ala-Asp) box polypeptide 4
  ENST ID: ENST00000506848
  CDS Start-End: 251-567
agtgggccgcttttctacgggaactggcctgaactcggccgtacgggctccccagtaaccgacctttggccaaagtgtggatggagtaggaggagttttgaagccgtccttcgaagcctttctgcctcggggtctcagagtcccacgggtgcccaaagtctgggcttgaggcctgcagaggaggcgaaggggccttattcctggcttcttcactgcgttttctctgaacagacatgaacttgaagccaccatgggagatgaagattgggaagcagaaatcaaccctcatatgtcttcctatgttcccatatttgagaaggataggtattctggagaaaatggagacaattttaacaggactccagcttcatcatcagaaatggatgatggaccttctcgaagagatcatttcatgaaaagtggatttgcctctgggcggaattttggaaacagagatgctggtgagtgtaataagcgagataatacatccacaatgggtggttttggagttggaaagagttttggaaacagaggtttttcaaacagcaggtttgaagatggtgatag

SEQ ID NO: 125439 - DNA, 1684 bp, Homo sapiens
  Payload ID: 4592
  Gene Symbol: DDX4
  Gene Name: DEAD (Asp-Glu-Ala-Asp) box polypeptide 4
  ENST ID: ENST00000503129
  CDS Start-End: 1-917
gtttttcaaacagcaggtttgaagatggtgatagctctggtttctggagagagtctagtaatgactgcgaagataatccaacacggaacagagggttttccaagagaggcggctatcgagatggaaataattcagaagcttcagggccatacagaagaggtggaagaggtagtttccgaggttgccgtggaggatttggtctaggaagtccaaataatgacttagacccagacgaatgtatgcagcgcactggtggcctttttggttctagaagaccagtattaagtggcacaggtaatggtgatacttctcaaagcagaagtggcagtggaagtgaacgaggtggttacaaaggtttaaatgaagaagtaataacaggctctggaaagaattcttggaagtcagaagcagaaggaggagaaagtagtgatactcaaggaccaaaagtgacctacataccccctcctccacctgaggatgaggactccatctttgcacattatcagacaggcataaacttcgacaaatacgacactattcttgtggaagtgtctggacatgatgcaccaccagcaattctgacttttgaagaagctaatctctgtcagacactgaataacaacattgctaaagctggttatactaagcttactcctgtgcaaaaatacagtattcctatcatacttgcaggacgagatttgatggcttgcgctcaaacagggtctgggaagactgcggcttttctcctaccaattttggctcatatgatgcatgatggaataactgccagtcgttttaaagagttgcaggaaccagagtgtattattgtagcaccaactcgagaattggtcaaccagatttatttggaagccagaaaattttcttttggattggtctcaaacagatcaaatacttagttttggatgaagctgatcgcatgttggatatgggttttggtccagaaatgaagaagttaatttcttgcccaggaatgccatcaaaggaacagcgccaaacccttatgttcagtgcaacttttccagaggaaattcaaaggttggctgcagagtttttaaagtcaaattatctgtttgttgctgttggacaagtgggtggagcatgtagagatgttcagcagaccgttctccaagttggccagttctcaaaaagagaaaagctcgttgaaattctgcgaaacataggggatgaaagaactatggtctttgttgaaactaagaaaaaagcagattttattgcaacttttctttgtcaagaaaaaatatcaactacaagtattcatggtgatcgggaacagagagagcgggagcaagctcttggagattttcgctttggaaagtgcccagttcttgttgctacttcagtagctgccagagggctggatattgaaaatgtgcaacatgttatcaattttgatcttccttctaccattgatgaatatgttcatcgaattgggcgtactggtcgttgtgggaatactggcagagcaatttccttttttgatcttgaatcggataaccatttagcacagcctctagtaaaagtattgacagatgctcaacaggatgttcctgcatggttggaagaaattgcctttagtacatacattcctggcttcagtggtagtacaagaggaaacgtgtttgcatcagttgataccagaaag

SEQ ID NO: 125440 - DNA, 1984 bp, Homo sapiens
  Payload ID: 4592
  Gene Symbol: DDX4
  Gene Name: DEAD (Asp-Glu-Ala-Asp) box polypeptide 4
  Uniprot ID: Q9NQI0
  ENST ID: ENST00000511853
  CDS Start-End: 20-1747
agaataaacatttctgggaatggggtctaggaatttatttttaaccaactctccagagtctagtaatgactgcgaagataatccaacacggaacagagggttttccaagagaggcgataatgacttagacccagacgaatgtatgcagcgcactggtggcctttttggttctagaagaccagtattaagtggcacaggtaatggtgatacttctcaaagcagaagtggcagtggaagtgaacgagattcttggaagtcagaagcagaaggaggagaaagtagtgatactcaaggaccaaaagtgacctacataccccctcctccacctgaggatgaggactccatctttgcacattatcagacaggcataaacttcgacaaatacgacactattcttgtggaagtgtctggacatgatgcaccaccagcaattctgacttttgaagaagctaatctctgtcagacactgaataacaacattgctaaagctggttatactaagcttactcctgtgcaaaaatacagtattcctatcatacttgcaggacgagatttgatggcttgcgctcaaacagggtctgggaagactgcggcttttctcctaccaattttggctcatatgatgcatgatggaataactgccagtcgttttaaagagttgcaggaaccagagtgtattattgtagcaccaactcgagaattggtcaaccagatttatttggaagccagaaaattttcttttgggacttgtgtaagagctgttgttatatatgggggaacccagctgggacattcaattcgacaaatagtacaaggctgtaatatattatgtgctactcctggaagactgatggatatcataggcaaagaaaagattggtctcaaacagatcaaatacttagttttggatgaagctgatcgcatgttggatatgggttttggtccagaaatgaagaagttaatttcttgcccaggaatgccatcaaaggaacagcgccaaacccttatgttcagtgcaacttttccagaggaaattcaaaggttggctgcagagtttttaaagtcaaattatctgtttgttgctgttggacaagtgggtggagcatgtagagatgttcagcagaccgttctccaagttggccagttctcaaaaagagaaaagctcgttgaaattctgcgaaacataggggatgaaagaactatggtctttgttgaaactaagaaaaaagcagattttattgcaacttttctttgtcaagaaaaaatatcaactacaagtattcatggtgatcgggaacagagagagcgggagcaagctcttggagattttcgctttggaaagtgcccagttcttgttgctacttcagtagctgccagagggctggatattgaaaatgtgcaacatgttatcaattttgatcttccttctaccattgatgaatatgttcatcgaattgggcgtactggtcgttgtgggaatactggcagagcaatttccttttttgatcttgaatcggataaccatttagcacagcctctagtaaaagtattgacagatgctcaacaggatgttcctgcatggttggaagaaattgcctttagtacatacattcctggcttcagtggtagtacaagaggaaacgtgtttgcatcagttgataccagaaagggcaagagcactttgaacacagctgggttttcttcttcacaagctcccaatccagtagatgatgagtcatgggattaaagccaaaacatccttcaagtctgtggttttgatgcagagaagaaaatagttttgatttttgagtttttaacagaagtataaaacttaacattctcatagctcctgtccttgtattctcactcctacacttaaaaaaaaaatccttactgactagttatgtgagatgctaaaacttacaacattgcagttactgatacaaatggtgttaactgggaatattaaagcattctaaatgtc

SEQ ID NO: 125441 - DNA, 566 bp, Homo sapiens
  Payload ID: 4592
  Gene Symbol: DDX4
  Gene Name: DEAD (Asp-Glu-Ala-Asp) box polypeptide 4
  ENST ID: ENST00000514679
  CDS Start-End: 90-566
ttttctacgggaactggcctgaactcggccgtacgggctccccagtaaccgacctttggccaaagtgtggatggaaacttgaagccaccatgggagatgaagattgggaagcagaaatcaaccctcatatgtcttcctatgttcccatatttgagaaggataggtattctggagaaaatggagacaattttaacaggactccagcttcatcatcagaaatggatgatggaccttctcgaagagatcatttcatgaaaagtggatttgcctctgggcggaattttggaaacagagatgctggtgagtgtaataagcgagataatacatccacaatgggtggttttggagttggaaagagttttggaaacagaggtttttcaaacagcaggtttgaagatggtgatagctctggtttctggagagagtctagtaatgactgcgaagataatccaacacggaacagagggttttccaagagaggcggctatcgagatggaaataattcagaagcttcagggccatacagaagaggtggaagaggtagtttccgaggttgccgtggagga

SEQ ID NO: 125442 - DNA, 470 bp, Homo sapiens
  Payload ID: 4592
  Gene Symbol: DDX4
  Gene Name: DEAD (Asp-Glu-Ala-Asp) box polypeptide 4
  ENST ID: ENST00000515709
  CDS Start-End: 44-470
gagggcttgggagagcaagccgcggagagaacttgaagccaccatgggagatgaagattgggaagcagaaatcaaccctcatatgtcttcctatgttcccatatttgagaaggataggtattctggagaaaatggagacaattttaacaggactccagcttcatcatcagatgctggtgagtgtaataagcgagataatacatccacaatgggtggttttggagttggaaagagttttggaaacagaggtttttcaaacagcaggtttgaagatggtgatagctctggtttctggagagagtctagtaatgactgcgaagataatccaacacggaacagagggttttccaagagaggcggctatcgagatggaaataattcagaagcttcagggccatacagaagaggtggaagaggtagtttccgaggttgccgtggaggatttggtctaggaagtccaaataatgact

SEQ ID NO: 125443 - DNA, 2884 bp, Homo sapiens
  Payload ID: 4592
  Gene Symbol: DDX4
  Gene Name: DEAD (Asp-Glu-Ala-Asp) box polypeptide 4
  Uniprot ID: Q9NQI0
  ENST ID: ENST00000505374
  CDS Start-End: 93-2267
gcagtgggcgtcttgcacgtgcagccgtttaagtcgcgtgggcgcctgcgagggcttgggagagcaagccgcggagagaacttgaagccaccatgggagatgaagattgggaagcagaaatcaaccctcatatgtcttcctatgttcccatatttgagaaggataggtattctggagaaaatggagacaattttaacaggactccagcttcatcatcagaaatggatgatggaccttctcgaagagatcatttcatgaaaagtggatttgcctctgggcggaattttggaaacagagatgctggtgagtgtaataagcgagataatacatccacaatgggtggttttggagttggaaagagttttggaaacagaggtttttcaaacagcaggtttgaagatggtgatagctctggtttctggagagagtctagtaatgactgcgaagataatccaacacggaacagagggttttccaagagaggcggctatcgagatggaaataattcagaagcttcagggccatacagaagaggtggaagaggtagtttccgaggttgccgtggaggatttggtctaggaagtccaaataatgacttagacccagacgaatgtatgcagcgcactggtggcctttttggttctagaagaccagtattaagtggcacaggtaatggtgatacttctcaaagcagaagtggcagtggaagtgaacgaggtggttacaaaggtttaaatgaagaagtaataacaggctctggaaagaattcttggaagtcagaagcagaaggaggagaaagtagtgatactcaaggaccaaaagtgacctacataccccctcctccacctgaggatgaggactccatctttgcacattatcagacaggcataaacttcgacaaatacgacactattcttgtggaagtgtctggacatgatgcaccaccagcaattctgacttttgaagaagctaatctctgtcagacactgaataacaacattgctaaagctggttatactaagcttactcctgtgcaaaaatacagtattcctatcatacttgcaggacgagatttgatggcttgcgctcaaacagggtctgggaagactgcggcttttctcctaccaattttggctcatatgatgcatgatggaataactgccagtcgttttaaagagttgcaggaaccagagtgtattattgtagcaccaactcgagaattggtcaaccagatttatttggaagccagaaaattttcttttgggacttgtgtaagagctgttgttatatatgggggaacccagctgggacattcaattcgacaaatagtacaaggctgtaatatattatgtgctactcctggaagactgatggatatcataggcaaagaaaagattggtctcaaacagatcaaatacttagttttggatgaagctgatcgcatgttggatatgggttttggtccagaaatgaagaagttaatttcttgcccaggaatgccatcaaaggaacagcgccaaacccttatgttcagtgcaacttttccagaggaaattcaaaggttggctgcagagtttttaaagtcaaattatctgtttgttgctgttggacaagtgggtggagcatgtagagatgttcagcagaccgttctccaagttggccagttctcaaaaagagaaaagctcgttgaaattctgcgaaacataggggatgaaagaactatggtctttgttgaaactaagaaaaaagcagattttattgcaacttttctttgtcaagaaaaaatatcaactacaagtattcatggtgatcgggaacagagagagcgggagcaagctcttggagattttcgctttggaaagtgcccagttcttgttgctacttcagtagctgccagagggctggatattgaaaatgtgcaacatgttatcaattttgatcttccttctaccattgatgaatatgttcatcgaattgggcgtactggtcgttgtgggaatactggcagagcaatttccttttttgatcttgaatcggataaccatttagcacagcctctagtaaaagtattgacagatgctcaacaggatgttcctgcatggttggaagaaattgcctttagtacatacattcctggcttcagtggtagtacaagaggaaacgtgtttgcatcagttgataccagaaagggcaagagcactttgaacacagctgggttttcttcttcacaagctcccaatccagtagatgatgagtcatgggattaaagccaaaacatccttcaagtctgtggttttgatgcagagaagaaaatagttttgatttttgagtttttaacagaagtataaaacttaacattctcatagctcctgtccttgtattctcactcctacacttaaaaaaaaaatccttactgactagttatgtgagatgctaaaacttacaacattgcagttactgatacaaatggtgttaactgggaatattaaagcattctaaatgtctttcttatttctggtatattctttagggggcttagacatgtttaatgtttaaatgccaagtcttactatagtgtttattgatcttataaaacaagcaaataggatatgatacacttttggttaaaaattactgggtctcatttttacttgagtctttaaaacagtagtgtgtcactataatgtgataatctttaagagaaagtagaatacttaagcctttcaaagtgattttgatttttagatcatcagatgtatgatgaaaatggttaaatgtttgtgatgggagctctgtactcaatggcataacaatgtttatttttataatatacaatctttccttgaaataaaggatgaaacacttttcccttaagttttccatc

SEQ ID NO: 125444 - DNA, 2451 bp, Homo sapiens
  Payload ID: 4592
  Gene Symbol: DDX4
  Gene Name: DEAD (Asp-Glu-Ala-Asp) box polypeptide 4
  Uniprot ID: Q9NQI0
  ENST ID: ENST00000514278
  CDS Start-End: 100-2214
acctgacgcagtgggcgtcttgcacgtgcagccgtttaagtcgcgtgggcgcctgcgagggcttgggagagcaagccgcggagagaacttgaagccaccatgggagatgaagattgggaagcagaaatcaaccctcatatgtcttcctatgttcccatatttgagaaggataggtattctggagaaaatggagacaattttaacaggactccagcttcatcatcagaaatggatgatggaccttctcgaagagatcatttcatgaaaagtggatttgcctctgggcggaattttggaaacagagatgctggtgagtgtaataagcgagataatacatccacaatgggtggttttggagttggaaagagttttggaaacagaggtttttcaaacagcaggtttgaagatggtgatagctctggtttctggagaggctatcgagatggaaataattcagaagcttcagggccatacagaagaggtggaagaggtagtttccgaggttgccgtggaggatttggtctaggaagtccaaataatgacttagacccagacgaatgtatgcagcgcactggtggcctttttggttctagaagaccagtattaagtggcacaggtaatggtgatacttctcaaagcagaagtggcagtggaagtgaacgaggtggttacaaaggtttaaatgaagaagtaataacaggctctggaaagaattcttggaagtcagaagcagaaggaggagaaagtagtgatactcaaggaccaaaagtgacctacataccccctcctccacctgaggatgaggactccatctttgcacattatcagacaggcataaacttcgacaaatacgacactattcttgtggaagtgtctggacatgatgcaccaccagcaattctgacttttgaagaagctaatctctgtcagacactgaataacaacattgctaaagctggttatactaagcttactcctgtgcaaaaatacagtattcctatcatacttgcaggacgagatttgatggcttgcgctcaaacagggtctgggaagactgcggcttttctcctaccaattttggctcatatgatgcatgatggaataactgccagtcgttttaaagagttgcaggaaccagagtgtattattgtagcaccaactcgagaattggtcaaccagatttatttggaagccagaaaattttcttttgggacttgtgtaagagctgttgttatatatgggggaacccagctgggacattcaattcgacaaatagtacaaggctgtaatatattatgtgctactcctggaagactgatggatatcataggcaaagaaaagattggtctcaaacagatcaaatacttagttttggatgaagctgatcgcatgttggatatgggttttggtccagaaatgaagaagttaatttcttgcccaggaatgccatcaaaggaacagcgccaaacccttatgttcagtgcaacttttccagaggaaattcaaaggttggctgcagagtttttaaagtcaaattatctgtttgttgctgttggacaagtgggtggagcatgtagagatgttcagcagaccgttctccaagttggccagttctcaaaaagagaaaagctcgttgaaattctgcgaaacataggggatgaaagaactatggtctttgttgaaactaagaaaaaagcagattttattgcaacttttctttgtcaagaaaaaatatcaactacaagtattcatggtgatcgggaacagagagagcgggagcaagctcttggagattttcgctttggaaagtgcccagttcttgttgctacttcagtagctgccagagggctggatattgaaaatgtgcaacatgttatcaattttgatcttccttctaccattgatgaatatgttcatcgaattgggcgtactggtcgttgtgggaatactggcagagcaatttccttttttgatcttgaatcggataaccatttagcacagcctctagtaaaagtattgacagatgctcaacaggatgttcctgcatggttggaagaaattgcctttagtacatacattcctggcttcagtggtagtacaagaggaaacgtgtttgcatcagttgataccagaaagggcaagagcactttgaacacagctgggttttcttcttcacaagctcccaatccagtagatgatgagtcatgggattaaagccaaaacatccttcaagtctgtggttttgatgcagagaagaaaatagttttgatttttgagtttttaacagaagtataaaacttaacattctcatagctcctgtccttgtattctcactcctacacttaaaaaaaaaatccttactgactagttatgtgagatgctaaaacttacaacattgcagttactgatacaaatggtgttaactgggaatattaaagcattctaaatgtc

SEQ ID NO: 125445 - DNA, 1631 bp, Homo sapiens
  Payload ID: 4592
  Gene Symbol: DDX4
  Gene Name: DEAD (Asp-Glu-Ala-Asp) box polypeptide 4
  ENST ID: ENST00000506511
  CDS Start-End: 77-1631
acgtgcagccgtttaagtcgcgtgggcgcctgcgagggcttgggagagcaagccgcggagagaacttgaagccaccatgggagatgaagattgggaagcagaaatcaaccctcatatgtcttcctatgttcccatatttgagaaggataggtattctggagaaaatggagacaattttaacaggactccagcttcatcatcagaaatggatgatggaccttctcgaagagatcatttcatgaaaagtggatttgcctctgggcggaattttggaaacagagatgctggtgagtgtaataagcgagataatacatccacaatgggtggttttggagttggaaagagttttggaaacagaggtttttcaaacagcaggtttgaagatggtgatagctctggtttctggagaggctatcgagatggaaataattcagaagcttcagggccatacagaagaggtggaagaggtagtttccgaggttgccgtggaggatttggtctaggaagtccaaataatgacttagacccagacgaatgtatgcagcgcactggtggcctttttggttctagaagaccagtattaagtggcacaggtaatggtgatacttctcaaagcagaagtggcagtggaagtgaacgaggtggttacaaaggtttaaatgaagaagtaataacaggctctggaaagaattcttggaagtcagaagcagaaggaggagaaagtagtgatactcaaggaccaaaagtgacctacataccccctcctccacctgaggatgaggactccatctttgcacattatcagacaggcataaacttcgacaaatacgacactattcttgtggaagtgtctggacatgatgcaccaccagcaattctgacttttgaagaagctaatctctgtcagacactgaataacaacattgctaaagctggttatactaagcttactcctgtgcaaaaatacagtattcctatcatacttgcaggacgagatttgatggcttgcgctcaaacagggtctgggaagactgcggcttttctcctaccaattttggctcatatgatgcatgatggaataactgccagtcgttttaaagagttgcaggaaccagagtgtattattgtagcaccaactcgagaattggtcaaccagatttatttggaagccagaaaattttcttttgggacttgtgtaagagctgttgttatatatgggggaacccagctgggacattcaattcgacaaatagtacaaggctgtaatatattatgtgctactcctggaagactgatggatatcataggcaaagaaaagattggtctcaaacagatcaaatacttagttttggatgaagctgatcgcatgttggatatgggttttggtccagaaatgaagaagttaatttcttgcccaggaatgccatcaaaggaacagcgccaaacccttatgttcagtgcaacttttccagaggaaattcaaaggttggctgcagagtttttaaagtcaaattatctgtttgttgctgttggacaagtgggtggagcatgtagagatgttcagcagaccgttctccaagttggccagttctcaaaaagagaaaagctcgttgaaattctgcgaaacatag

SEQ ID NO: 125446 - DNA, 549 bp, Homo sapiens
  Payload ID: 4592
  Gene Symbol: DDX4
  Gene Name: DEAD (Asp-Glu-Ala-Asp) box polypeptide 4
  ENST ID: ENST00000511491
  CDS Start-End: 81-549
ttctcaattctaaattttaaagtgagtgtaccacctgggaatagaacagcgaaagatgtgaagttaagaaagattttataatgtggcaattatatagtccagaaatctcaaccattaggcatttgcacgttgcctgcaggcttattggggataggtattctggagaaaatggagacaattttaacaggactccagcttcatcatcagaaatggatgatggaccttctcgaagagatcatttcatgaaaagtggatttgcctctgggcggaattttggaaacagagatgctggtgagtgtaataagcgagataatacatccacaatgggtggttttggagttggaaagagttttggaaacagaggtttttcaaacagcaggtttgaagatggtgatagctctggtttctggagagagtctagtaatgactgcgaagataatccaacacggaacagagggttttccaagagaggcggctatcgagatggaaataattcagaagcttcagggccatacagaagaggtggaagaggtagtttccgaggttgcc

SEQ ID NO: 125447 - DNA, 554 bp, Homo sapiens
  Payload ID: 4592
  Gene Symbol: DDX4
  Gene Name: DEAD (Asp-Glu-Ala-Asp) box polypeptide 4
  ENST ID: ENST00000507645
  CDS Start-End: 1-152
tggggtctaggaatttatttttaaccaactctccagagtctagtaatgactgcgaagataatccaacacggaacagagggttttccaagagaggcggtaaggaccacattttggaacaatttgtacttaacacagagacactaaactggtaaaactgattttgaaggagctggatgaaaaacactgatcgtgaaaacctttgaagaaaaatactttggtatatgttttctgcttttaatatttgaataatgacttagacccagacgaatgtatgcagcgcactggtggcctttttggttctagaagaccagtattaagtggcacaggtaatggtgatacttctcaaagcagaagtggcagtggaagtgaacgaggtggttacaaaggtttaaatgaagaagtaataacaggctctggaaagaattcttggaagtcagaagcagaaggaggagaaagtagtgatactcaaggaccaaaagtgacctacataccccctcctccacctgaggatgaggactccatctttgcacattatcagacaggcataaacttcg

SEQ ID NO: 125448 - DNA, 2137 bp, Homo sapiens
  Payload ID: 4593
  Gene Symbol: DDX41
  Gene Name: DEAD (Asp-Glu-Ala-Asp) box polypeptide 41
  ENST ID: ENST00000330503
  CDS Start-End: 1-1923
aggagagaggcgagaccccgcgcgtgtgggagcgggcgtgaagaggggagcaggccgtgcctgactggcgtgtgcttgcagcgggctcgcaccgacgaggtgcctgccggaggaagccgctccgaggcggaagatgaggacgacgaggactacgtgccctatgtgccgttacggcagcgccggcagctactgctccagaagctgctgcagcgaagacgcaagggagctgcggaggaagagcagcaggacagcggtagtgaaccccggggagatgaggacgacatcccgctaggccctcagtccaacgtcagcctcctggatcagcaccagcaccttaaagagaaggctgaagcgcgcaaagagtctgccaaggagaagcagctgaaggaagaagagaagatcctggagagtgttgccgagggccgagcattgatgtcagtgaaggagatggctaagggcattacgtatgatgaccccatcaaaaccagctggactccaccccgttatgttctgagcatgtctgaagagcgacatgagcgcgtgcggaagaaataccacatcctggtggagggagacggtatcccaccacccatcaagagcttcaaggaaatgaagtttcctgcagccatcctgagaggcctgaagaagaaaggcattcaccacccaacacccattcagatccagggcatccccaccattctatctggccgtgacatgataggcatcgctttcacgggttcaggcaagacactggtgttcacgttgcccgtcatcatgttctgcctggaacaagagaagaggttacccttctcaaagcgcgaggggccctatggactcatcatctgcccctcgcgggagctggcccggcagacccatggcatcctggagtactactgccgcctgctgcaggaggacagctcaccactcctgcgctgcgccctctgcattgggggcatgtccgtgaaagagcagatggagaccatccgacacggtgtacacatgatggtggccaccccggggcgcctcatggatttgctgcagaagaagatggtcagcctagacatctgtcgctacctggccctggacgaggctgaccgcatgatcgacatgggcttcgagggtgacatccgtaccatcttctcctacttcaagggccagcgacagaccctgctcttcagtgccaccatgccgaagaagattcagaactttgctaagagtgcccttgtaaagcctgtgaccatcaatgtggggcgcgctggggctgccagcctggatgtcatccaggaggtagaatatgtgaaggaggaggccaagatggtgtacctgctcgagtgcctgcagaagacacccccgcctgtactcatctttgcagagaagaaggcagacgtggacgccatccacgagtacctgctgctcaagggggttgaggccgtagccatccatgggggcaaagaccaggaggaacggactaaggccatcgaggcattccgggagggcaagaaggatgtcctagtagccacagacgttgcctccaagggcctggacttccctgccatccagcacgtcatcaattatgacatgccagaggagattgagaactatgtacaccggattggccgcaccgggcgctcgggaaacacaggcatcgccactaccttcatcaacaaagcgtgtgatgagtcagtgctgatggacctcaaagcgctgctgctagaagccaagcagaaggtgccgcccgtgctgcaggtgctgcattgcggggatgagtccatgctggacattggaggagagcgcggctgtgccttctgcgggggcctgggtcatcggatcactgactgccccaaactcgaggctatgcagaccaagcaggtcagcaacatcggtcgcaaggactacctggcccacagctccatggacttctgagccgacagtcttcccttctctccaagaggcctcagtccccaagactgccaccagtctacacatacagcagccccctggacagaatcagcatttcagctcagctggcctgggatgggccaggctggtcctggctgcctgttccctgtgctcttcagaattactgtttttgtttccttttaccccagctgccattaaagcccaaacctctagccca

SEQ ID NO: 125449 - DNA, 776 bp, Homo sapiens
  Payload ID: 4593
  Gene Symbol: DDX41
  Gene Name: DEAD (Asp-Glu-Ala-Asp) box polypeptide 41
  ENST ID: ENST00000508279
  CDS Start-End: 1-520
tatcccaccacccatcaagagcttcaaggaaatgaagtttcctgcagccatcctgagaggcctgaagaagaaaggcattcaccacccaacacccattcagatccagggcatccccaccattctatctggccgtgacatgataggcatcgctttcacgggttcaggcaagacactggtgttcacgttgcccgtcatcatgttctgcctggaacaagagaagaggttacccttctcaaagcgcgaggggccctatggactcatcatctgcccctcgcgggagctggcccggcagacccatggcatcctggagtactactgccgcctgctgcaggaggacagctcaccactcctgcgctgcgccctctgcattgggggcatgtccgtgaaagagcagatggagaccatccgacatgctgtgcagtcctctgcagaccaccagaggccctggaccaggccctctgttcacagatgggccagaccccatcccggaggccttcctccacggacttctgagtattagggagatgcggtgtacacatgatggtggccaccccggggcgcctcatggatttgctgcagaagaagatggtcagcctagacatctgtcgctacctggccctggacgaggctgaccgcatgatcgacatgggcttcgagggtgacatccgtaccatcttctcctacttcaagggccagcgacagaccctgctcttcagtgccaccatgccgaagaagattcagaactttgctaagagtgcccttgtaaagcctgtgac

SEQ ID NO: 125450 - DNA, 2607 bp, Homo sapiens
  Payload ID: 4593
  Gene Symbol: DDX41
  Gene Name: DEAD (Asp-Glu-Ala-Asp) box polypeptide 41
  Uniprot ID: Q9UJV9
  ENST ID: ENST00000507955
  CDS Start-End: 525-2393
acacaggcgcagtcagggaggcagggtgtgtcgagcggtttatcccgcaaccccggcgtccccggcagggatgaaagcgcagggcccacgcgaactcggcccgcagctcccggccctagaggacgcactgtccgccggcaggggcgtgcccaagacgccatgctctgggagaggttgggcacctggcaggccgccccgactccggatcagctgtctccgctgcgtacgtcttcctcttccaatgggcttggattgagccttctagcgcatattccaagtcctccaatgtcccacaatgccttgcagccggtttcgccctcggtcctggcaactgtcgcgtaaccacccatgaaagcgtccatgcctcgccgtgcgatagtatctccggaacaaatttgtccctctgcgcgatccggaactccgaggtcgttcctacgcgccgtcgttcgcctcttcacatcggattgggtctcacgcaaggatgaggcggggtttcgccgtggcgcgcatgcgtgcagcaaagaatggaggagtcggaacccgaacggaagcgggctcgcaccgacgaggtgcctgccggaggaagccgctccgaggcggaagatgaggacgacgaggactacgtgccctatgtgccgttacggcagcgccggcagctactgctccagaagctgctgcagcgaagacgcaagggagctgcggaggaagagcagcaggacagcggtagtgaaccccggggagatgaggacgacatcccgctaggccctcagtccaacgtcagcctcctggatcagcaccagcaccttaaagagaaggctgaagcgcgcaaagagtctgccaaggagaagcagctgaaggaagaagagaagatcctggagagtgttgccgagggccgagcattgatgtcagtgaaggagatggctaagggcattacgtatgatgaccccatcaaaaccagctggactccaccccgttatgttctgagcatgtctgaagagcgacatgagcgcgtgcggaagaaataccacatcctggtggagggagacggtatcccaccacccatcaagagcttcaaggaaatgaagtttcctgcagccatcctgagaggcctgaagaagaaaggcattcaccacccaacacccattcagatccagggcatccccaccattctatctggccgtgacatgataggcatcgctttcacgggttcaggcaagacactggtgttcacgttgcccgtcatcatgttctgcctggaacaagagaagaggttacccttctcaaagcgcgaggggccctatggactcatcatctgcccctcgcgggagctggcccggcagacccatggcatcctggagtactactgccgcctgctgcaggaggacagctcaccactcctgcgctgcgccctctgcattgggggcatgtccgtgaaagagcagatggagaccatccgacacggtgtacacatgatggtggccaccccggggcgcctcatggatttgctgcagaagaagatggtcagcctagacatctgtcgctacctggccctggacgaggctgaccgcatgatcgacatgggcttcgagggtgacatccgtaccatcttctcctacttcaagggccagcgacagaccctgctcttcagtgccaccatgccgaagaagattcagaactttgctaagagtgcccttgtaaagcctgtgaccatcaatgtggggcgcgctggggctgccagcctggatgtcatccaggaggtagaatatgtgaaggaggaggccaagatggtgtacctgctcgagtgcctgcagaagacacccccgcctgtactcatctttgcagagaagaaggcagacgtggacgccatccacgagtacctgctgctcaagggggttgaggccgtagccatccatgggggcaaagaccaggaggaacggactaaggccatcgaggcattccgggagggcaagaaggatgtcctagtagccacagacgttgcctccaagggcctggacttccctgccatccagcacgtcatcaattatgacatgccagaggagattgagaactatgtacaccggattggccgcaccgggcgctcgggaaacacaggcatcgccactaccttcatcaacaaagcgtgtgatgagtcagtgctgatggacctcaaagcgctgctgctagaagccaagcagaaggtgccgcccgtgctgcaggtgctgcattgcggggatgagtccatgctggacattggaggagagcgcggctgtgccttctgcgggggcctgggtcatcggatcactgactgccccaaactcgaggctatgcagaccaagcaggtcagcaacatcggtcgcaaggactacctggcccacagctccatggacttctgagccgacagtcttcccttctctccaagaggcctcagtccccaagactgccaccagtctacacatacagcagccccctggacagaatcagcatttcagctcagctggcctgggatgggccaggctggtcctggctgcctgttccctgtgctcttcagaattactgtttttgtttccttttaccccagctgccattaaagcccaaacctctagccca

SEQ ID NO: 125451 - DNA, 618 bp, Homo sapiens
  Payload ID: 4593
  Gene Symbol: DDX41
  Gene Name: DEAD (Asp-Glu-Ala-Asp) box polypeptide 41
  ENST ID: ENST00000504781
  CDS Start-End: 1-381
ctggatcagcaccagcaccttaaagagaaggctgaagcgcgcaaagagtctgccaaggagaagcagctgaaggaagaagagaagatcctggagagtgttgccgagggccgagcattgatgtcagtgaaggagatggctaagggcattacgtatgatgaccccatcaaaaccagctggactccaccccgttatgttctgagcatgtctgaagagcgacatgagcgcgtgcggaagaaataccacatcctggtggagggagacggtatcccaccacccatcaagagcttcaaggaaatgaagtttcctgcagtttcatcatctgcaacttgtaggggtagtgccagttttacaggctttggggctctgagaaagtacctgtgagtcatgaagacgatgtcggttggttttcatagccatcctgagaggcctgaagaagaaaggcattcaccacccaacacccattcagatccagggcatccccaccattctatctggccgtgacatgataggcatcgctttcacgggttcaggcaagacactggtgttcacgttgcccgtcatcatgttctgcctggaacaagagaagaggttacccttctcaaagcgcgaggggcccta

SEQ ID NO: 125452 - DNA, 819 bp, Homo sapiens
  Payload ID: 4593
  Gene Symbol: DDX41
  Gene Name: DEAD (Asp-Glu-Ala-Asp) box polypeptide 41
  ENST ID: ENST00000509576
  CDS Start-End: 6-611
aaagaatggaggagtcggaacccgaacggaagcgggctcgcaccgacgaggtgcctgccggaggaagccgctccgaggcggaagatgaggacgacgaggactacgtgccctatgtgccgttacggcagcgccggcagctactgctccagaagctgctgcagcgaagacgcaagggagctgcggaggaagagcagcaggacagcggtagtgaaccccggggagatgaggacgacatcccgctaggccctcagtccaacgtcagcctcctggatcagcaccagcaccttaaagagaaggctgaagcgcgcaaagagtctgccaaggagaagcagctgaaggaagaagagaagatcctggagagtgttgccgagggccgagcattgatgtcagtgaaggagatggctaagggcattacgtatgatgaccccatcaaaaccagctggactccaccccgttatgttctgagcatgtctgaagagcgacatgagcgcgtgcggaagaaataccacatcctggtggagggagacggtatcccaccacccatcaagagcttcaaggaaatgaagtttcctgcaggggtagtgccagttttacaggctttggggctctgagaaagtacctgtgagtcatgaagacgatgtcggttggttttcatagccatcctgagaggcctgaagaagaaaggcattcaccacccaacacccattcagatccagggcatccccaccattctatctggccgtgacatgataggcatcgctttcacgggttcaggcaagacactggtgttcacgttgcccgtcatcatgttctgcctgg

SEQ ID NO: 125453 - DNA, 569 bp, Homo sapiens
  Payload ID: 4593
  Gene Symbol: DDX41
  Gene Name: DEAD (Asp-Glu-Ala-Asp) box polypeptide 41
  ENST ID: ENST00000510171
  CDS Start-End: 17-166
atgcgtgcagcaaagaatggaggagtcggaacccgaacggaagcgggctcgcaccgacgaggtgcctgccggaggaagccgctccgaggcggaagatgaggacgacgaggactacgtgccctatgtgccgttacggcagcgccggcagctactgccaggatcctgacgctgaccttgtggactccatgcccatcctatctgtggatcccgggtggaacctcagctccagaagctgctgcagcgaagacgcaagggagctgcggaggaagagcagcaggacagcggtagtgaaccccggggagatgaggacgacatcccgctaggccctcagtccaacgtcagcctcctggatcagcaccagcaccttaaagagaaggctgaagcgcgcaaagagtctgccaaggagaagcagctgaaggaagaagagaagatcctggagagtgttgccgagggccgagcattgatgtcagtgaaggagatggctaagggcattacgtatgatgaccccatcaaaaccagctggactccaccccgttatgttctgagcatgtctgaagagcgacatgagc

SEQ ID NO: 125454 - DNA, 606 bp, Homo sapiens
  Payload ID: 4593
  Gene Symbol: DDX41
  Gene Name: DEAD (Asp-Glu-Ala-Asp) box polypeptide 41
  ENST ID: ENST00000629036
  CDS Start-End: 1-606
atggaggagtcggaacccgaacggaagcgggctcgcaccgacgaggtgcctgccggaggaagccgctccgaggcggaagatgaggacgacgaggactacgtgccctatgtgccgttacggcagcgccggcagctactgctccagaagctgctgcagcgaagacgcaagggagctgcggaggaagagcagcaggacagcggtagtgaaccccggggagatgaggacgacatcccgctaggccctcagtccaacgtcagcctcctggatcagcaccagcaccttaaagagaaggctgaagcgcgcaaagagtctgccaaggagaagcagctgaaggaagaagagaagatcctggagagtgttgccgagggccgagcattgatgtcagtgaaggagatggctaagggcattacgtatgatgaccccatcaaaaccagctggactccaccccgttatgttctgagcatgtctgaagagcgacatgagcgcgtgcggaagaaataccacatcctggtggagggagacggtatcccaccacccatcaagagcttcaaggaaatgaagtttcctgcaggggtagtgccagttttacaggctttggggctctga

SEQ ID NO: 125455 - DNA, 150 bp, Homo sapiens
  Payload ID: 4593
  Gene Symbol: DDX41
  Gene Name: DEAD (Asp-Glu-Ala-Asp) box polypeptide 41
  ENST ID: ENST00000625286
  CDS Start-End: 1-150
atggaggagtcggaacccgaacggaagcgggctcgcaccgacgaggtgcctgccggaggaagccgctccgaggcggaagatgaggacgacgaggactacgtgccctatgtgccgttacggcagcgccggcagctactgccaggatcctga

SEQ ID NO: 125456 - DNA, 2513 bp, Homo sapiens
  Payload ID: 4594
  Gene Symbol: DDX43
  Gene Name: DEAD (Asp-Glu-Ala-Asp) box polypeptide 43
  Uniprot ID: Q9NXZ2
  ENST ID: ENST00000370336
  CDS Start-End: 159-2105
agtgggcgggatagagagcgtgggcgggggggctagcctcgtgcgggctccttaagtagcggctgcgtggcttccctggcacgctactcttacgacgtcacggtcaggtggtgcagagctggacggcaacgacgtcggacgcgccccttcttggaacaatgtcccaccacggaggagctcccaaggcctctacgtgggtcgttgctagtcggcgaagctcgacagtgtcccgagcgccagagaggaggccggcggaggagttgaatcgaacaggtcctgagggatatagtgtcggcagaggtggtcgctggagaggcacctctaggcccccggaggccgtggccgctggtcacgaggaactgccgctgtgttttgctttgaagagccactttgttggcgcggtaatcggtcgtggtgggtcaaaaataaagaatatacaaagtacaacaaacaccacaatccaaataatacaagaacaaccagaatcattagtcaaaatttttggcagcaaggcaatgcaaacgaaagcaaaagcagtgatagacaattttgttaaaaagctagaagaaaattacaattcagaatgcggaattgatactgcattccaaccttctgttggaaaagatggaagcacagataacaatgttgttgcaggagatcggccattgatagattgggatcaaattagagaggaaggtttgaaatggcaaaaaacaaagtgggcagatttaccaccaattaagaaaaacttttataaagagtccactgccacaagtgccatgtcaaaagtagaagcagatagttggaggaaagaaaattttaatataacgtgggatgacttgaaggatggggagaaacgacctatccccaatcctacctgcacatttgatgacgcctttcaatgttatcctgaggttatggaaaacattaaaaaggcaggttttcaaaagccaacacctattcagtcacaggcatggcccattgtgttgcaaggaatagatcttataggagtagcccagactggaacaggaaagacattgtgttatttaatgcctggatttattcatctggtccttcaacccagccttaaaggtcaaaggaatagacccggcatgttagttctaactcccactcgggaattagcacttcaagtagaaggagaatgttgcaaatattcatataaagggcttcggagtgtttgtgtatatggtggtggaaatagagatgaacaaatagaagagcttaaaaaaggtgtagatatcataattgcaactcccggaagattgaatgatctgcaaatgagtaacttcgtcaatctgaagaatataacctacttggttttagatgaagcagacaagatgttggacatgggatttgaaccccagataatgaagattttgttagatgtgcgcccagataggcagacagttatgaccagtgctacatggcctcattcagttcatcgcctcgcacaatcttatttgaaagaaccaatgattgtctatgttggtacattggatctagttgctgtaagttcagtgaagcaaaatataattgtaaccaccgaggaagagaaatggagtcacatgcaaacttttctacagagtatgtcatccacagacaaagtcattgtcttcgtttctcgaaaagctgttgcggatcacttatcaagtgacctaatacttggaaatatatcagtagagtctctgcatggagatagagaacagagagatcgggagaaagcattagagaactttaaaacaggcaaagtgagaatactaattgcaactgatctagcctctagaggacttgatgtccatgacgttacacatgtctataattttgactttccacggaatattgaagaatacgtacaccgaatagggcgcacgggaagagcagggaggactggtgtttccattacaactttgactagaaatgattggagggttgcctctgaattgattaatattctggaaagagcaaatcagagtattccagaggagcttgtatcaatggctgagaggtttaaggcacatcaacagaaaagggaaatggaaagaaaaatggaaagacctcaaggaaggcccaagaagtttcattaatgtcttctgtactagtggggtagagaattcaagattttttagaaatatagtaagacggaagtattggacatgttggcagtatgaagagaccggactgatttgactgattcttaaaataatagtgtttgaaaatatagaatccagtgttttatactttctttaataaaaatagaagtatttaaacttggaagttgtttcctggatttttattaaggagtgtagcattagaatgtttttcttttaatcttttaaactgtctcctgtaattttgctgtatgtcataaggccagtctttcagaatttaatgttcagattttgtcatggcagtgaaaaagatgttttcaaacaaagaatcagcacctgaaaaaatactgttaataaatgttcgtttctgtgataaaaagacaa

SEQ ID NO: 125457 - DNA, 3821 bp, Homo sapiens
  Payload ID: 4595
  Gene Symbol: DDX46
  Gene Name: DEAD (Asp-Glu-Ala-Asp) box polypeptide 46
  Uniprot ID: Q7L014
  ENST ID: ENST00000354283
  CDS Start-End: 136-3231
ggccgccacagctgtaggtgctgctagtgtttagcgctggtctttgccgggcgttgagggcagctcagcctccttgtttgtccggttcgcctgtgcgtggtactcaagggcaccagtattcccgcggtcggcagcatgggtcgggagtcacgccactatcgaaaacgatcggcatcccggggtcgctctggaagtcggtctagaagtcgctcaccctcagacaaaagaagtaaacgtggagatgacagacggtctagaagtagagatagagataggaggagagagaggtctcgtagcagggataaaagaagatctcggtcaagggacaggaagcgtctgagacgttccagaagtagagagagagacagaagccgagagcgaagaagatctcgaagtagagacaggagacgctcaaggagtagaagccggggccggcgatcccgatcctccagtcctggaaataaaagcaagaaaactgagaatagatctaggtccaaagagaaaactgatggtggggaaagttctaaagagaagaaaaaagacaaagatgacaaggaggatgaaaaagaaaaagatgctggcaactttgaccagaataagctggaagaagaaatgagaaagcgaaaagaaagagtagaaaaatggcgagaagagcaacgtaaaaaggctatggaaaacataggagaactgaaaaaggaaatcgaagagatgaaacaagggaaaaagtggagtttagaggacgatgatgatgacgaagatgatcctgcagaagctgaaaaggagggaaatgaaatggagggtgaggagttagatccattagatgcttacatggaagaagtgaaagaggaagtaaaaaaatttaacatgagaagtgtaaaaggtggtgggggaaatgaaaagaagtctgggccaacggtcacaaaagttgtcactgttgtgacaaccaaaaaagcagttgtggattctgataagaagaaaggtgagctgatggagaatgaccaggatgccatggagtattcttcagaggaggaagaagttgatcttcagacagcccttacagggtatcaaacaaaacagcgaaagcttctagaaccagttgatcatggaaaaattgagtatgagccatttaggaaaaacttctatgttgaagttccagaactagcaaaaatgtctcaagaagaggtaaatgtgtttcgattggaaatggagggcattacagttaaaggaaaaggttgccccaaaccaattaaatcctgggtccagtgtggaatttccatgaagatcttaaattccctcaagaagcatggctatgaaaagcccacgcccatccaaacccaagctattcctgctataatgtctggacgagatttgattggcattgccaaaacaggaagtggaaagaccattgcttttctgttgcccatgtttagacacatcatggatcagaggtcattagaggaaggagaggggccaatagctgtcatcatgactccaactcgagaactggctttacagattactaaagagtgtaagaagttttccaagactttgggacttagagtggtctgtgtttacggaggaacaggaatcagtgagcagattgctgagctgaaaagaggtgctgaaattattgtttgcacacctggtcgaatgattgacatgttagccgctaacagtggtcgggtcacaaatcttcgaagagtgacatatgttgttttagatgaagcagacagaatgtttgacatgggttttgaaccccaggtcatgcgcatcgtggataatgttcgtcctgatcgacagacggttatgttttcagctactttccccagagctatggaggctttggctcgcaggatcctcagtaaacctattgaagtacaagttggaggcaggagtgtggtttgctcagatgtggagcaacaagtgattgtgattgaagaagaaaagaaattcttgaagttacttgagcttctaggccattatcaagagtcaggatctgtcattatatttgtggataagcaggaacatgctgatggtcttcttaaggatttaatgagagcatcttatccttgcatgtctcttcatggaggcattgatcaatatgacagagatagcatcataaatgactttaagaatgggacctgcaaacttcttgtggctacctctgttgctgcccgaggtctagatgtgaaacatctgattcttgtagtaaattatagctgccccaaccattatgaggattatgtacacagagcagggcggactggaagagcaggaaacaagggttatgcttatacttttatcacagaggatcaagctcgctatgctggtgacataattaaagctcttgaattgtcagggactgcagtacctcctgatttagagaaactgtggagtgatttcaaagatcagcagaaagctgaggggaaaataattaaaaagagtagtgggttctctggtaagggattcaagtttgatgaaacagaacaagctttggctaatgagaggaagaagttacaaaaagcagctcttggtctacaagattcagatgatgaggatgctgcagttgatattgatgagcaaattgaaagcatgtttaattcaaagaagagagtaaaggatatggctgctcctggaacatcaagtgttcctgctccaactgcaggaaatgctgagaaattagaaattgctaagagattggctcttagaatcaatgcccagaagaatttgggcatcgagtctcaggatgtgatgcagcaggccaccaatgcaattcttaggggtggcaccattctggctcccactgtttctgcaaaaaccattgcagaacaacttgctgaaaagatcaatgccaagctcaattatgtgccgttagagaaacaagaagaagagagacaggatggtggacagaatgaatcttttaagagatatgaagaagaattagagatcaatgacttcccacagactgctaggtggaaagttacctctaaggaagctctgcagagaatcagtgaatactctgaagccgcaattacaatcagaggaacctacttccctcctggcaaagaacccaaggaaggcgagcggaagatttacttggcaattgaaagtgccaatgaactggctgtgcagaaagcaaaggcagaaatcaccaggctcataaaagaagagctgatccggctgcaaaattcataccaaccaacaaataaaggaagatacaaagtcttatagacatccggaaaaaagatttttacctgtgctggtctatgatgtatgtggcagttgctgtctgcagtttacaatgtattgtaaatgaagattttttaaattctatcttgctgattttttttaaatataagaaactggtacttggtaaagaaatctgtccgtaagtacccccacaatcagtcaaactatatttaaagccagcctgttttcagagtatgatgtcctttaatgtaaactcaaatatcaatattttaaatgtccggataatattctagaggtttaaaaaatggaaatatttgaactttctattgaagacaataaagtacacaagtcgttaaggggctattcactttatcctgtactttcaatgaaattgtgatcatttcctaagaaaaggtaaaattcactatcatattttgtgtccccaccttgatgttacatgactctggaacaatatgaactggatttaagaatgttataatagaagtcttacaaaatgggttgagagtttttgtttcaatttttatcatcataaatgggcaaaaagtagttggactaatttcggtttttatacaagtaaagatttaatagta

SEQ ID NO: 125458 - DNA, 5689 bp, Homo sapiens
  Payload ID: 4595
  Gene Symbol: DDX46
  Gene Name: DEAD (Asp-Glu-Ala-Asp) box polypeptide 46
  ENST ID: ENST00000452510
  CDS Start-End: 159-3257
gttttcgttggccgcgctgggatggccgccacagctgtaggtgctgctagtgtttagcgctggtctttgccgggcgttgagggcagctcagcctccttgtttgtccggttcgcctgtgcgtggtactcaagggcaccagtattcccgcggtcggcagcatgggtcgggagtcacgccactatcgaaaacgatcggcatcccggggtcgctctggaagtcggtctagaagtcgctcaccctcagacaaaagaagtaaacgtggagatgacagacggtctagaagtagagatagagataggaggagagagaggtctcgtagcagggataaaagaagatctcggtcaagggacaggaagcgtctgagacgttccagaagtagagagagagacagaagccgagagcgaagaagatctcgaagtagagacaggagacgctcaaggagtagaagccggggccggcgatcccgatcctccagtcctggaaataaaagcaagaaaactgagaatagatctaggtccaaagagaaaactgatggtggggaaagttctaaagagaagaaaaaagacaaagatgacaaggaggatgaaaaagaaaaagatgctggcaactttgaccagaataagctggaagaagaaatgagaaagcgaaaagaaagagtagaaaaatggcgagaagagcaacgtaaaaaggctatggaaaacataggagaactgaaaaaggaaatcgaagagatgaaacaagggaaaaagtggagtttagaggacgatgatgatgacgaagatgatcctgcagaagctgaaaaggagggaaatgaaatggagggtgaggagttagatccattagatgcttacatggaagaagtgaaagaggaagtaaaaaaatttaacatgagaagtgtaaaaggtggtgggggaaatgaaaagaagtctgggccaacggtcacaaaagttgtcactgttgtgacaaccaaaaaagcagttgtggattctgataagaagaaaggtgagctgatggagaatgaccaggatgccatggagtattcttcagaggaggaagaagttgatcttcagacagcccttacagggtatcaaacaaaacagcgaaagcttctagaaccagttgatcatggaaaaattgagtatgagccatttaggaaaaacttctatgttgaagttccagaactagcaaaaatgtctcaagaagaggtaaatgtgtttcgattggaaatggagggcattacagttaaaggaaaaggttgccccaaaccaattaaatcctgggtccagtgtggaatttccatgaagatcttaaattccctcaagaagcatggctatgaaaagcccacgcccatccaaacccaagctattcctgctataatgtctggacgagatttgattggcattgccaaaacaggaagtggaaagaccattgcttttctgttgcccatgtttagacacatcatggatcagaggtcattagaggaaggagaggggccaatagctgtcatcatgactccaactcgagaactggctttacagattactaaagagtgtaagaagttttccaagactttgggacttagagtggtctgtgtttacggaggaacaggaatcagtgagcagattgctgagctgaaaagaggtgctgaaattattgtttgcacacctggtcgaatgattgacatgttagccgctaacagtggtcgggtcacaaatcttcgaagagtgacatatgttgttttagatgaagcagacagaatgtttgacatgggttttgaaccccaggtcatgcgcatcgtggataatgttcgtcctgatcgacagacggttatgttttcagctactttccccagagctatggaggctttggctcgcaggatcctcagtaaacctattgaagtacaagttggaggcaggagtgtggtttgctcagatgtggagcaacaagtgattgtgattgaagaagaaaagaaattcttgaagttacttgagcttctaggccattatcaagagtcaggatctgtcattatatttgtggataagcaggaacatgctgatggtcttcttaaggatttaatgagagcatcttatccttgcatgtctcttcatggaggcattgatcaatatgacagagatagcatcataaatgactttaagaatgggacctgcaaacttcttgtggctacctctgttgctgcccgaggtctagatgtgaaacatctgattcttgtagtaaattatagctgccccaaccattatgaggattatgtacacagagcagggcggactggaagagcaggaaacaagggttatgcttatacttttatcacagaggatcaagctcgctatgctggtgacataattaaagctcttgaattgtcagggactgcagtacctcctgatttagagaaactgtggagtgatttcaaagatcagcagaaagctgaggggaaaataattaaaaagagtagtgggttctctggtaagggattcaagtttgatgaaacagaacaagctttggctaatgagaggaagaagttacaaaaagcagctcttggtctacaagattcagatgatgaggatgctgcagttgatattgatgagcaaattgaaagcatgtttaattcaaagaagagagtaaaggatatggctgctcctggaacatcaagtgttcctgctccaactgcaggaaatgctgagaaattagaaattgctaagagattggctcttagaatcaatgcccagaagaatttgggcatcgagtctcaggtagatgtgatgcagcaggccaccaatgcaattcttaggggtggcaccattctggctcccactgtttctgcaaaaaccattgcagaacaacttgctgaaaagatcaatgccaagctcaattatgtgccgttagagaaacaagaagaagagagacaggatggtggacagaatgaatcttttaagagatatgaagaagaattagagatcaatgacttcccacagactgctaggtggaaagttacctctaaggaagctctgcagagaatcagtgaatactctgaagccgcaattacaatcagaggaacctacttccctcctggcaaagaacccaaggaaggcgagcggaagatttacttggcaattgaaagtgccaatgaactggctgtgcagaaagcaaaggcagaaatcaccaggctcataaaagaagagctgatccggctgcaaaattcataccaaccaacaaataaaggaagatacaaagtcttatagacatccggaaaaaagatttttacctgtgctggtctatgatgtatgtggcagttgctgtctgcagtttacaatgtattgtaaatgaagattttttaaattctatcttgctgattttttttaaatataagaaactggtacttggtaaagaaatctgtccgtaagtacccccacaatcagtcaaactatatttaaagccagcctgttttcagagtatgatgtcctttaatgtaaactcaaatatcaatattttaaatgtccggataatattctagaggtttaaaaaatggaaatatttgaactttctattgaagacaataaagtacacaagtcgttaaggggctattcactttatcctgtactttcaatgaaattgtgatcatttcctaagaaaaggtaaaattcactatcatattttgtgtccccaccttgatgttacatgactctggaacaatatgaactggatttaagaatgttataatagaagtcttacaaaatgggttgagagtttttgtttcaatttttatcatcataaatgggcaaaaagtagttggactaatttcggtttttatacaagtaaagatttaatagtataaggatttttttgcatttctttacactgagtgtaaaactctacaaagagttatagtatttactactttgaggtttccctcacaacttctggctccatacctagcccctcttttataatcttccttaaaagaaagagtgtagcctataaatactaaatatgataccttttccttctagaaagtgtttatttatatatctatacatgttgtatgtacaaatatcctactacttttaatctgatttttcttcaggattattgagtaggttgtgaattttctttcttaaaaattgtaaaacataatggtacccaagttttaaacttagatgtgcttcatcttagtgaaatttaattcacaaggaatcataaattgtgtttttgaggctgggcgcagtgactcacacctgtatcccagcaatttgggaggccgaggtgggcagatcacttgaggtcaggagttcaagactagcctggtcaacatggtgaaaccctgtctctactaaaaatacaaaaattagtcggcatggtggtgggtggctgtaatcccagctactcaggaggctgaggcagaagaatctgagccaagataacaccattgcactccagcctgggcgacagagtgagactatctcaaaaataaataaataaataaataaatagtatttttgagccttcaagatacagttcctgaatattctaatttaaattgttataattggattacctaatattcttttcaagactcctgatgtattaacttcatgttattgtcacttttcaaaaaaggaatttttttcaggagttaaataaagtcagtcttttatatccaagggtttcaaacccacagattaaaccaaccacagatcaaaaatagaaaaaaaaaaaaaaagaaaaaaagaatgtaaaattttaaaaatacagtttaacagctgtaaaagttttactataacatttacattgtgttaggtattttaagtaatttaaaggttacagtatacaggcggttaaagtatacaggaggatgtgcatcggttatatgcatatagcaagccatttcatataagaggcttgaacatccatggattttggtatagaggaggggtttaaggggtgtcctgcaatcagtccccctctcataccaaaggatgactgtatatttcttaaatgaagagactttcattctttaaatattattgacttacagtttaaaaataaataaataaaagcatactatagttgtaaaaacaaataattttaatagtatattcagtggctgaagtgatagggagtattaatcattatttcttcagtataaagttattcttcctgaaaaagtaagatatacctgggaaatattcttggatccttcacacatccacttaatttcttgaaggaagaaaacagacaaaagacatgtaacaacagaaacaaataaaccacttactgtaaaatttcagaaattgtgggctcattccctccctctagtttatttatttgctcatctttatcacctaatggtagtttgttttctttggtagagtatatggcagtcccacatcgatgataattggtgctcccttcatccaactggatcactttgagattcagttttacatcattttagcattttgtttgtatatcagttgtgatgagccactgataaaattttgttctaaaatgaaacatattactttgttagtacattttttagtgtcacactgacttttaaaatttgaatgatatatagactttgtttttttaatgcaatatgaatatttgctcatgttttctaaattccttataaaataaaattaattcgaattcaatctgcactttcttaaaa

SEQ ID NO: 125459 - DNA, 530 bp, Homo sapiens
  Payload ID: 4595
  Gene Symbol: DDX46
  Gene Name: DEAD (Asp-Glu-Ala-Asp) box polypeptide 46
  ENST ID: ENST00000507053
  CDS Start-End: 1-211
tgaagccgcaattacaatcagaggaacctacttccctcctggcaaagaacccaaggaaggcgagcggaagatttacttggcaattgaaagtgccaatgaactggctgtgcagaaagcaaaggcagaaatcaccaggctcataaaagaagagctgatccggctgcaaaattcataccaaccaacaaataaaggaagatacaaagtcttatagacatccggaaaaaagatttttacctgtgctggtctatgatgtcagctctctggagctaaagacagctacgtttcccttaccagaaaatgatgcatcctgttgccagcagtaatccagctttctgtgggcctggcaagccttcctgcctcaatgaagatgccatgagagctgctgatcagtttgacatatattcctcccagcaaagcaaatacagccacacagtcaaccacaaaccaatggtttgtcagaggcaagacccattaaatgaaacacacttgcagactacaagtggcagaagcatagaaataaaagatgaact

SEQ ID NO: 125460 - DNA, 571 bp, Homo sapiens
  Payload ID: 4595
  Gene Symbol: DDX46
  Gene Name: DEAD (Asp-Glu-Ala-Asp) box polypeptide 46
  ENST ID: ENST00000513592
  CDS Start-End: 1-89
ttgaagttccagaactagcaaaaatgtctcaagaaggcatggctatgaaaagcccacgcccatccaaacccaagctattcctgctataatgtctggacgagatttgattggcattgccaaaacaggaagtggaaagaccattgcttttctgttgcccatgtttagacacatcatggatcagaggtcattagaggaaggagaggggccaatagctgtcatcatgactccaactcgagaactggctttacagattactaaagagtgtaagaagttttccaagactttgggacttagagtggtctgtgtttacggaggaacaggaatcagtgagcagattgctgagctgaaaagaggtgctgaaattattgtttgcacacctggtcgaatgattgacatgttagccgctaacagtggtcgggtcacaaatcttcgaagagtgacatatgttgttttagatgaagcagacagaatgtttgacatgggttttgaaccccaggtcatgcgcatcgtggataatgttcgtcctgatcgacagacggttatgttttcagctactttccccagagctatg

SEQ ID NO: 125461 - DNA, 3565 bp, Homo sapiens
  Payload ID: 4595
  Gene Symbol: DDX46
  Gene Name: DEAD (Asp-Glu-Ala-Asp) box polypeptide 46
  ENST ID: ENST00000507392
  CDS Start-End: 161-1576
ctgttttcgttggccgcgctgggatggccgccacagctgtaggtgctgctagtgtttagcgctggtctttgccgggcgttgagggcagctcagcctccttgtttgtccggttcgcctgtgcgtggtactcaagggcaccagtattcccgcggtcggcagcatgggtcgggagtcacgccactatcgaaaacgatcggcatcccggggtcgctctggaagtcggtctagaagtcgctcaccctcagacaaaagaagtaaacgtggagatgacagacggtctagaagtagagatagagataggaggagagagaggtctcgtagcagggataaaagaagatctcggtcaagggacaggaagcgtctgagatctaggtccaaagagaaaactgatggtggggaaagttctaaagagaagaaaaaagacaaagatgacaaggaggatgaaaaagaaaaagatgctggcaactttgaccagaataagctggaagaagaaatgagaaagcgaaaagaaagagtagaaaaatggcgagaagagcaacgtaaaaaggctatggaaaacataggagaactgaaaaaggaaatcgaagagatgaaacaagggaaaaagtggagtttagaggacgatgatgatgacgaagatgatcctgcagaagctgaaaaggagggaaatgaaatggagggtgaggagttagatccattagatgcttacatggaagaagtgaaagaggaagtaaaaaaatttaacatgagaagtgtaaaaggtggtgggggaaatgaaaagaagtctgggccaacggtcacaaaagttgtcactgttgtgacaaccaaaaaagcagttgtggattctgataagaagaaaggtgagctgatggagaatgaccaggatgccatggagtattcttcagaggaggaagaagttgatcttcagacagcccttacagggtatcaaacaaaacagcgaaagcttctagaaccagttgatcatggaaaaattgagtatgagccatttaggaaaaacttctatgttgaagttccagaactagcaaaaatgtctcaagaagaggtaaatgtgtttcgattggaaatggagggcattacagttaaaggaaaaggttgccccaaaccaattaaatcctgggtccagtgtggaatttccatgaagatcttaaattccctcaagaagcatggctatgaaaagcccacgcccatccaaacccaagctattcctgctataatgtctggacgagatttgattggcattgccaaaacaggaagtggaaagaccattgcttttctgttgcccatgtttagacacatcatggatcagaggtcattagaggaaggagaggggccaatagctgtcatcatgactccaactcgagaactggctttacagattactaaagagtgtaagaagttttccaagactttgggacttagagtggtctgtgtttacggaggaacaggaatcagtgagcagattgctgagctgaaaagaggtgctgaaattattgtttgcacacctggtcgaatgattgacatgttagccgctaacagtggtgatgctgtcagataatggctgatgtggctcgatgcttcatctcagtcttagttttatgatgtgttttggagagggctgttttctgaattttacaggttcttcaggccctatgatggtcgggtcacaaatcttcgaagagtgacatatgttgttttagatgaagcagacagaatgtttgacatgggttttgaaccccaggtcatgcgcatcgtggataatgttcgtcctgatcgacagacggttatgttttcagctactttccccagagctatggaggctttggctcgcaggatcctcagtaaacctattgaagtacaagttggaggcaggagtgtggtttgctcagatgtggagcaacaagtgattgtgattgaagaagaaaagaaattcttgaagttacttgagcttctaggccattatcaagagtcaggatctgtcattatatttgtggataagcaggaacatgctgatggtcttcttaaggatttaatgagagcatcttatccttgcatgtctcttcatggaggcattgatcaatatgacagagatagcatcataaatgactttaagaatgggacctgcaaacttcttgtggctacctctgttgctgcccgaggtctagatgtgaaacatctgattcttgtagtaaattatagctgccccaaccattatgaggattatgtacacagagcagggcggactggaagagcaggaaacaagggttatgcttatacttttatcacagaggatcaagctcgctatgctggtgacataattaaagctcttgaattgtcagggactgcagtacctcctgatttagagaaactgtggagtgatttcaaagatcagcagaaagctgaggggaaaataattaaaaagagtagtgggttctctggtaagggattcaagtttgatgaaacagaacaagctttggctaatgagaggaagaagttacaaaaagcagctcttggtctacaagattcagatgatgaggatgctgcagttgatattgatgagcaaattgaaagcatgtttaattcaaagaagagagtaaaggatatggctgctcctggaacatcaagtgttcctgctccaactgcaggaaatgctgagaaattagaaattgctaagagattggctcttagaatcaatgcccagaagaatttgggcatcgagtctcaggtagatgtgatgcagcaggccaccaatgcaattcttaggggtggcaccattctggctcccactgtttctgcaaaaaccattgcagaacaacttgctgaaaagatcaatgccaagctcaattatgtgccgttagagaaacaagaagaagagagacaggatggtggacagaatgaatcttttaagagatatgaagaagaattagagatcaatgacttcccacagactgctaggtggaaagttacctctaaggaagctctgcagagaatcagtgaatactctgaagccgcaattacaatcagaggaacctacttccctcctggcaaagaacccaaggaaggcgagcggaagatttacttggcaattgaaagtgccaatgaactggctgtgcagaaagcaaaggcagaaatcaccaggctcataaaagaagagctgatccggctgcaaaattcataccaaccaacaaataaaggaagatacaaagtcttatagacatccggaaaaaagatttttacctgtgctggtctatgatgtatgtggcagttgctgtctgcagtttacaatgtattgtaaatgaagattttttaaattctatcttgctgattttttttaaatataagaaactggtacttggtaaagaaatctgtccgtaagtacccccacaatcagtcaaactatatttaaagccagcctgttttcagagtatgatgtcctttaatgtaaactcaaatatcaatattttaaatgtccggataatattctagaggtttaaaaaatggaaatatttgaactttctattgaagacaataaagtacacaagtcgtt

SEQ ID NO: 125462 - DNA, 1584 bp, Homo sapiens
  Payload ID: 4595
  Gene Symbol: DDX46
  Gene Name: DEAD (Asp-Glu-Ala-Asp) box polypeptide 46
  ENST ID: ENST00000628477
  CDS Start-End: 169-1584
agcacgtcctgttttcgttggccgcgctgggatggccgccacagctgtaggtgctgctagtgtttagcgctggtctttgccgggcgttgagggcagctcagcctccttgtttgtccggttcgcctgtgcgtggtactcaagggcaccagtattcccgcggtcggcagcatgggtcgggagtcacgccactatcgaaaacgatcggcatcccggggtcgctctggaagtcggtctagaagtcgctcaccctcagacaaaagaagtaaacgtggagatgacagacggtctagaagtagagatagagataggaggagagagaggtctcgtagcagggataaaagaagatctcggtcaagggacaggaagcgtctgagatctaggtccaaagagaaaactgatggtggggaaagttctaaagagaagaaaaaagacaaagatgacaaggaggatgaaaaagaaaaagatgctggcaactttgaccagaataagctggaagaagaaatgagaaagcgaaaagaaagagtagaaaaatggcgagaagagcaacgtaaaaaggctatggaaaacataggagaactgaaaaaggaaatcgaagagatgaaacaagggaaaaagtggagtttagaggacgatgatgatgacgaagatgatcctgcagaagctgaaaaggagggaaatgaaatggagggtgaggagttagatccattagatgcttacatggaagaagtgaaagaggaagtaaaaaaatttaacatgagaagtgtaaaaggtggtgggggaaatgaaaagaagtctgggccaacggtcacaaaagttgtcactgttgtgacaaccaaaaaagcagttgtggattctgataagaagaaaggtgagctgatggagaatgaccaggatgccatggagtattcttcagaggaggaagaagttgatcttcagacagcccttacagggtatcaaacaaaacagcgaaagcttctagaaccagttgatcatggaaaaattgagtatgagccatttaggaaaaacttctatgttgaagttccagaactagcaaaaatgtctcaagaagaggtaaatgtgtttcgattggaaatggagggcattacagttaaaggaaaaggttgccccaaaccaattaaatcctgggtccagtgtggaatttccatgaagatcttaaattccctcaagaagcatggctatgaaaagcccacgcccatccaaacccaagctattcctgctataatgtctggacgagatttgattggcattgccaaaacaggaagtggaaagaccattgcttttctgttgcccatgtttagacacatcatggatcagaggtcattagaggaaggagaggggccaatagctgtcatcatgactccaactcgagaactggctttacagattactaaagagtgtaagaagttttccaagactttgggacttagagtggtctgtgtttacggaggaacaggaatcagtgagcagattgctgagctgaaaagaggtgctgaaattattgtttgcacacctggtcgaatgattgacatgttagccgctaacagtggtgatgctgtcagataa

SEQ ID NO: 125463 - DNA, 1698 bp, Homo sapiens
  Payload ID: 4596
  Gene Symbol: DDX47
  Gene Name: DEAD (Asp-Glu-Ala-Asp) box polypeptide 47
  Uniprot ID: Q9H0S4
  ENST ID: ENST00000352940
  CDS Start-End: 53-1273
atttcccagcatcccgcgcgccgcagacccacttccggagacctcacacaagatggcggcacccgaggaacacgattctccgaccgaagcgtcccagccgattgtggaagaggaggaaactaaaacatttaaagacctgggtgtgacagatgtgttgtgtgaagcttgtgaccagttgggatggacaaaacccaccaagatccagattgaagctattcctttggccttacaaggtcgtgatatcattgggcttgcagaaactggctctggaaagacaggcgcctttgctttgcccattctaaacgcactgctggagaccccgcagcgtttgtttgccctagttcttaccccgactcgggagctggcctttcagatctcagagcagtttgaagccctggggtcctctattggagtgcagagtgctgtgattgtaggtggaattgattcaatgtctcaatctttggcccttgcaaaaaaaccacatataataatagcaactcctggtcgactgattgaccacttggaaaatacgaaaggtttcaacttgagagctctcaaatacttggtcatggatgaagccgaccgaatactgaatatggattttgagacagaggttgacaagatcctcaaagtgattcctcgagatcggaaaacattcctcttctctgccaccatgaccaagaaggttcaaaaacttcagcgagcagctctgaagaatcctgtgaaatgtgccgtttcctctaaataccagacagttgaaaaattacagcaatattatatttttattccctctaaattcaagagtaagcgcctaggatcccttaataagtttaaggccaaggcccgttccattcttctagcaactgacgttgccagccgaggtttggacatacctcatgtagatgtggttgtcaactttgacattcctacccattccaaggattacatccatcgagtaggtcgaacagctagagctgggcgctccggaaaggctattacttttgtcacacagtatgatgtggaactcttccagcgcatagaacacttaattgggaagaaactaccaggttttccaacacaggatgatgaggttatgatgctgacagaacgcgtcgctgaagcccaaaggtttgcccgaatggagttaagggagcatggagaaaagaagaaacgctcgcgagaggatgctggagataatgatgacacagagggtgctattggtgtcaggaacaaggtggctggaggaaaaatgaagaagcggaaaggccgttaatcacttttatgaaggctcgagttctgctgttctgtaaaagagaattggagaatgaaacctgctccaacagagatcatgagactgaaattggtcagaattgtgtccagaatgtgctcagctaattcagtattcttccccattctgggttggagtttactgcagagtaattcttacagtgctgatgtcaagactgttactgttcttcgactttgattccttgctcatgacatgagtagggtgtgctcttctgtcacttcacacagaccttttgccttttttagctgcaagtcaaggactaggttgatgatgcccatgacctgtaattgtaaagaagcttggacatctgcaaatgatatttaaaccatcttggcttgtgctttattcaaactaatgtgaaacaataaatttaaatattatttttaaaa

SEQ ID NO: 125464 - DNA, 1817 bp, Homo sapiens
  Payload ID: 4596
  Gene Symbol: DDX47
  Gene Name: DEAD (Asp-Glu-Ala-Asp) box polypeptide 47
  Uniprot ID: Q9H0S4
  ENST ID: ENST00000358007
  CDS Start-End: 23-1390
acttccggagacctcacacaagatggcggcacccgaggaacacgattctccgaccgaagcgtcccagccgattgtggaagaggaggaaactaaaacatttaaagacctgggtgtgacagatgtgttgtgtgaagcttgtgaccagttgggatggacaaaacccaccaagatccagattgaagctattcctttggccttacaaggtcgtgatatcattgggcttgcagaaactggctctggaaagacaggcgcctttgctttgcccattctaaacgcactgctggagaccccgcagcgtttgtttgccctagttcttaccccgactcgggagctggcctttcagatctcagagcagtttgaagccctggggtcctctattggagtgcagagtgctgtgattgtaggtggaattgattcaatgtctcaatctttggcccttgcaaaaaaaccacatataataatagcaactcctggtcgactgattgaccacttggaaaatacgaaaggtttcaacttgagagctctcaaatacttggtcatggatgaagccgaccgaatactgaatatggattttgagacagaggttgacaagatcctcaaagtgattcctcgagatcggaaaacattcctcttctctgccaccatgaccaagaaggttcaaaaacttcagcgagcagctctgaagaatcctgtgaaatgtgccgtttcctctaaataccagacagttgaaaaattacagcaatattatatttttattccctctaaattcaaggatacctacctggtttatattctaaatgaattggctggaaactcctttatgatattctgcagcacctgtaataatacccagagaacagctttgctactgcgaaatcttggcttcactgccatccccctccatggacaaatgagtcagagtaagcgcctaggatcccttaataagtttaaggccaaggcccgttccattcttctagcaactgacgttgccagccgaggtttggacatacctcatgtagatgtggttgtcaactttgacattcctacccattccaaggattacatccatcgagtaggtcgaacagctagagctgggcgctccggaaaggctattacttttgtcacacagtatgatgtggaactcttccagcgcatagaacacttaattgggaagaaactaccaggttttccaacacaggatgatgaggttatgatgctgacagaacgcgtcgctgaagcccaaaggtttgcccgaatggagttaagggagcatggagaaaagaagaaacgctcgcgagaggatgctggagataatgatgacacagagggtgctattggtgtcaggaacaaggtggctggaggaaaaatgaagaagcggaaaggccgttaatcacttttatgaaggctcgagttctgctgttctgtaaaagagaattggagaatgaaacctgctccaacagagatcatgagactgaaattggtcagaattgtgtccagaatgtgctcagctaattcagtattcttccccattctgggttggagtttactgcagagtaattcttacagtgctgatgtcaagactgttactgttcttcgactttgattccttgctcatgacatgagtagggtgtgctcttctgtcacttcacacagaccttttgccttttttagctgcaagtcaaggactaggttgatgatgcccatgacctgtaattgtaaagaagcttggacatctgcaaatgatatttaaaccatcttggcttgtgctttattcaaactaatgtgaaacaataaatttaaatattatttttaaaaga

SEQ ID NO: 125465 - DNA, 597 bp, Homo sapiens
  Payload ID: 4596
  Gene Symbol: DDX47
  Gene Name: DEAD (Asp-Glu-Ala-Asp) box polypeptide 47
  ENST ID: ENST00000544400
  CDS Start-End: 9-597
cacacaagatggcggcacccgaggaacacgattctccgaccgaagcgtcccagccgattgtggaagaggaggaaactaaaacatttaaagacctgggtgtgacagatgtgttgtgtgaagcttgtgaccagttgggatggacaaaacccaccaagatccagattgaagctattcctttggccttacaagctgtgattgtaggtggaattgattcaatgtctcaatctttggcccttgcaaaaaaaccacatataataatagcaactcctggtcgactgattgaccacttggaaaatacgaaaggtttcaacttgagagctctcaaatacttggtcatggatgaagccgaccgaatactgaatatggattttgagacagaggttgacaagatcctcaaagtgattcctcgagatcggaaaacattcctcttctctgccaccatgaccaagaaggttcaaaaacttcagcgagcagctctgaagaatcctgtgaaatgtgccgtttcctctaaataccagacagttgaaaaattacagcaatattatatttttattccctctaaattcaagagtaagcgcctaggatcccttaataagt

SEQ ID NO: 125466 - DNA, 1830 bp, Homo sapiens
  Payload ID: 4597
  Gene Symbol: DDX49
  Gene Name: DEAD (Asp-Glu-Ala-Asp) box polypeptide 49
  Uniprot ID: Q9Y6V7
  ENST ID: ENST00000247003
  CDS Start-End: 68-1519
gtcggcgcgcgccggaagcgcggatcacacgggcccctacaaggggcccctacaagcggccacaaggatggcaggcttcgcggagctcgggctgtcatcgtggctcgtggaacaatgtcggcagctgggtttgaagcagcccacgcccgtgcagctcggctgcatccccgccatcctggagggtcgagactgcttgggctgtgctaagacaggcagtgggaagacagcagcgtttgtccttcccatcttgcagaagctgtctgaggatccctatggcatcttctgcctcgtcctgacacccaccagggagctggcctaccagatcgcagagcagttccgggtcctggggaagcctctagggctgaaagactgcatcatcgtcggtggcatggacatggtggcccaggcgctggagctctctcggaaaccacacgtggtcatcgccacgccggggcgcctggcagatcacctgcgcagctccaacacttttagtataaagaagatccgcttcctggtgatggatgaggcagaccggctgctggaacagggctgcactgacttcaccgtggacctggaggccatcctggcggctgtgccggcccgcaggcagacactgctgttcagcgccacgctgaccgacacactccgggagctgcagggtctggccaccaaccagcccttcttctgggaagcacaggccccggtgagcaccgtggagcagctggaccagcgctacctgctggtgcctgagaaggtcaaggacgcctacctggtccacctgatccagcgcttccaggatgagcacgaggactggtccattatcatcttcaccaacacgtgcaagacctgccagattctgtgcatgatgctgcgcaaattcagcttccccaccgtggctctgcactccatgatgaagcagaaagaacgctttgccgccctagccaagttcaagtccagcatctaccggatcctgatcgcaacagacgtggcctcccggggcctggacatccctacggtacaggtggtcatcaaccacaacacccccgggctccccaagatctacatccaccgagtcggccggacggcccgtgcagggcggcagggtcaggccatcacgctggtgacacagtacgacatccacctggtgcacgccatcgaggagcagatcaagaagaagctggaggagttctccgtggaagaggccgaggtgctacagatcctcacacaggtcaacgtggtgcgaagagagtgtgagatcaaactggaggcggcccactttgacgaaaagaaggagatcaacaaacggaagcagctgatcctggaggggaaggaccctgacctggaggccaagcgcaaggctgagctggccaagatcaagcagaagaaccggcgcttcaaggagaaggtggaggagacgctgaagcgacagaaggctggcagggctggccacaaggggcgtccacccaggacaccgtctgggtcccactcaggcccagtcccctcccagggcctggtctgagccccacacggccatctgcccagtccttgactcgtccatggagctgagggtcggaggaaccttccttgggggcagcagcccttcccgggggcctacccagtgccccacagcagaacccgtgggcgctcgtgttgtgcgggccctgctcctctgccccgaaaccactggctggtcccttccctgagccctggccaagattcaggctgcaggggaagaaagaacatgaccgggaggttgtgaccccaacccaaggtcaccccccaggggtgccgcatacaggaggtgcttaataaacgggtcttttgacttcc

SEQ ID NO: 125467 - DNA, 1691 bp, Homo sapiens
  Payload ID: 4597
  Gene Symbol: DDX49
  Gene Name: DEAD (Asp-Glu-Ala-Asp) box polypeptide 49
  ENST ID: ENST00000602113
  CDS Start-End: 5-130
aaggatggcaggcttcgcggagctcgggctgtcatcgtggctcgtggaacaatgtcggcagctgggtttgaagcagcccacgcccgtgcagctcggctgcatccccgccatcctggaggaagctgtctgaggatccctatggcatcttctgcctcgtcctgacacccaccagggagctggcctaccagatcgcagagcagttccgggtcctggggaagcctctagggctgaaagactgcatcatcgtcggtggcatggacatggtggcccaggcgctggagctctctcggaaaccacacgtggtcatcgccacgccggggcgcctggcagatcacctgcgcagctccaacacttttagtataaagaagatccgcttcctggtgatggatgaggcagaccggctgctggaacagggctgcactgacttcaccgtggacctggaggccatcctggcggctgtgccggcccgcaggcagacactgctgttcagcgccacgctgaccgacacactccgggagctgcagggtctggccaccaaccagcccttcttctgggaagcacaggccccggtgagcaccgtggagcagctggaccagcgctacctgctggtgcctgagaaggtcaaggacgcctacctggtccacctgatccagcgcttccaggatgagcacgaggactggtccattatcatcttcaccaacacgtgcaagacctgccagattctgtgcatgatgctgcgcaaattcagcttccccaccgtggctctgcactccatgatgaagcagaaagaacgctttgccgccctagccaagttcaagtccagcatctaccggatcctgatcgcaacagacgtggcctcccggggcctggacatccctacggtacaggtggtcatcaaccacaacacccccgggctccccaagatctacatccaccgagtcggccggacggcccgtgcagggcggcagggtcaggccatcacgctggtgacacagtacgacatccacctggtgcacgccatcgaggagcagatcaagaagaagctggaggagttctccgtggaagaggccgaggtgctacagatcctcacacaggtcaacgtggtgcgaagagagtgtgagatcaaactggaggcggcccactttgacgaaaagaaggagatcaacaaacggaagcagctgatcctggaggggaaggaccctgacctggaggccaagcgcaaggctgagctggccaagatcaagcagaagaaccggcgcttcaaggagaaggtggaggagacgctgaagcgacagaaggctggcagggctggccacaaggggcgtccacccaggacaccgtctgggtcccactcaggcccagtcccctcccagggcctggtctgagccccacacggccatctgcccagtccttgactcgtccatggagctgagggtcggaggaaccttccttgggggcagcagcccttcccgggggcctacccagtgccccacagcagaacccgtgggcgctcgtgttgtgcgggccctgctcctctgccccgaaaccactggctggtcccttccctgagccctggccaagattcaggctgcaggggaagaaagaacatgaccgggaggttgtgaccccaacccaaggtcaccccccaggggtgccgcatacaggaggtgcttaataaacgggtcttttga

SEQ ID NO: 125468 - DNA, 721 bp, Homo sapiens
  Payload ID: 4597
  Gene Symbol: DDX49
  Gene Name: DEAD (Asp-Glu-Ala-Asp) box polypeptide 49
  ENST ID: ENST00000594021
  CDS Start-End: 28-384
aaggggcccctacaagcggccacaaggatggcaggcttcgcggagctcgggctgtcatcgtggctcgtggaacaatgtcggcagctgggtttgaagcagcccacgcccgtgcagctcggctgcatccccgccatcctggagggtcgagactgcttgggctgtgctaagacaggcagtgggaagacagcagcgtttgtccttcccatcttgcagaagctgtctgaggatccctatggcatcttctgcctcgtcctgacacccaccagaattaaacaagatggccccggtgcagtggctcacacctgtaatcccagcactttgggagctccagggagctggcctaccagatcgcagagcagttccgggtcctggggaagcctctagggctgaaagactgcatcatcgtcggtggcatggacatggtggcccaggcgctggagctctctcggaaaccacacgtggtcatcgccacgccggggcgcctggcagatcacctgcgcagctccaacacttttagtataaagaagatccgcttcctggtgatggatgaggcagaccggctgctggaacagggctgcactgacttcaccgtggacctggaggccatcctggcggctgtgccggcccgcaggcagacactgctgttcagcgccacgctgaccgacacactccgggagctgcagggtctggccaccaaccagcccttcttctgggaagcaca

SEQ ID NO: 125469 - DNA, 1882 bp, Homo sapiens
  Payload ID: 4597
  Gene Symbol: DDX49
  Gene Name: DEAD (Asp-Glu-Ala-Asp) box polypeptide 49
  ENST ID: ENST00000595858
  CDS Start-End: 16-516
caagcggccacaaggatggcaggcttcgcggagctcgggctgtcatcgtggctcgtggaacaatgtcggcagctgggtttgaagcagcccacgcccgtgcagctcggctgcatccccgccatcctggagggtcgagactgcttgggctgtgctaagacaggcagtgggaagacagcagcgtttgtccttcccatcttgcagaagctgtctgaggatccctatggcatcttctgcctcgtcctgacacccaccaggggtcctgcagaattaaacaagatggccccggtgcagtggctcacacctgtaatcccagcactttgggagctccagggagctggcctaccagatcgcagagcagttccgggtcctggggaagcctctagggctgaaagactgcatcatcgtcggtggcatggacatggtggcccaggcgctggagctctctcggaaaccacacgtggtcatcgccacgccggggcgcctggcagatcacctgcgcagctccaacacttttagtataaagaagatccgcttcctggtgatggatgaggcagaccggctgctggaacagggctgcactgacttcaccgtggacctggaggccatcctggcggctgtgccggcccgcaggcagacactgctgttcagcgccacgctgaccgacacactccgggagctgcagggtctggccaccaaccagcccttcttctgggaagcacaggccccggtgagcaccgtggagcagctggaccagcgctacctgctggtgcctgagaaggtcaaggacgcctacctggtccacctgatccagcgcttccaggatgagcacgaggactggtccattatcatcttcaccaacacgtgcaagacctgccagattctgtgcatgatgctgcgcaaattcagcttccccaccgtggctctgcactccatgatgaagcagaaagaacgctttgccgccctagccaagttcaagtccagcatctaccggatcctgatcgcaacagacgtggcctcccgtggagctgaccagccacctctgcctccaggggcctggacatccctacggtacaggtggtcatcaaccacaacacccccgggctccccaagatctacatccaccgagtcggccggacggcccgtgcagggcggcagggtcaggccatcacgctggtgacacagtacgacatccacctggtgcacgccatcgaggagcagatcaagaagaagctggaggagttctccgtggaagaggccgaggtgctacagatcctcacacaggtcaacgtggtgcgaagagagtgtgagatcaaactggaggcggcccactttgacgaaaagaaggagatcaacaaacggaagcagctgatcctggaggggaaggaccctgacctggaggccaagcgcaaggctgagctggccaagatcaagcagaagaaccggcgcttcaaggagaaggtggaggagacgctgaagcgacagaaggctggcagggctggccacaaggggcgtccacccaggacaccgtctgggtcccactcaggcccagtcccctcccagggcctggtctgagccccacacggccatctgcccagtccttgactcgtccatggagctgagggtcggaggaaccttccttgggggcagcagcccttcccgggggcctacccagtgccccacagcagaacccgtgggcgctcgtgttgtgcgggccctgctcctctgccccgaaaccactggctggtcccttccctgagccctggccaagattcaggctgcaggggaagaaagaacatgaccgggaggttgtgaccccaacccaaggtcaccccccaggggtgccgcatacaggaggtgcttaataaacgggtcttttgacttc

SEQ ID NO: 125470 - DNA, 753 bp, Homo sapiens
  Payload ID: 4597
  Gene Symbol: DDX49
  Gene Name: DEAD (Asp-Glu-Ala-Asp) box polypeptide 49
  ENST ID: ENST00000598972
  CDS Start-End: 14-352
agcggccacaaggatggcaggcttcgcggagctcgggctgtcatcgtggctcgtggaacaatgtcggcagctgggtttgaagcagcccacgcccgtgcagctcggctgcatccccgccatcctggagggtcgagactgcttgggctgtgctaagacaggcagtgggaagacagcagcgtttgtccttcccatcttgcagaagctgtctgaggatccctatggcatcttctgcctcgtcctgacacccaccagacatggtggcccaggcgctggagctctctcggaaaccacacgtggtcatcgccacgccggggcgcctggcagatcacctgcgcagctccaacacttttagtataaagaagatccgcttcctggtgatggatgaggcagaccggctgctggaacagggctgcactgacttcaccgtggacctggaggccatcctggcggctgtgccggcccgcaggcagacactgctgttcagcgccacgctgaccgacacactccgggagctgcagggtctggccaccaaccagcccttcttctgggaagcacaggccccggtgagcaccgtggagcagctggaccagcgctacctgctggtgcctgagaaggtcaaggacgcctacctggtccacctgatccagcgcttccaggatgagcacgaggactggtccattatcatcttcaccaacacgtgcaagacctgccagattctgtgcatgatgctgcgcaaattcagcttccccaccg

SEQ ID NO: 125471 - DNA, 557 bp, Homo sapiens
  Payload ID: 4597
  Gene Symbol: DDX49
  Gene Name: DEAD (Asp-Glu-Ala-Asp) box polypeptide 49
  ENST ID: ENST00000593361
  CDS Start-End: 15-140
aagcggccacaaggatggcaggcttcgcggagctcgggctgtcatcgtggctcgtggaacaatgtcggcagctgggtttgaagcagcccacgcccgtgcagctcggctgcatccccgccatcctggaggaagctgtctgaggatccctatggcatcttctgcctcgtcctgacacccaccaggggtcctgcagaattaaacaagatggccccggtgcagtggctcacacctgtaatcccagcactttgggagctccagggagctggcctaccagatcgcagagcagttccgggtcctggggaagcctctagggctgaaagactgcatcatcgtcggtggcatggacatggtggcccaggcgctggagctctctcggaaaccacacgtggtcatcgccacgccggggcgcctggcagatcacctgcgcagctccaacacttttagtataaagaagatccgcttcctggtgatggatgaggcagaccggctgctggaacagggctgcactgacttcaccgtggacctggaggccatcctggcggctgtgccggcccgca

SEQ ID NO: 125472 - DNA, 1912 bp, Homo sapiens
  Payload ID: 4597
  Gene Symbol: DDX49
  Gene Name: DEAD (Asp-Glu-Ala-Asp) box polypeptide 49
  ENST ID: ENST00000629999
  CDS Start-End: 68-568
gtcggcgcgcgccggaagcgcggatcacacgggcccctacaaggggcccctacaagcggccacaaggatggcaggcttcgcggagctcgggctgtcatcgtggctcgtggaacaatgtcggcagctgggtttgaagcagcccacgcccgtgcagctcggctgcatccccgccatcctggagggtcgagactgcttgggctgtgctaagacaggcagtgggaagacagcagcgtttgtccttcccatcttgcagaagctgtctgaggatccctatggcatcttctgcctcgtcctgacacccaccaggggtcctgcagaattaaacaagatggccccggtgcagtggctcacacctgtaatcccagcactttgggagctccagggagctggcctaccagatcgcagagcagttccgggtcctggggaagcctctagggctgaaagactgcatcatcgtcggtggcatggacatggtggcccaggcgctggagctctctcggaaaccacacgtggtcatcgccacgccggggcgcctggcagatcacctgcgcagctccaacacttttagtataaagaagatccgcttcctggtgatggatgaggcagaccggctgctggaacagggctgcactgacttcaccgtggacctggaggccatcctggcggctgtgccggcccgcaggcagacactgctgttcagcgccacgctgaccgacacactccgggagctgcagggtctggccaccaaccagcccttcttctgggaagcacaggccccggtgagcaccgtggagcagctggaccagcgctacctgctggtgcctgagaaggtcaaggacgcctacctggtccacctgatccagcgcttccaggatgagcacgaggactggtccattatcatcttcaccaacacgtgcaagacctgccagattctgtgcatgatgctgcgcaaattcagcttccccaccgtggctctgcactccatgatgaagcagaaagaacgctttgccgccctagccaagttcaagtccagcatctaccggatcctgatcgcaacagacgtggcctcccggggcctggacatccctacggtacaggtggtcatcaaccacaacacccccgggctccccaagatctacatccaccgagtcggccggacggcccgtgcagggcggcagggtcaggccatcacgctggtgacacagtacgacatccacctggtgcacgccatcgaggagcagatcaagaagaagctggaggagttctccgtggaagaggccgaggtgctacagatcctcacacaggtcaacgtggtgcgaagagagtgtgagatcaaactggaggcggcccactttgacgaaaagaaggagatcaacaaacggaagcagctgatcctggaggggaaggaccctgacctggaggccaagcgcaaggctgagctggccaagatcaagcagaagaaccggcgcttcaaggagaaggtggaggagacgctgaagcgacagaaggctggcagggctggccacaaggggcgtccacccaggacaccgtctgggtcccactcaggcccagtcccctcccagggcctggtctgagccccacacggccatctgcccagtccttgactcgtccatggagctgagggtcggaggaaccttccttgggggcagcagcccttcccgggggcctacccagtgccccacagcagaacccgtgggcgctcgtgttgtgcgggccctgctcctctgccccgaaaccactggctggtcccttccctgagccctggccaagattcaggctgcaggggaagaaagaacatgaccgggaggttgtgaccccaacccaaggtcaccccccaggggtgccgcatacaggaggtgcttaataaacgggtcttttgacttcctcagtc

SEQ ID NO: 125473 - DNA, 2538 bp, Homo sapiens
  Payload ID: 4598
  Gene Symbol: DDX50
  Gene Name: DEAD (Asp-Glu-Ala-Asp) box polypeptide 50
  Uniprot ID: Q9BQ39
  ENST ID: ENST00000373585
  CDS Start-End: 108-2321
gcatggccaaggccgggcggccgccttgcccccgcttcctttcacgctgtcgctgcccgtaggtggttgtggccactgtgcccggagggaggcggcggtggccagtaatgcctgggaaactcctctggggggacattatggagctggaagcacccttggaggagtccgagagccagaagaaggagaggcaaaagagtgacagaaggaagtcaaggcaccattatgactcggatgagaaatcagaaacaagagaaaatggtgttacagatgacctggatgctcccaaggccaaaaaatctaaaatgaaagagaagctaaatggagacactgaagaaggatttaatagactttcagatgaattctccaaatctcataagtcaagaagaaaagatctaccaaatggagatatagatgaatatgaaaaaaaatcaaagcgagtatcatctttagatacttctactcataaatcaagtgataataaactagaggagaccttaacacgtgaacagaaagaaggagccttctccaattttcctatttctgaagagactataaagcttctgaaaggtcgaggggtaacatatctctttcctattcaagttaagacctttggtcctgtatatgaaggaaaagatttaatagctcaagcacggacaggaacaggaaagacattctcttttgccatccccttaattgaaagactccaaagaaatcaagaaacaattaaaaaaagccgctcaccaaaggtacttgttttggctccaacaagggaactggcaaaccaagtagccaaagacttcaaagatataactaggaaactcagcgtggcgtgtttttatggtggaacatcatatcaaagccaaattaatcatattcgaaatggtattgacatcttggttggaacacctggtcgtatcaaagaccatctgcagagtggccgattggatctttctaaactgcgacatgttgtgcttgatgaagtggatcagatgttagatttaggtttcgctgaacaagttgaagatattattcatgaatcctacaaaactgattctgaagacaatcctcagactttacttttttctgcaacttgcccacagtgggtatacaaagttgcaaaaaaatacatgaaatccagatatgaacaggttgaccttgttggaaaaatgactcaaaaggctgcaactactgtggaacatttggccatccagtgtcattggtctcagaggccagcagttattggagatgtccttcaagtctacagtgggtctgaagggagggctattattttctgtgagaccaagaagaatgtaactgaaatggccatgaatccacacataaaacagaatgcccagtgtttacatggggacattgcacagtcacaaagagaaattacactaaaaggcttcagagaaggtagttttaaagttttggtggcaaccaatgtggctgcccgtggtttggacattcctgaagttgacctggtgattcaaagttctcctcctcaggatgttgagtcctatatccatcgctctggacgcacaggtagagctggacggacagggatttgtatatgtttttatcaaccaagagaaagaggtcaactaagatatgtggaacaaaaagcaggaattacttttaaacgtgtaggtgttccttctacaatggatttagttaaatctaaaagcatggatgccatcaggtctctggcttccgtttcttacgctgctgttgattttttccgaccatcagctcagagactgatagaagagaaaggtgcagtggatgcattggctgcagctttagcccacatttctggtgcatcaagctttgaaccacgatctttgatcacctctgataaggggtttgtgaccatgactctggaaagcctagaggaaatacaggatgtcagctgtgcttggaaagaacttaacagaaagctgagtagtaatgcagtgtctcagattaccagaatgtgcctcctgaaaggaaatatgggtgtttgctttgatgttcctacaactgagtcagaaaggttacaggcagagtggcatgattccgactggatactctcagtgccagccaaattacctgaaattgaagaatattatgatggaaacacatcttctaattccagacagaggagtggctggtcaagtggtcgatcaggccggtcaggccggtcaggtggtcgatctggcggccggtcaggtagacagagtcgacaaggaagtcgctcaggaagtcgacaagatggtagaagacgaagtgggaatagaaatcgatcaagaagtgggggccacaaacggagttttgactgagtatttgatagttaatctaccagtgtgagcttgcctatttctgcctaatcatgtacattatccaccaaaaattaggtcatcatagttgaggtatgtgtctgctatttgcaaagaagttggtcgtatttttttaaaaagtatttcacaagaatggaacaaatctacttatccagttatacctttgaataaaaaaacctccttttattgtctcttttca

SEQ ID NO: 125474 - DNA, 888 bp, Homo sapiens
  Payload ID: 4598
  Gene Symbol: DDX50
  Gene Name: DEAD (Asp-Glu-Ala-Asp) box polypeptide 50
  ENST ID: ENST00000471475
  CDS Start-End: 69-224
tttcacgctgtcgctgcccgtaggtggttgtggccactgtgcccggagggaggcggcggtggccagtaatgcctgggaaactcctctggggggacattatggagctggaagcacccttggaggagtccgagagccagaagaaggagaggcaaaagagctttatggatatcgcaatttcggataagggattatggacctgtacttcccttatagggttgttatgaagatttaaacaagataagctgaaaacacattacacagtgctggagtgacagaaggaagtcaaggcaccattatgactcggatgagaaatcagaaacaagagaaaatggtgttacagatgacctggatgctcccaaggccaaaaaatctaaaatgaaagagaagctaaatggagacactgaagaaggatttaatagactttcagatgaattctccaaatctcataagtcaagaagaaaagatctaccaaatggagatatagatgaatatgaaaaaaaatcaaagcgagtatcatctttagatacttctactcataaatcaagtgataataaactagaggagaccttaacacgtgaacagaaagaaggagccttctccaattttcctatttctgaagagactataaagcttctgaaaggtcgaggggtaacatatctctttcctattcaagttaagacctttggtcctgtatatgaaggaaaagatttaatagctcaagcacggacaggaacaggaaagacattctcttttgccatccccttaattgaaagactccaaagaaatcaagaaacaattaaaaaaagccgctcaccaaaggtacttgttttggctccaacaagggaactggcaaaccaagtagccaaagacttcaaagatataactagg

SEQ ID NO: 125475 - DNA, 1067 bp, Homo sapiens
  Payload ID: 4598
  Gene Symbol: DDX50
  Gene Name: DEAD (Asp-Glu-Ala-Asp) box polypeptide 50
  ENST ID: ENST00000483593
  CDS Start-End: 100-219
aaggccgggcggccgccttgcccccgcttcctttcacgctgtcgctgcccgtaggtggttgtggccactgtgcccggagggaggcggcggtggccagtaatgcctgggaaactcctctggggggacattatggagctggaagcacccttggaggagtccgagagccagaagaaggagaggcaaaagggttgttatgaagatttaaacaagataagctgaaaacacattacacagtgctggagtgacagaaggaagtcaaggcaccattatgactcggatgagaaatcagaaacaagagaaaatggtgttacagatgacctggatgctcccaaggccaaaaaatctaaaatgaaagagaagctaaatggagacactgaagaaggatttaatagactttcagatgaattctccaaatctcataagtcaagaagaaaagatctaccaaatggagatatagatgaatatgaaaaaaaatcaaagcgagtatcatctttagatacttctactcataaatcaagtgataataaactagaggagaccttaacacgtgaacagaaagaaggagccttctccaattttcctatttctgaagagactataaagcttctgaaaggtcgaggggtaacatatctctttcctattcaagttaagacctttggtcctgtatatgaaggaaaagatttaatagctcaagcacggacaggaacaggaaagacattctcttttgccatccccttaattgaaagactccaaagaaatcaagaaacaattaaaaaaagccgctcaccaaaggtacttgttttggctccaacaagggaactggcaaaccaagtagccaaagacttcaaagatataactaggaaactcagcgtggcgtgtttttatggtggaacatcatatcaaagccaaatttgaattttacatattggtggcatttctctcttctcacagttaatcatattcgaaatggtattgacatcttggttggaacacctggtcgtatcaaagaccatctgcagagtggccgattggatctttctaaactgcgacatgttgtgcttgatgaa

SEQ ID NO: 125476 - DNA, 2510 bp, Homo sapiens
  Payload ID: 4598
  Gene Symbol: DDX50
  Gene Name: DEAD (Asp-Glu-Ala-Asp) box polypeptide 50
  ENST ID: ENST00000610822
  CDS Start-End: 97-2289
gccgggcggccgccttgcccccgcttcctttcacgctgtcgctgcccgtaggtggttgtggccactgtgcccggagggaggcggcggtggccagtaatgcctgggaaactcctctggggggacattatggagctggaacacccttggaggagtccgagagccagaagaaggagaggcaaaagagtgacagaaggaagtcaaggcaccattatgactcggatgagaaatcagaaacaagagaaaatggtgttacagatgacctggatgctcccaaggccaaaatctaaaatgaaagagaagctaaatggagacactgaagaaggatttaatagactttcagatgaattctccaaatctcataagtcaagaagaaaagatctaccaaatggagatatagatgaatatgaaaaaaaatcaaagcgagtatcatctttagatacttctactcataaatcaagtgataataaactagaggagaccttaacacgtgaacagaaagaaggagccttctccaattttcctatttctgaagagactataaagcttctgaaaggtcgaggggtaacatatctctttcctattcaagttaagacctttggtcctgtatatgaaggaaaagatttaatagctcaagcacggacaggaacaggaaagacattctcttttgccatccccttaattgaaagactccaaagaaatcaagaaacaattaaaaaaagccgctcaccaaaggtacttgttttggctccaacaagggaactggcaaaccaagtagccaaagacttcaaagatataactaggaaactcagcgtggcgtgtttttatggtggaacatcatatcaaagccaaattaatcatattcgaaatggtattgacatcttggttggaacacctggtcgtatcaaagaccatctgcagagtggccgattggatctttctaaactgcgacatgttgtgcttgatgaagtggatcagatgttagatttaggtttcgctgaacaagttgaagatattattcatgaatcctacaaaactgattctgaagacaatcctcagactttacttttttctgcaacttgcccacagtgggtatacaaagttgcaaaaaaatacatgaaatccagatatgaacaggttgaccttgttggaaaaatgactcaaaaggctgcaactactgtggaacatttggccatccagtgtcattggtctcagaggccagcagttattggagatgtccttcaagtctacagtgggtctgaagggagggctattattttctgtgagaccaagaagaatgtaactgaaatggccatgaatccacacataaaacagaatgcccagtgtttacatggggacattgcacagtcacaaagagaaattacactaaaaggcttcagagaaggtagttttaaagttttggtggcaaccaatgtggctgcccgtggtttggacattcctgaagttgacctggtgattcaaagttctcctcctcaggatgttgagtcctatatccatcgctctggacgcacaggtagagctggacggacagggatttgtatatgtttttatcaaccaagagaaagaggtcaactaagatatgtggaacaaaaagcaggaattacttttaaacgtgtaggtgttccttctacaatggatttagttaaatctaaaagcatggatgccatcaggtctctggcttccgtttcttacgctgctattttttccgaccatcagctcagactgatagaagagaaaggtgcagtggatgcattggctgcagctttagcccacatttctggtgcatcaagctttgaaccacgatctttgatcacctctgataaggggtttgtgaccatgactctggaaagcctagaggaatacaggatgtcagcttggaaagaacttaacagaaagctgagtagtaatgcagtgtctcagattaccagaatgtgcctcctgaaaggaatatggggtgtttgctttgatgttcctacaactgagtcagaaaggttacaggcagagtggcatgattccgactggatactctcagtgccagccaaattacctgaaattgaagaatattatgatggaaacacatcttctaattccagacagaggagtggctggtcaagtggtcgatcaggccggtcaggccggtcaggtggtcgatctggcggccggtcaggtagacagagtcgacaaggaagtcgctcaggaagtcgacaagatggtagaagacgaagtgggaatagaaatcgatcaagaagtgggccacaaacggagttttgactgagtatttgatagttaatctaccagtgtgagcttgcctatttctgcctaatcatgtacattatccaccaaaaattaggtcatcatagttgaggtatgtgtctgctatttgcaaagaagttggtcgtatttttttaaaaagtatttcacaagaatggaacaaatctacttatccagttatacctttgaataaaaaaacctccttttattgtctcttttca

SEQ ID NO: 125477 - DNA, 4718 bp, Homo sapiens
  Payload ID: 4599
  Gene Symbol: DDX51
  Gene Name: DEAD (Asp-Glu-Ala-Asp) box polypeptide 51
  Uniprot ID: Q8N8A6
  ENST ID: ENST00000397333
  CDS Start-End: 40-2040
gcagcgcgccacgcccgagtcccaggcgtgcggctggccatggcgctgttctacgtcgcgcggtacccgggccccgatgcggcagctgcggcggggccggagggcgcggaggccggggcgcacggcagggcccgcgcgctgctcgagcggctgcagagccgggcccgcgaacggcagcagcagcgggagcccgcgcagaccgaggcggctgcatcgaccgagccggcgaccaggaggcgacggcggccccggcggcggcggcgggtgaacgacgcggagccggggagcccggaggcgccgcagggaaagcgacggaaggcggacggcgaggacgcgggcgcagaaagcaacgaggaggcgccaggggagcccagcgcagggagcagcgaggaggcgccaggggagcccagcgcagggagcagcgaggaggcgccgggggagcgcagcaccagcgccagcgccgaggcggccccagatggaccggccctggaggaggcggccggacccctggtccccggcctggtgctgggggggttcgggaagaggaaggcgccgaaggtccagcctttcctgccaaggtggctggctgagcctaactgtgtcagaaggaatgtcaccgaagacctggttcctatcgaggacatccctgacgtccatcctgacctgcagaagcagctgcgggcacacggcatctcgtcctactttccagtccaggcagctgtgattcctgccctcctggagagcgcagcctgtgggtttctggtgggcagaggtggctaccggcctagcgacctctgtgtttctgccccaacaggcagtgggaagacactggccttcgtcatccctgtggtgcaggccctgctttcgagagtggtctgccacatccgtgccctggttgtgctgcccaccaaggagctggcccagcaggtgagcaaagttttcaacatctacacagatgccacacctctgagagtctccctggttacgggacagaagtctctggccaaggagcaggagagcctcgtccagaaaacagctgatgggtaccgctgcttggctgacatcgtggtagccacccccggccgcctggtggaccacatcgaccagaccccaggattcagcctccagcagctccgcttcctgattatcgacgaggctgaccggatgattgacagcatgcatcagtcctggctgccgcgggtggtggcggccgccttccagagcgaggaccccgcggacccctgtgccctgctccagcgaaggcaggcccaggctgtgacagccgccagcacctgctgtccccagatgcccctgcagaagctgctcttctcagctactctgacccagaaccctgaaaagctgcagcagctgggcctccaccagccccggcttttctccacagggctagcacacaggggcctggaagatacagatggggacggggattcggggaagtatgcctttcctgttgggctcacgcaccactacgtgccctgcagcctcagctctaagccgctggtcgtcctgcacctggtcctggagatgggcttctcgagggttctctgcttcactaactcccgagagaactcccacaggctcttcctgctggtgcaagcttttgggggtgtggacgtggctgagttctcctcgcgctacgggcctggccagaggaggatgatcctgaagcagtttgaacaggggaagatccagctgctcatcagcacggacgccaccgcgcgaggcatcgacgtgcagggtgtggagctggtggtgaactacgacgccccccagtacctgagaacctacgtgcaccgggttgggaggacagctcgcgctgggaaaactggacaggccttcacactgctcctgaaagtgcaggagaggagattcctccgaatgctaactgaagctggggcacctgagttgcagcggcacgagctctccagcaagctgctgcagccgctggttcctcggtacgaggaggccctgtcccagctggaggagtctgtcaaggaagagcgcaagcagagggcggcctaggctggggctcagagggccggagggactgaacgctcaccaccctgaccctccttccagagcagtgctgatcactggatcctgtatgtgaggaaaggaatcccccagtggacacagccttcctccccaagcacgtggtctctgcgccaggcagcccgggcgtcagagctcaagcacctgccccgactggagacttcagggcttgtcactttcagagtgtggaggtcaggatggctgcgggcaatgaagccttagtaaaacggtgaaaagtactcccagacggacgcgggcacccgtcatgcttttgctgagagttgggggcattaaccttgagctaatgttaaaaatcaagctcttggccaggcatggtggctcatgcctgtaattccagcactttgggaggccaaggcgggtggatcacctgaggtcacgagttcgagaccagcctgaccaacatggagaaaccctgtctctactaaaaatacaaaattagccaggcgtggtggtgcatgcctgtaatccagctacttgggaggctgaggcaggaaaatggcttgaacccgggaggtggaggttgcagtgagctgagattgcgccactgcactccagcctgggcaacaagagcaaaactccgtctcaaaaaaaaaaattgccgggcgcggtggcaaatgcctgtaatcccagcactttgggaggccgaggcaggtggatcacaaggtcaggagatagagaccatcattgctaacatggtgaaaccccgtctctactaaaaatacaaaaaaaaaaaaaaaacaactagccgggcgtggtggcgggcacctatagtcccagctactcgggaggctgaggcaggagaatggcgtgaacccgggaggcggagcttgcagtgagcggagactgcgccactgcactccagcctgggcaacagagtgagactccgtcaaaaaaaaagctctcctccccagatttgtgaaccttgtgactgttcagtggacacctcacatattgctggtgggaaggtcacgtggagacagctgggcaaagccttggggcgttaaacacagagtcactcatgacccagcacttcctctcctatgcaccttgtacaccccagatcaatgaaacctacatccacacagaaacgtacacaaatctctcagcagcactgttcacagtagccaaaaactagaaaccacatgtccgtcagctgatgaatggagaataaaacgtgggaaatccacaccaggagagaaaaaggagtgaggcaccagcataggcaccccgtggatgaacccggaacctgacgctaactgaaggaaggctccggctatagggagtgtcccaggcacagccagagattgaagggtgccggggccgggagttggtgggggttggggctggggacacagtggccagtgtgtgggtttgttttggggatgatgaaaatgttcttaggttgtgtgtggtgatggctgctcacctctataaaccttttactaaaaaccatggactgggtggatacagtgtgtgaattctctcagtccagtgctttgtttgaaaaaggtggatgatgccaacatcactaaccgccagggagacgcaggccacggccacacccggctcactggagttgtgaggatggaaacaccagcccaccccactcagttcagacctcagcttagatgcaaagaatgtctgggatggggactggcagctgattagagatgcaaccactgaacctgtggactgtgttcaaacaaatgccagcagaacacaaaaggcgactgttacaggaggcagaaagaaatgatttaggtagacggggtaaagccagtccccagcagaaaatttgccttttaacaaaaagcagctcaaaaatagctccctttctaacctcggggttcaaaatcacttctcacgacaagcagccagaaagagcagactgtgaatcacagatgagacagctcgggcacaggagtgcggggggtgtctcctgggtgatcaccaaacttcacacttccacaatgggccccagtaaaacagtggaccctaataagcacattcccgtccccttaggtgcactaagggaagctaaaagcagactgaggggtgcctgtaaccccaagaagatgtctgggagcagacccagagaccctcgcagaaaagtgtcacagagcagcacagactgagtctgacagaaactctctatacaaatagcacaccttgtcccagctaaaaccctgggccctgggaggacaagacatccctcctctaacccctcgtcactagcccatttgtaaaaaccttgacaggccgggcacggtggctcacacctgtaatcccagcactttgggaggctgaggcaggcgcatcacctgaggtcaggagatcgagaccatcctggccaacatggtgaaaccccatctctactaaaaatacaaaacttagctgagcgtggtggcgtgtgcctggagtcccaactactcaagaggctgaggcaggagaatcacttgcccgggaggtggaggttgcagtgggccaagatcagcccactgcactgcagcctggcgacagaaaaaaaagaaaccttgacatctttactacaacttagcaacccgctcaggccccctctgcaacggagagctcttcttcctttttgcttattaaacttctgctccaaa

SEQ ID NO: 125478 - DNA, 776 bp, Homo sapiens
  Payload ID: 4600
  Gene Symbol: DDX52
  Gene Name: DEAD (Asp-Glu-Ala-Asp) box polypeptide 52
  ENST ID: ENST00000613633
  CDS Start-End: 14-319
tttctgggtaaagatggacgtccacgatctctttcgccggctcggcgcgggggccaaattcgacacgagacgcttctcggcagacgcagctcgattccagataggaaaaaggaaatatgactttgattcttcggaggtgcttcagggactggacttttttggaaacaagaagtctgtcccaggtgtgtgtggagcatcacaaacacatcagaagccccaaaatggagagaaaaaagaagagagcctaactgaaaggaagagggagcagagcaagaaaaaaaggaagacgatgacttcagataaacttcttgcggaataaacacaaaattcacgtccaaggaaccgatcttcctgacccaattgctacatttcagcaacttgaccaggaatataaaatcaattctcgactacttcagaacattctagatgcaggtttccaaatgcctacgccaatccaaatgcaagccatcccagttatgctgcatggtcgggaacttctggcttctgctccaactggatctggaaaaacattagcttttagcattcctattttaatgcagctgaaacaacccgcaaataaaggcttcagagccctgattatatcaccaacacgagaacttgccagccagattcacagagagttaataaaaatttctgagggaacaggattcagaatacacatgatccacaaagcagcagtggcagccaagaaatttggacctaaatcatctaaaaagtttgatattcttgtgactactccaaatcgactaatctat

SEQ ID NO: 125479 - DNA, 6362 bp, Homo sapiens
  Payload ID: 4600
  Gene Symbol: DDX52
  Gene Name: DEAD (Asp-Glu-Ala-Asp) box polypeptide 52
  Uniprot ID: Q9Y2R4
  ENST ID: ENST00000617633
  CDS Start-End: 45-1844
agtctgcgcaggcgccgtagaactgtggcgctttctgggtaaagatggacgtccacgatctctttcgccggctcggcgcgggggccaaattcgacacgagacgcttctcggcagacgcagctcgattccagataggaaaaaggaaatatgactttgattcttcggaggtgcttcagggactggacttttttggaaacaagaagtctgtcccaggtgtgtgtggagcatcacaaacacatcagaagccccaaaatggagagaaaaaagaagagagcctaactgaaaggaagagggagcagagcaagaaaaaaaggaagacgatgacttcagaaattgcttcccaagaagaaggtgctactatacagtggatgtcatctgtagaagcaaagattgaagacaaaaaagttcagagagaaagtaaactaacttccggaaagttggagaatctcagaaaagaaaagataaacttcttgcggaataaacacaaaattcacgtccaaggaaccgatcttcctgacccaattgctacatttcagcaacttgaccaggaatataaaatcaattctcgactacttcagaacattctagatgcaggtttccaaatgcctacgccaatccaaatgcaagccatcccagttatgctgcatggtcgggaacttctggcttctgctccaactggatctggaaaaacattagcttttagcattcctattttaatgcagctgaaacaacccgcaaataaaggcttcagagccctgattatatcaccaacacgagaacttgccagccagattcacagagagttaataaaaatttctgagggaacaggattcagaatacacatgatccacaaagcagcagtggcagccaagaaatttggacctaaatcatctaaaaagtttgatattcttgtgactactccaaatcgactaatctatttattaaagcaagatccccccggaatcgacctagcaagtgttgagtggcttgtagtagacgaatcagataaactgtttgaagatggcaaaactgggttcagagaccagctggcttccattttcctggcctgcacatcccacaaggtccgaagagctatgttcagtgcaacttttgcatatgatgttgaacagtggtgcaaactcaacctggacaatgtcatcagtgtgtccattggagcaaggaattctgcagtagaaactgtagaacaagagcttctctttgttggatctgagaccggaaaacttctggccgtgagagaacttgttaaaaagggtttcaatccacctgttcttgtttttgttcagtccattgaaagggctaaagaactttttcatgagctcatatatgaaggtattaatgtggatgttattcatgcagagagaacacaacaacagagagataacacagtccacagtttcagagcaggaaaaatctgggttctgatttgtacagccttgctagcaagagggattgattttaaaggtgtgaacttggtgatcaactatgactttccaactagctcagtggaatatatccacaggataggtcgaactggaagagcagggaataagggaaaagcaattacatttttcactgaggatgataagccattattaagaagcgttgctaatgttatacagcaggctgggtgtcctgtaccagaatacataaaaggttttcagaaactactaagcaaacaaaagaaaaagatgattaagaaaccattggaaagggagagcattagtacaactccaaaatgtttcttagaaaaagctaaggataaacagaaaaaggtcactggtcagaacagcaagaagaaagtagctcttgaagacaaaagttaaaaacagactttaaaaatactgtcccagaaatgtaattttatgatcccagcatgaatgttattttcatggaatacttgaagtcttacagtcacctgtaccaaacatttgaaatcaactacaagtacatgggactggtgataaatgatcctaaactatcaagtcagtttcaatttgtaggtgccttttttttttcctgtagagatgagggtcttgccatgttgtccaggctggtcttgaactcctgacctcacacaatcctcctgccttagcctcctgagtaactgagattacaggcacaagctgctgcacccagctctgtaggtgacttttaaatgattatacaatggaaataacattcattgacatttctgtggtttgaatccagagagatacttcttatagaaaaacaaatgtttatgctaaaaataacaccaaaatgtggtgaactcttaaggacttttcccttcaagtgtgaaggaaggtgtgatgaatgctgtggagaggcatctggaacagaaattcaaaataaagccttgacattaaataccccttccactgctcactttgtggatggtagcatgagctgtctaccaagaagaaacctgctgctctcttaattttaatatttcctaatttgttgatggccttttgtgttgtgaaccacaacaaagagaggcctcttttgtggctggttattccagttccctgggattttaaattctttggtctattaagtatccttgtattggatacgtaataccttagtgctgtcataatgttgtacaagatcatgatcagcttctccctttcttcattttctgtgatttaaccatgttctttcctgtctctttccatttaagatattttatttgaatactgataaacattttatcctgataaggaagaatgttcttgttacttgatatacctctgtcttcattctcttacagcttatctttccttaggttgatggtgcctcatttaataagtagatctctacttaagctaaaggattatgatcatatggtgttggagactattagctattagatttttctcaaaatatgagttttgtacaatggaatgaaaaagtgacttcatatacgtaagactggtgcctaagaatgacttgaatgttatcagtactaccacagaactataatatacattgccttttctcagcagcatttgaattcaacttatttatttcctctatttgtagctttttgttctagagtcagaacaggtggactttgctttgaatattttagatgggacaaaaattgttcatcttcggaatttatttaaagaaagatctactggtacagggtgtaaaaatacttacaagaatatgatttttttgtttgttcatgcaaacagatcctttacccaatatatattctggaggtaggtatactggtgcaacccatttgccagctgtgtgactttgagtaagttcttaatttctcagagtttcagtgttctcatctataaaattatgtctccaattgtgagtacctagcactgtacctgatacatagtaaactcacaataaatatttcttaaacatagattttgttaggaatacaggcttgataacacagtccttacccttacaatgtaatgttagagataaaggagcaaatagagtcacgcatcacttaatgacagagatatgttctgagaaatgcatcgttaggtgatattgtcattgtgtaaacatcatgttgtttacttccacaaacctagatggtatagcctaccagtacacctaggctatatggtatagtctgttgctcctaggctacaaacccgtatagcatgttactgtcctgcatgctatagacagttggaacatgtagacttgtataaacactgcacacttaacctatactaaatttattgaaaatatttttcttggccaggcgtagtggctcatgcctgtaatcctaacacttcgggaggcctaggcgggcaggttgtctgagctcaggagtttagagaccagcccgggcaacatggcaaaaccccatctctactaaaaaaaataccaaaaaaagttagccgggtgtggtggcatagtcccggctactcaggagtctgaggcaggagaatagcttgaacctgtgaggcggaggttgcagtaagccgagatcgcgctactgcactccagcctgggcgacagggcaagactgtcttgaaaataaacacacacacacacattatatatattatgtattatatatattagatatatattttttcttcaataaattaaccttagcttactgtaacttttactttatgagtttttttgttttgtttttttttttttttttgagaaacagggtctgttacctaatttggagtttagtggcacaatcatggcccactgcagccttgacctcttagactcaagtgatcctcaaacctcagcctcccgagtagctggtactataggtgcgggccaccaacactcagctaatttttaaattttgtagagacgaggtcttgcttgttgtccagttgggttttttagatttttttttttttttttttttggagatggagtcttgctctgttgcccaggctggagtgcagtggcatgatctcggctcactgcaacctctgactcctgggttcaagtgattctcctgcctcagcctcccgagttgctgggactacaggcatgcgccaccacacccagctaatttttgtatttttagtgacagggtttcaccatgttggccaggctggtctcaaactcctgacctggagtgagccactatatccggcctttataaacttttttgattcttgtcataacacttagcctaaaatgcaaatgtacagctgtagaaaaatactttatttctttatatccttattctagaagctttttttctattaatttttgtttgtttgttttgttttactatttacttctaaaacttttttgttaaaaaccatggcacaaacacacacattatgctaggcatacaaaaggtcaggatcatcagtctcactgtcttccacccccacttctcatcccaccattgtatctgctgtctgtggctgaccaaaacatcatcatgtagcacatgactagtgtggcaagtgctctgttagatgtaaggccatgatgctaaagcatcacaagagggcatctaacccagattggggatgtcatggaaggccgacatcctgagttgaatcctgcaaatgtaaaaaccaataggcaaagaagaggaacaaaaaggattccaggacaaactgaggtcacatctatgatccttgactttattgtgtctgtttaaagtatctacagtaacctgtatcaacttagtcagtgtattaatactaaatttagctccttcaaagcagttggaactatgtgctacataaatttcagcttcacacaaggaagggaaggagtgaaattagtgaacaggcagttacagcaaaagaaaaaacataaaaattgaatagctggctctggtgaaatgagcaaggactttagagtcaaactggcctggatttgaatcctgatcctcattgcttgtagctgtatgatctggacaaatgacagtaactgtttctaaccttgattttctcatctgtaagatgccaattgtaactcctaaggatactgaggattttttaaaatgcgtgtacagttcctgaccagtggtttgtgcctaataacttattacaaattattacccagtaaaaaccttgagacaagagtgaaaacgtaaagctaattaatccattacttgttagcaagcaaactacgtgcttgagaaaattactcaactttcatgttttacttccagacagtagtttgattaaaagaaaaaaaaaaatcacagcccaggcatgtggctcacaccctggcacttggaggccgaggtgggagcatagcttgagcctagcagtttgaaactagcctgggcaacatagatcctatctctacaaaaaaaaaaaaaaaaaaaaaaaaaaaaattggcccggtgtggtggtgcatgcctgtggtcccagctactcaggaggctgaggcgagaggatcgcttgagccagggaggctgaggctgctgtgagccatgatcatgccactgcactccagcctggacaacagagcaagaccctgtctcaaaaaaaaaaaaaatcagtaaaaaatatgccgaaatagcttcagagtaattatgaattgccttccaaaaaccactgttttgcacttgcctgcaagaataggaaaaacaaaaggactgtaaggtggcaggatggcagaaccaaacaagagtagtacaccttggagttttttcgaaatatgggttgggtttttgggctcttggttgatttaaaataaaatttaaatgccttcagcgtctgtgataggtgccaacatgaagctaccgagttccagagaaagaggggagagctgatcactcatcagtgctgcgagactatcaaagggcccttcaggacctatctgttctttgtgtgtaaagagtaaca

SEQ ID NO: 125480 - DNA, 6359 bp, Homo sapiens
  Payload ID: 4600
  Gene Symbol: DDX52
  Gene Name: DEAD (Asp-Glu-Ala-Asp) box polypeptide 52
  Uniprot ID: Q9Y2R4
  ENST ID: ENST00000615769
  CDS Start-End: 45-1844
agtctgcgcaggcgccgtagaactgtggcgctttctgggtaaagatggacgtccacgatctctttcgccggctcggcgcgggggccaaattcgacacgagacgcttctcggcagacgcagctcgattccagataggaaaaaggaaatatgactttgattcttcggaggtgcttcagggactggacttttttggaaacaagaagtctgtcccaggtgtgtgtggagcatcacaaacacatcagaagccccaaaatggagagaaaaaagaagagagcctaactgaaaggaagagggagcagagcaagaaaaaaaggaagacgatgacttcagaaattgcttcccaagaagaaggtgctactatacagtggatgtcatctgtagaagcaaagattgaagacaaaaaagttcagagagaaagtaaactaacttccggaaagttggagaatctcagaaaagaaaagataaacttcttgcggaataaacacaaaattcacgtccaaggaaccgatcttcctgacccaattgctacatttcagcaacttgaccaggaatataaaatcaattctcgactacttcagaacattctagatgcaggtttccaaatgcctacgccaatccaaatgcaagccatcccagttatgctgcatggtcgggaacttctggcttctgctccaactggatctggaaaaacattagcttttagcattcctattttaatgcagctgaaacaacccgcaaataaaggcttcagagccctgattatatcaccaacacgagaacttgccagccagattcacagagagttaataaaaatttctgagggaacaggattcaggatacacatgatccacaaagcagcagtggcagccaagaaatttggacctaaatcatctaaaaagtttgatattcttgtgactactccaaatcgactaatctatttattaaagcaagatccccccggaatcgacctagcaagtgttgagtggcttgtagtagacgaatcagataaactgtttgaagatggcaaaactgggttcagagaccagctggcttccattttcctggcctgcacatcccacaaggtccgaagagctatgttcagtgcaacttttgcatatgatgttgaacagtggtgcaaactcaacctggacaatgtcatcagtgtgtccattggagcaaggaattctgcagtagaaactgtagaacaagagcttctctttgttggatctgagaccggaaaacttctggccatgagagaacttgttaaaaagggtttcaatccacctgttcttgtttttgttcagtccattgaaagggctaaagaactttttcatgagctcatatatgaaggtattaatgtggatgttattcatgcagagagaacacaacaacagagagataacacagtccacagtttcagagcaggaaaaatctgggttctgatttgtacagccttgctagcaagagggattgattttaaaggtgtgaacttggtgatcaactatgactttccaactagctcagtggaatatatccacaggataggtcgaactggaagagcagggaataagggaaaagcaattacatttttcactgaggatgataagccattattaagaagcgttgctaatgttatacagcaggctgggtgtcctgtaccagaatacataaaaggttttcagaaactactaagcaaacaaaagaaaaagatgattaagaaaccattggaaagggagagcattagtacaactccaaaatgtttcttagaaaaagctaaggataaacagaaaaaggtcactggtcagaacagcaagaagaaagtagctcttgaagacaaaagttaaaaacagactttaaaaatactgtcccagaaatgtaattttatgatcccagcatgaatgttattttcatggaatacttgaagtcttacagtcacctgtaccaaacatttgaaatcaactacaagtacatgggactggtgataaatgatcctaaactatcaagtcagtttcaatttgtaggtgccttttttttttcctgtagagatgagggtcttgccatgttgtccaggctggtcttgaactcctgacctcacacaatcctcctgccttagcctcctgagtaactgagattacaggcacaagctgctgcacccagctctgtaggtgacttttaaatgattatacaatggaaataacattcattgacatttctgtggtttgaatccagagagatacttcttatagaaaaacaaatgtttatgctaaaaataacaccaaaatgtggtgaactcttaaggacttttcccttcaagtgtgaaggaaggtgtgatgaatgctgtggagaggcatctggaacagaaattcaaaataaagccttgacattaaataccccttccactgctcactttgtggatggtagcatgagctgtctaccaagaagaaacctgctgctctcttaattttaatatttcctaatttgttgatggccttttgtgttgtgaaccacaacaaagagaggcctcttttgtggctggttattccagttccctgggattttaaattctttggtctattaagtatccttgtattggatacgtaataccttagtgctgtcataatgttgtacaagatcatgatcagcttctccctttcttcattttctgtgatttaaccatgttctttcctgtctctttccatttaagatattttatttgaatactgataaacattttatcctgataaggaagaatgttcttgttacttgatatacctctgtcttcattctcttacagcttatctttccttaggttgatggtgcctcatttaataagtagatctctacttaagctaaaggattatgatcatatggtgttggagactattagctattagatttttctcaaaatatgagttttgtacaatggaatgaaaaagtgacttcatatacgtaagactggtgcctaagaatgacttgaatgttatcagtactaccacagaactataatatacattgccttttctcagcagcatttgaattcaacttatttatttcctctatttgtagctttttgttctagagtcagaacaggtggactttgctttgaatattttagatgggacaaaaattgttcatcttcggaatttatttaaagaaagatctactggtacagggtgtaaaaatacttacaagaatatgatttttttgtttgttcatgcaaacagatcctttacccaatatatattctggaggtaggtatactggtgcaacccatttgccagctgtgtgactttgagtaagttcttaatttctcagagtttcagtgttctcatctataaaattatgtctccaattgtgagtacctagcactgtacctgatacatagtaaactcacaataaatatttcttaaacatagattttgttaggaatacaggcttgataacacagtccttacccttacaatgtaatgttagagataaaggagcaaatagagtcacgcatcacttaatgacagagatatgttctgagaaatgcatcgttaggtgatattgtcattgtgtaaacatcatgttgtttacttccacaaacctagatggtatagcctaccagtacacctaggctatatggtatagtctgttgctcctaggctacaaacccgtatagcatgttactgtcctgcatgctatagacagttggaacatgtagacttgtataaacactgcacacttaacctatactaaatttattgaaaatatttttcttggccaggcgtagtggctcatgcctgtaatcctaacacttcgggaggcctaggcgggcaggttgtctgagctcaggagtttagagaccagcccgggcaacatggcaaaaccccatctctactaaaaaaaataccaaaaaaagttagccgggtgtggtggcatagtcccggctactcaggagtctgaggcaggagaatagcttgaacctgtgaggcggaggttgcagtaagccgagatcgcgctactgcactccagcctgggcgacagggcaagactgtcttgaaaataaacacacacacacacattatatatattatgtattatatatattagatatatattttttcttcaataaattaaccttagcttactgtaacttttactttatgagtttttttgttttgttttgttttttttttttgagaaacagggtctgttacctaatttggagtttagtggcacaatcatggcccactgcagccttgacctcttagactcaagtgatcctcaaacctcagcctcccgagtagctggtactataggtgcgggccaccaacactcagctaatttttaaattttgtagagacgaggtcttgcttgttgtccagttgggttttttagacttttttttttttttttttttggagatggagtcttgctctgttgcccaggctggagtgcagtggcatgatctcggctcactgcaacctctgactcctgggttcaagtgattctcctgcctcagcctcccgagttgctgggactacaggcatgcgccaccacacccagctaatttttgtatttttagtgacagggtttcaccatgttggccaggctggtctcaaactcctgacctggagtgagccactatatctggcctttataaacttttttgattcttgtcataacacttagcctaaaatgcaaatgtacagctgtagaaaaatactttatttctttatatccttattctagaagctttttttctattaatttttgtttgtttgttttgttttactatttacttctaaaacttttttgttaaaaaccatggcacaaacacacacattatgctaggcatacaaaaggtcaggatcatcagtctcactgtcttccacccccacttctcatcccaccattgtatctgctgtctgtggctgaccaaaacatcatcatgtagcacatgactagtgtggcaagtgctctgttagatgtaaggccatgatgctaaagcatcacaagagggcatctaacccagattggggatgtcatggaaggccgacatcctgagttgaatcctgcaaatgtaaaaaccaataggcaaagaagaggaacaaaaaggattccaggacaaactgaggtcacatctatgatccttgactttattgtgtctgtttaaagtatctacagtaacctgtatcaacttagtcagtgtattaatactaaatttagctccttcaaagcagttggaactatgtgctacataaatttcagcttcacacaaggaagggaaggagtgaaattagtgaacaggcagttacagcaaaagaaaaaacataaaaattgaatagctggctctggtgaaatgagcaaggactttagagtcaaactggcctggatttgaatcctgatcctcattgcttgtagctgtatgatctggacaaatgacagtagctgtttctaaccttgattttctcatctgtaagatgccaattgtaactcctaaggatactgaggattttttaaaatgcgtgtacagttcctgaccagtggtttgtgcctaataacttattacaaattattacccagtaaaaaccttgagacaagagtgaaaacgtaaagctaattaatccattacttgttagcaagcaaactacgtgcttgagaaaattactcaactttcatgttttacttccagacagtagtttgattaaaagaaaaaaaaaaatcacagcccaggcatgtggctcacaccctggcacttggaggccgaggtgggagcatagcttgagcctagcagtttgaaactagcctgggcaacatagatcctatctctacaaaaaaaaaaaaaaaaaaaaaaaaattggcccggtgtggtggtgcatgcctgcggtcccagctactcaggaggctgaggcgagaggatcgcttgagccagggaggctgaggctgctgtgagccatgatcatgccactgcactccagcctggacaacagagcaagaccctgtctcaaaaaaaaaaaaaaatcagtaaaaaatatgccgaaatagcttcagagtaattatgaattgccttccaaaaaccactgttttgcacttgcctgcaagaataggaaaaacaaaaggactgtaaggtggcaggatggcagaaccaaacaagagtagtacaccttggagttttttcgaaatatgggttgggtttttgggctcttggttgatttaaaataaaatttaaatgccttcagcgtctgtgataggtgccaacatgaagctaccgagttccagagaaagaggggagagctgatcactcatcagtgctgcgagactatcaaagggcccttcaggacctatctgttctttgtgtgtaaagagtaaca

SEQ ID NO: 125481 - DNA, 3123 bp, Homo sapiens
  Payload ID: 4600
  Gene Symbol: DDX52
  Gene Name: DEAD (Asp-Glu-Ala-Asp) box polypeptide 52
  ENST ID: ENST00000620209
  CDS Start-End: 26-364
gaactgtggcgctttctgggtaaagatggacgtccacgatctctttcgccggctcggcgcgggggccaaattcgacacgagacgcttctcggcagacgcagctcgattccagataggaaaaaggaaatatgactttgattcttcggaggtgcttcagggactggacttttttggaaacaagaagtctgtcccaggtgtgtgtggagcatcacaaacacatcagaagccccaaaatggagagaaaaaagaagagagcctaactgaaaggaagagggagcagagcaagaaaaaaaggaagacgatgacttcagagacagggtttcaccatgttagccagtatggtctcgatctcctgacctcgtgattcacccaccttgggctcccaaagtgctgggattacagatgtgagccaccacgcccagccagaaattgcttcccaagaagaaggtgctactatacagtggatgtcatctgtagaagcaaagattgaagacaaaaaagttcagagagaaagtaaactaacttccggaaagttggagaatctcagaaaagaaaagataaacttcttgcggaataaacacaaaattcacgtccaaggaaccgatcttcctgacccaattgctacatttcagcaacttgaccaggaatataaaatcaattctcgactacttcagaacattctagatgcaggtttccaaatgcctacgccaatccaaatgcaagccatcccagttatgctgcatggtcgggaacttctggcttctgctccaactggatctggaaaaacattagcttttagcattcctattttaatgcagctgaaacaacccgcaaataaaggcttcagagccctgattatatcaccaacacgagaacttgccagccagattcacagagagttaataaaaatttctgagggaacaggattcagaatacacatgatccacaaagcagcagtggcagccaagaaatttggacctaaatcatctaaaaagtttgatattcttgtgactactccaaatcgactaatctatttattaaagcaagatccccccggaatcgacctagcaagtgttgagtggcttgtagtagacgaatcagataaactgtttgaagatggcaaaactgggttcagagaccagctggcttccattttcctggcctgcacatcccacaaggtccgaagagctatgttcagtgcaacttttgcatatgatgttgaacagtggtgcaaactcaacctggacaatgtcatcagtgtgtccattggagcaaggaattctgcagtagaaactgtagaacaagagcttctctttgttggatctgagaccggaaaacttctggccgtgagagaacttgttaaaaagggtttcaatccacctgttcttgtttttgttcagtccattgaaagggctaaagaactttttcatgagctcatatatgaaggtattaatgtggatgttattcatgcagagagaacacaacaacagagagataacacagtccacagtttcagagcaggaaaaatctgggttctgatttgtacagccttgctagcaagagggattgattttaaaggtgtgaacttggtgatcaactatgactttccaactagctcagtggaatatatccacaggataggtcgaactggaagagcagggaataagggaaaagcaattacatttttcactgaggatgataagccattattaagaagcgttgctaatgttatacagcaggctgggtgtcctgtaccagaatacataaaaggttttcagaaactactaagcaaacaaaagaaaaagatgattaagaaaccattggaaagggagagcattagtacaactccaaaatgtttcttagaaaaagctaaggataaacagaaaaaggtcactggtcagaacagcaagaagaaagtagctcttgaagacaaaagttaaaaacagactttaaaaatactgtcccagaaatgtaattttatgatcccagcatgaatgttattttcatggaatacttgaagtcttacagtcacctgtaccaaacatttgaaatcaactacaagtacatgggactggtgataaatgatcctaaactatcaagtcagtttcaatttgtaggtgccttttttttttcctgtagagatgagggtcttgccatgttgtccaggctggtcttgaactcctgacctcacacaatcctcctgccttagcctcctgagtaactgagattacaggcacaagctgctgcacccagctctgtaggtgacttttaaatgattatacaatggaaataacattcattgacatttctgtggtttgaatccagagagatacttcttatagaaaaacaaatgtttatgctaaaaataacaccaaaatgtggtgaactcttaaggacttttcccttcaagtgtgaaggaaggtgtgatgaatgctgtggagaggcatctggaacagaaattcaaaataaagccttgacattaaataccccttccactgctcactttgtggatggtagcatgagctgtctaccaagaagaaacctgctgctctcttaattttaatatttcctaatttgttgatggccttttgtgttgtgaaccacaacaaagagaggcctcttttgtggctggttattccagttccctgggattttaaattctttggtctattaagtatccttgtattggatacgtaataccttagtgctgtcataatgttgtacaagatcatgatcagcttctccctttcttcattttctgtgatttaaccatgttctttcctgtctctttccatttaagatattttatttgaatactgataaacattttatcctgataaggaagaatgttcttgttacttgatatacctctgtcttcattctcttacagcttatctttccttaggttgatggtgcctcatttaataagtagatctctacttaagctaaaggattatgatcatatggtgttggagactattagctattagatttttctcaaaatatgagttttgtacaatggaatgaaaaagtgacttcatatacgtaagactggtgcctaagaatgacttgaatgttatcagtactaccacagaactataatatacattgccttttctcagc

SEQ ID NO: 125482 - DNA, 2951 bp, Homo sapiens
  Payload ID: 4600
  Gene Symbol: DDX52
  Gene Name: DEAD (Asp-Glu-Ala-Asp) box polypeptide 52
  ENST ID: ENST00000616646
  CDS Start-End: 1-346
caactatgactttccaactagctcagtggaatatatccacaggataggtcgaactggaagagcagggaataagggaaaagcaattacatttttcactgaggatgataagccattattaagaagcgttgctaatgttatacagcaggctgggtgtcctgtaccagaatacataaaaggttttcagaaactactaagcaaacaaaagaaaaagatgattaagaaaccattggaaagggagagcattagtacaactccaaaatgtttcttagaaaaagctaaggataaacagaaaaaggtcactggtcagaacagcaagaagaaagtagctcttgaagacaaaagttaaaaacagactttaaaaatactgtcccagaaatgtaattttatgatcccagcatgaatgttattttcatggaatacttgaagtcttacagtcacctgtaccaaacatttgaaatcaactacaagtacatgggactggtgataaatgatcctaaactatcaagtcagtttcaatttgtaggtgccttttttttttcctgtagagatgagggtcttgccatgttgtccaggctggtcttgaactcctgacctcacacaatcctcctgccttagcctcctgagtaactgagattacaggcacaagctgctgcacccagctctgtaggtgacttttaaatgattatacaatggaaataacattcattgacatttctgtggtttgaatccagagagatacttcttatagaaaaacaaatgtttatgctaaaaataacaccaaaatgtggtgaactcttaaggacttttcccttcaagtgtgaaggaaggtgtgatgaatgctgtggagaggcatctggaacagaaattcaaaataaagccttgacattaaataccccttccactgctcactttgtggatggtagcatgagctgtctaccaagaagaaacctgctgctctcttaattttaatatttcctaatttgttgatggccttttgtgttgtgaaccacaacaaagagaggcctcttttgtggctggttattccagttccctgggattttaaattctttggtctattaagtatccttgtattggatacgtaataccttagtgctgtcataatgttgtacaagatcatgatcagcttctccctttcttcattttctgtgatttaaccatgttctttcctgtctctttccatttaagatattttatttgaatactgataaacattttatcctgataaggaagaatgttcttgttacttgatatacctctgtcttcattctcttacagcttatctttccttaggttgatggtgcctcatttaataagtagatctctacttaagctaaaggattatgatcatatggtgttggagactattagctattagatttttctcaaaatatgagttttgtacaatggaatgaaaaagtgacttcatatacgtaagactggtgcctaagaatgacttgaatgttatcagtactaccacagaactataatatacattgccttttctcagcagcatttgaattcaacttatttatttcctctatttgtagctttttgttctagagtcagaacaggtggactttgctttgaatattttagatgggacaaaaattgttcatcttcggaatttatttaaagaaagatctactggtacagggtgtaaaaatacttacaagaatatgatttttttgtttgttcatgcaaacagatcctttacccaatatatattctggaggtaggtatactggtgcaacccatttgccagctgtgtgactttgagtaagttcttaatttctcagagtttcagtgttctcatctataaaattatgtctccaattgtgagtacctagcactgtacctgatacatagtaaactcacaataaatatttcttaaacatagattttgttaggaatacaggcttgataacacagtccttacccttacaatgtaatgttagagataaaggagcaaatagagtcacgcatcacttaatgacagagatatgttctgagaaatgcatcgttaggtgatattgtcattgtgtaaacatcatgttgtttacttccacaaacctagatggtatagcctaccagtacacctaggctatatggtatagtctgttgctcctaggctacaaacccgtatagcatgttactgtcctgcatgctatagacagttggaacatgtagacttgtataaacactgcacacttaacctatactaaatttattgaaaatatttttcttggccaggcgtagtggctcatgcctgtaatcctaacacttcgggaggcctaggcgggcaggttgtctgagctcaggagtttagagaccagcccgggcaacatggcaaaaccccatctctactaaaaaaaataccaaaaaaagttagccgggtgtggtggcatagtcccggctactcaggagtctgaggcaggagaatagcttgaacctgtgaggcggaggttgcagtaagccgagatcgcgctactgcactccagcctgggcgacaggagcaagaccctgtctcaaaaaaaaaaaaaatcagtaaaaaatatgccgaaatagcttcagagtaattatgaattgccttccaaaaaccactgttttgcacttgcctgcaagaataggaaaaacaaaaggactgtaaggtggcaggatggcagaaccaaacaagagtagtacaccttggagttttttcgaaatatgggttgggtttttgggctcttggttgatttaaaataaaatttaaatgccttcagcgtctgtgataggtgccaacatgaagctaccgagttccagagaaagaggggagagctgatcactcatcagtgctgcgagactatcaaagggcccttcaggacctatctgttctttgtgtgtaaagagtaacaataaaagaacaccagtgtacccaccgtatagtttaaaaa

SEQ ID NO: 125483 - DNA, 2027 bp, Homo sapiens
  Payload ID: 4600
  Gene Symbol: DDX52
  Gene Name: DEAD (Asp-Glu-Ala-Asp) box polypeptide 52
  ENST ID: ENST00000612255
  CDS Start-End: 27-320
agaactgtggcgctttctgggtaaagatggacgtccacgatctctttcgccggctcggcgcgggggccaaattcgacacgagacgcttctcggcagacgcagctcgattccagataggaaaaaggaaatatgactttgattcttcggaggtgcttcagggactggacttttttggaaacaagaagtctgtcccaggtgtgtgtggagcatcacaaacacatcagaagccccaaaatggagagaaaaaagaagagagcctaactgaaaggaagagggagcagagcaagaaaaaaaggaagacgatgacttcaggtgaatgatgaactgtacatccattacaatggaatactacctagtaataaaacgaaattgcttcccaagaagaaggtgctactatacagtggatgtcatctgtagaagcaaagattgaagacaaaaaagttcagagagaaagtaaactaacttccggaaagttggagaatctcagaaaagaaaagataaacttcttgcggaataaacacaaaattcacgtccaaggaaccgatcttcctgacccaattgctacatttcagcaacttgaccaggaatataaaatcaattctcgactacttcagaacattctagatgcaggtttccaaatgcctacgccaatccaaatgcaagccatcccagttatgctgcatggtcgggaacttctggcttctgctccaactggatctggaaaaacattagcttttagcattcctattttaatgcagctgaaacaacccgcaaataaaggcttcagagccctgattatatcaccaacacgagaacttgccagccagattcacagagagttaataaaaatttctgagggaacaggattcagaatacacatgatccacaaagcagcagtggcagccaagaaatttggacctaaatcatctaaaaagtttgatattcttgtgactactccaaatcgactaatctatttattaaagcaagatccccccggaatcgacctagcaagtgttgagtggcttgtagtagacgaatcagataaactgtttgaagatggcaaaactgggttcagagaccagctggcttccattttcctggcctgcacatcccacaaggtccgaagagctatgttcagtgcaacttttgcatatgatgttgaacagtggtgcaaactcaacctggacaatgtcatcagtgtgtccattggagcaaggaattctgcagtagaaactgtagaacaagagcttctctttgttggatctgagaccggaaaacttctggccgtgagagaacttgttaaaaagggtttcaatccacctgttcttgtttttgttcagtccattgaaagggctaaagaactttttcatgagctcatatatgaaggtattaatgtggatgttattcatgcagagagaacacaacaacaggtaaagtcaaatatatactttgaaactcagaagaactacttgattttaaactattgacattaaatttatgaagtacctgttttcattctaaaacaatttaatatatattctgttaaccagagagataacacagtccacagtttcagagcaggaaaaatctgggttctgatttgtacagccttgctagcaagagggattgattttaaaggtgtgaacttggtgatcaactatgactttccaactagctcagtggaatatatccacaggataggtgagttgtcttttttttccttcccctctgtcacccactgatctgtcttaggacccctgctattccctgcacatatgctcacttcttagtgctgtgaaaatccagtgacttttataaatgaattttgagagcctccttccccccaaaatgtgttttttaatggtctaatttttcttaggtcgaactggaagagcagggaataagggaaaagcaattacatttttcactgaggatgataagccattattaagaagcgttgctaatgttatacagcaggctgggtgtcctgtaccagaatacataaaaggttttcagaaactactaag

SEQ ID NO: 125484 - DNA, 776 bp, Homo sapiens
  Payload ID: 4600
  Gene Symbol: DDX52
  Gene Name: DEAD (Asp-Glu-Ala-Asp) box polypeptide 52
  ENST ID: ENST00000632030
  CDS Start-End: 14-319
tttctgggtaaagatggacgtccacgatctctttcgccggctcggcgcgggggccaaattcgacacgagacgcttctcggcagacgcagctcgattccagataggaaaaaggaaatatgactttgattcttcggaggtgcttcagggactggacttttttggaaacaagaagtctgtcccaggtgtgtgtggagcatcacaaacacatcagaagccccaaaatggagagaaaaaagaagagagcctaactgaaaggaagagggagcagagcaagaaaaaaaggaagacgatgacttcagataaacttcttgcggaataaacacaaaattcacgtccaaggaaccgatcttcctgacccaattgctacatttcagcaacttgaccaggaatataaaatcaattctcgactacttcagaacattctagatgcaggtttccaaatgcctacgccaatccaaatgcaagccatcccagttatgctgcatggtcgggaacttctggcttctgctccaactggatctggaaaaacattagcttttagcattcctattttaatgcagctgaaacaacccgcaaataaaggcttcagagccctgattatatcaccaacacgagaacttgccagccagattcacagagagttaataaaaatttctgagggaacaggattcaggatacacatgatccacaaagcagcagtggcagccaagaaatttggacctaaatcatctaaaaagtttgatattcttgtgactactccaaatcgactaatctat

SEQ ID NO: 125485 - DNA, 3123 bp, Homo sapiens
  Payload ID: 4600
  Gene Symbol: DDX52
  Gene Name: DEAD (Asp-Glu-Ala-Asp) box polypeptide 52
  ENST ID: ENST00000633389
  CDS Start-End: 26-364
gaactgtggcgctttctgggtaaagatggacgtccacgatctctttcgccggctcggcgcgggggccaaattcgacacgagacgcttctcggcagacgcagctcgattccagataggaaaaaggaaatatgactttgattcttcggaggtgcttcagggactggacttttttggaaacaagaagtctgtcccaggtgtgtgtggagcatcacaaacacatcagaagccccaaaatggagagaaaaaagaagagagcctaactgaaaggaagagggagcagagcaagaaaaaaaggaagacgatgacttcagagacagggtttcaccatgttagccagtatggtctcgatctcctgacctcgtgattcacccaccttgggctcccaaagtgctgggattacagatgtgagccaccacgcccagccagaaattgcttcccaagaagaaggtgctactatacagtggatgtcatctgtagaagcaaagattgaagacaaaaaagttcagagagaaagtaaactaacttccggaaagttggagaatctcagaaaagaaaagataaacttcttgcggaataaacacaaaattcacgtccaaggaaccgatcttcctgacccaattgctacatttcagcaacttgaccaggaatataaaatcaattctcgactacttcagaacattctagatgcaggtttccaaatgcctacgccaatccaaatgcaagccatcccagttatgctgcatggtcgggaacttctggcttctgctccaactggatctggaaaaacattagcttttagcattcctattttaatgcagctgaaacaacccgcaaataaaggcttcagagccctgattatatcaccaacacgagaacttgccagccagattcacagagagttaataaaaatttctgagggaacaggattcaggatacacatgatccacaaagcagcagtggcagccaagaaatttggacctaaatcatctaaaaagtttgatattcttgtgactactccaaatcgactaatctatttattaaagcaagatccccccggaatcgacctagcaagtgttgagtggcttgtagtagacgaatcagataaactgtttgaagatggcaaaactgggttcagagaccagctggcttccattttcctggcctgcacatcccacaaggtccgaagagctatgttcagtgcaacttttgcatatgatgttgaacagtggtgcaaactcaacctggacaatgtcatcagtgtgtccattggagcaaggaattctgcagtagaaactgtagaacaagagcttctctttgttggatctgagaccggaaaacttctggccatgagagaacttgttaaaaagggtttcaatccacctgttcttgtttttgttcagtccattgaaagggctaaagaactttttcatgagctcatatatgaaggtattaatgtggatgttattcatgcagagagaacacaacaacagagagataacacagtccacagtttcagagcaggaaaaatctgggttctgatttgtacagccttgctagcaagagggattgattttaaaggtgtgaacttggtgatcaactatgactttccaactagctcagtggaatatatccacaggataggtcgaactggaagagcagggaataagggaaaagcaattacatttttcactgaggatgataagccattattaagaagcgttgctaatgttatacagcaggctgggtgtcctgtaccagaatacataaaaggttttcagaaactactaagcaaacaaaagaaaaagatgattaagaaaccattggaaagggagagcattagtacaactccaaaatgtttcttagaaaaagctaaggataaacagaaaaaggtcactggtcagaacagcaagaagaaagtagctcttgaagacaaaagttaaaaacagactttaaaaatactgtcccagaaatgtaattttatgatcccagcatgaatgttattttcatggaatacttgaagtcttacagtcacctgtaccaaacatttgaaatcaactacaagtacatgggactggtgataaatgatcctaaactatcaagtcagtttcaatttgtaggtgccttttttttttcctgtagagatgagggtcttgccatgttgtccaggctggtcttgaactcctgacctcacacaatcctcctgccttagcctcctgagtaactgagattacaggcacaagctgctgcacccagctctgtaggtgacttttaaatgattatacaatggaaataacattcattgacatttctgtggtttgaatccagagagatacttcttatagaaaaacaaatgtttatgctaaaaataacaccaaaatgtggtgaactcttaaggacttttcccttcaagtgtgaaggaaggtgtgatgaatgctgtggagaggcatctggaacagaaattcaaaataaagccttgacattaaataccccttccactgctcactttgtggatggtagcatgagctgtctaccaagaagaaacctgctgctctcttaattttaatatttcctaatttgttgatggccttttgtgttgtgaaccacaacaaagagaggcctcttttgtggctggttattccagttccctgggattttaaattctttggtctattaagtatccttgtattggatacgtaataccttagtgctgtcataatgttgtacaagatcatgatcagcttctccctttcttcattttctgtgatttaaccatgttctttcctgtctctttccatttaagatattttatttgaatactgataaacattttatcctgataaggaagaatgttcttgttacttgatatacctctgtcttcattctcttacagcttatctttccttaggttgatggtgcctcatttaataagtagatctctacttaagctaaaggattatgatcatatggtgttggagactattagctattagatttttctcaaaatatgagttttgtacaatggaatgaaaaagtgacttcatatacgtaagactggtgcctaagaatgacttgaatgttatcagtactaccacagaactataatatacattgccttttctcagc

SEQ ID NO: 125486 - DNA, 2027 bp, Homo sapiens
  Payload ID: 4600
  Gene Symbol: DDX52
  Gene Name: DEAD (Asp-Glu-Ala-Asp) box polypeptide 52
  ENST ID: ENST00000633356
  CDS Start-End: 27-320
agaactgtggcgctttctgggtaaagatggacgtccacgatctctttcgccggctcggcgcgggggccaaattcgacacgagacgcttctcggcagacgcagctcgattccagataggaaaaaggaaatatgactttgattcttcggaggtgcttcagggactggacttttttggaaacaagaagtctgtcccaggtgtgtgtggagcatcacaaacacatcagaagccccaaaatggagagaaaaaagaagagagcctaactgaaaggaagagggagcagagcaagaaaaaaaggaagacgatgacttcaggtgaatgatgaactgtacatccattacaatggaatactacctagtaataaaacgaaattgcttcccaagaagaaggtgctactatacagtggatgtcatctgtagaagcaaagattgaagacaaaaaagttcagagagaaagtaaactaacttccggaaagttggagaatctcagaaaagaaaagataaacttcttgcggaataaacacaaaattcacgtccaaggaaccgatcttcctgacccaattgctacatttcagcaacttgaccaggaatataaaatcaattctcgactacttcagaacattctagatgcaggtttccaaatgcctacgccaatccaaatgcaagccatcccagttatgctgcatggtcgggaacttctggcttctgctccaactggatctggaaaaacattagcttttagcattcctattttaatgcagctgaaacaacccgcaaataaaggcttcagagccctgattatatcaccaacacgagaacttgccagccagattcacagagagttaataaaaatttctgagggaacaggattcaggatacacatgatccacaaagcagcagtggcagccaagaaatttggacctaaatcatctaaaaagtttgatattcttgtgactactccaaatcgactaatctatttattaaagcaagatccccccggaatcgacctagcaagtgttgagtggcttgtagtagacgaatcagataaactgtttgaagatggcaaaactgggttcagagaccagctggcttccattttcctggcctgcacatcccacaaggtccgaagagctatgttcagtgcaacttttgcatatgatgttgaacagtggtgcaaactcaacctggacaatgtcatcagtgtgtccattggagcaaggaattctgcagtagaaactgtagaacaagagcttctctttgttggatctgagaccggaaaacttctggccatgagagaacttgttaaaaagggtttcaatccacctgttcttgtttttgttcagtccattgaaagggctaaagaactttttcatgagctcatatatgaaggtattaatgtggatgttattcatgcagagagaacacaacaacaggtaaagtcaaatatatactttgaaactcagaagaactacttgattttaaactattgacattaaatttatgaagtacctgttttcattctaaaacaatttaatatatattctgttaaccagagagataacacagtccacagtttcagagcaggaaaaatctgggttctgatttgtacagccttgctagcaagagggattgattttaaaggtgtgaacttggtgatcaactatgactttccaactagctcagtggaatatatccacaggataggtgagttgtcttttttttccttcccctctgtcacccactgatctgtcttaggacccctgctattccctgcacatatgctcacttcttagtgctgtgaaaatccagtgacttttataaatgaattttgagagcctccttccccccaaaatgtgttttttaatggtctaatttttcttaggtcgaactggaagagcagggaataagggaaaagcaattacatttttcactgaggatgataagccattattaagaagcgttgctaatgttatacagcaggctgggtgtcctgtaccagaatacataaaaggttttcagaaactactaag

SEQ ID NO: 125487 - DNA, 2952 bp, Homo sapiens
  Payload ID: 4600
  Gene Symbol: DDX52
  Gene Name: DEAD (Asp-Glu-Ala-Asp) box polypeptide 52
  ENST ID: ENST00000631762
  CDS Start-End: 1-346
caactatgactttccaactagctcagtggaatatatccacaggataggtcgaactggaagagcagggaataagggaaaagcaattacatttttcactgaggatgataagccattattaagaagcgttgctaatgttatacagcaggctgggtgtcctgtaccagaatacataaaaggttttcagaaactactaagcaaacaaaagaaaaagatgattaagaaaccattggaaagggagagcattagtacaactccaaaatgtttcttagaaaaagctaaggataaacagaaaaaggtcactggtcagaacagcaagaagaaagtagctcttgaagacaaaagttaaaaacagactttaaaaatactgtcccagaaatgtaattttatgatcccagcatgaatgttattttcatggaatacttgaagtcttacagtcacctgtaccaaacatttgaaatcaactacaagtacatgggactggtgataaatgatcctaaactatcaagtcagtttcaatttgtaggtgccttttttttttcctgtagagatgagggtcttgccatgttgtccaggctggtcttgaactcctgacctcacacaatcctcctgccttagcctcctgagtaactgagattacaggcacaagctgctgcacccagctctgtaggtgacttttaaatgattatacaatggaaataacattcattgacatttctgtggtttgaatccagagagatacttcttatagaaaaacaaatgtttatgctaaaaataacaccaaaatgtggtgaactcttaaggacttttcccttcaagtgtgaaggaaggtgtgatgaatgctgtggagaggcatctggaacagaaattcaaaataaagccttgacattaaataccccttccactgctcactttgtggatggtagcatgagctgtctaccaagaagaaacctgctgctctcttaattttaatatttcctaatttgttgatggccttttgtgttgtgaaccacaacaaagagaggcctcttttgtggctggttattccagttccctgggattttaaattctttggtctattaagtatccttgtattggatacgtaataccttagtgctgtcataatgttgtacaagatcatgatcagcttctccctttcttcattttctgtgatttaaccatgttctttcctgtctctttccatttaagatattttatttgaatactgataaacattttatcctgataaggaagaatgttcttgttacttgatatacctctgtcttcattctcttacagcttatctttccttaggttgatggtgcctcatttaataagtagatctctacttaagctaaaggattatgatcatatggtgttggagactattagctattagatttttctcaaaatatgagttttgtacaatggaatgaaaaagtgacttcatatacgtaagactggtgcctaagaatgacttgaatgttatcagtactaccacagaactataatatacattgccttttctcagcagcatttgaattcaacttatttatttcctctatttgtagctttttgttctagagtcagaacaggtggactttgctttgaatattttagatgggacaaaaattgttcatcttcggaatttatttaaagaaagatctactggtacagggtgtaaaaatacttacaagaatatgatttttttgtttgttcatgcaaacagatcctttacccaatatatattctggaggtaggtatactggtgcaacccatttgccagctgtgtgactttgagtaagttcttaatttctcagagtttcagtgttctcatctataaaattatgtctccaattgtgagtacctagcactgtacctgatacatagtaaactcacaataaatatttcttaaacatagattttgttaggaatacaggcttgataacacagtccttacccttacaatgtaatgttagagataaaggagcaaatagagtcacgcatcacttaatgacagagatatgttctgagaaatgcatcgttaggtgatattgtcattgtgtaaacatcatgttgtttacttccacaaacctagatggtatagcctaccagtacacctaggctatatggtatagtctgttgctcctaggctacaaacccgtatagcatgttactgtcctgcatgctatagacagttggaacatgtagacttgtataaacactgcacacttaacctatactaaatttattgaaaatatttttcttggccaggcgtagtggctcatgcctgtaatcctaacacttcgggaggcctaggcgggcaggttgtctgagctcaggagtttagagaccagcccgggcaacatggcaaaaccccatctctactaaaaaaaataccaaaaaaagttagccgggtgtggtggcatagtcccggctactcaggagtctgaggcaggagaatagcttgaacctgtgaggcggaggttgcagtaagccgagatcgcgctactgcactccagcctgggcgacaggagcaagaccctgtctcaaaaaaaaaaaaaaatcagtaaaaaatatgccgaaatagcttcagagtaattatgaattgccttccaaaaaccactgttttgcacttgcctgcaagaataggaaaaacaaaaggactgtaaggtggcaggatggcagaaccaaacaagagtagtacaccttggagttttttcgaaatatgggttgggtttttgggctcttggttgatttaaaataaaatttaaatgccttcagcgtctgtgataggtgccaacatgaagctaccgagttccagagaaagaggggagagctgatcactcatcagtgctgcgagactatcaaagggcccttcaggacctatctgttctttgtgtgtaaagagtaacaataaaagaacaccagtgtacccaccgtatagtttaaaaa

SEQ ID NO: 125488 - DNA, 3629 bp, Homo sapiens
  Payload ID: 4601
  Gene Symbol: DDX53
  Gene Name: DEAD (Asp-Glu-Ala-Asp) box polypeptide 53
  Uniprot ID: Q86TM3
  ENST ID: ENST00000327968
  CDS Start-End: 98-1993
tcttttggtgcagaaggtgacgggaaacaggccgcagacctgaacttccaaccgtatgtaggcgagaagccggtgccgatactcccactatcccacaatgtcccactgggccccagagtggaagagggcggaggctaatccaagagaccttggggccagctgggatgtcaggggcagcagaggcagtggctggagtggccccttcggccatcagggaccgagagcagcaggctcccgtgaaccaccactctgctttaaaataaagaacaatatggttggtgtggtcattggttacagtggatcaaaaataaaagatctacaacattcgacaaacactaaaatacagatcataaacggggaatctgaagcaaaagtcagaatttttggcaatagggaaatgaaagcaaaggccaaagcggctatagaaacacttattagaaaacaagaaagctacaactcagaatccagtgtggataatgctgcatcccaaacccctattggaagaaatctaggcagaaatgacattgttggagaagctgagccattgtcaaattgggatcgcattagggcagcagtcgtggagtgcgaaaagagaaaatgggcagatctaccaccagttaagaaaaacttttacatagaatccaaagcaacaagctgcatgtctgaaatgcaggtgattaactggagaaaggaaaatttcaacataacgtgtgatgacttgaaaagtggtgaaaagcgtctcattccaaaaccaacttgcaggtttaaagacgcttttcagcaataccctgatcttctgaaaagcataataagggtagggattgtaaagccaacgccaattcagtcacaggcatggccaattattctacaaggaatagatcttatagtagttgcacaaaccggaacagggaaaacattgtcctatctaatgcctgggtttattcatcttgattctcaaccaatatctagagagcaaaggaatgggcctgggatgctagtccttacacccactagagagttggctcttcacgtggaagctgaatgttcaaagtattcatataaaggtctcaaaagcatttgcatatatggtggtagaaacagaaatggacaaatagaagacattagcaaaggtgtagatatcattattgcaactcctgggaggctgaatgacctacaaatgaataactctgtcaacctaagaagcataacctacttggttatagatgaggcagataaaatgctggatatggaatttgaaccccagataaggaagattttattagatgtgcgcccagaccgacagactgttatgacaagtgcaacttggccagatactgtacgtcaactagcactttcttatttgaaagatcctatgattgtttatgttggtaatctgaatctagtggctgtaaatacagtgaagcaaaatataattgttaccacagaaaaagaaaaacgagctctcacccaagaattcgtagagaacatgtcacccaacgacaaagtcatcatgtttgtcagccaaaaacatattgctgatgacttgtcaagcgacttcaatatccaaggcatatctgcagaatcattacatggcaacagtgaacagagtgatcaagagcgagcagtagaggactttaaaagcggaaacataaagatactgattacaactgatatagtatcccgaggtcttgatcttaatgatgtcacacatgtatataattatgatttcccaaggaatattgacgtatatgtacacagagtagggtacattggacggacaggaaagactggcacatcagttaccctcatcactcagagagattcgaaaatggccggtgaattgattaaaattctggacagagcaaatcagagtgttccggaagatcttgtagtaatggctgagcaatacaagttaaatcaacaaaagaggcacagagaaacacgatcaagaaaacctggacaaagacgcaaggagttttattttttaagttgaaaagttgtaccaggctactggaagattccaggcatgttaaagatatgcagtattgaatatatgtaaggaagtattggaaacatactagccatttgaagacataactaattcttaaataatactgctaaactttcaatattgtgtatgctccttaattttaaaaaagtctcaaaaatgagagagtgagagactgtgtgaagagaaagtgaatgttacgtgttggttaaagtttaatttctcttaaaaatacttttattttaggtttgggggtatatgtgaaggtttgttaaagaaacacgtgccatgggggtttatcaactttcaatattgtgtatgttccttaattttagaaaaagtctcaaaaatgagagagagactatgtgaagagaaggtaaatgttatgtgttggttaaagtttaatttctcctaaaaatacttttattttaggtttgggggtatttgtgaaggtttgttaaagaaacacgtgtcatgggggtttatcaactttcaatattgtgtatgctccttaattttaaaaaagtctcaaaaatgagagagtgagagactatgtgaagagaaagtaaatgttacgtgttggttaaagtttaatttctcttaaaaatacttttattttaggtttgggggtatatgtgaaggtttgttaaagaaacacgtgtcatgggggtttatcaactttcaatattgtgtatgttccttaattttaaaaaagtctcaaaaatgagagagtgagagactatgtgaagagaaagtaaatgttatgtgttggttaaagtttaatttctcttaaaaatacttttattttaggtttgggggtatatgtgaaggtttgttaaagaaacacgtgtcatgggggtttactgtacatattatttcgtcacccaggtattaagaccagtgcccaataattatcttttctgctcttctgcctccttccaccctcccccatcagctagaccccagtgtctgctgtttccttctttgcgttcataagttctcatcgtttgcttcccacttataagtgagaacatgtggtatttgagtttctgttcttgtgttaattttatagtctaccatgtccatttgtcttctctaaaacacttggtagaagacaacaatggtgcttttctggctttaaaatagttgtactaaattgaagcatagcttcaagcttatccagtcaaagtattctcttttcccccgagcagttggtgccacaacagttcttaaagttatttccactatcattctctacttgttttagttcattagaaaataagtgctaaattttttagaagattccacaattctatttttatcagaatgatgtcaccagcagagcaggatgtctgactcactgggattcaggtccttgtatgcattttgtcactaacccttggttaaaactctgaggaaatcacttgccttctctaggcctcaatttctctactcataaaatgggacagttttattaatttagaggtctcttttacctctaaaattcggtgacattataactaaaactgtataccccagccttgtattaacacttttttgtctaatctaggggaaattgcatccttgtataattgaataaaacaatccttttcaatgacaa

SEQ ID NO: 125489 - DNA, 4377 bp, Homo sapiens
  Payload ID: 4602
  Gene Symbol: DDX54
  Gene Name: DEAD (Asp-Glu-Ala-Asp) box polypeptide 54
  Uniprot ID: Q8TDD1
  ENST ID: ENST00000306014
  CDS Start-End: 29-2674
ccttctgcgttcccagcgcgcggcccgaatggcggccgacaagggcccggcggctggacctcggtcgcgagctgccatggcccagtggaggaagaagaaagggctccggaagcgccgaggcgcggcctcccaggcccgcggcagcgactcggaggacggcgagtttgagatccaggcggaagatgacgcccgggcccggaagctgggacctggaagacccctgcccaccttccccacctcggaatgcacctcggatgtggagccggacacccgggagatggtgcgtgcccagaacaagaagaagaagaagtctggaggcttccagtccatgggcctgagctacccggtgttcaaaggcatcatgaagaaggggtacaaggtgccaacacccatccagaggaagaccatcccggtgatcttggatggcaaggacgtggtggccatggcccggacgggcagtggcaagacagcctgcttcctcctcccaatgttcgagcggctcaagacccacagtgcccagaccggggcccgcgccctcatcctctcgccgacccgagagctggccctgcagaccctgaagttcactaaggagctaggcaagttcactggcctcaagactgccctgatcctgggtggagacaggatggaagaccagtttgcagccctgcacgaaaatcccgacataattattgccacgcccggacggttggtgcatgtggctgtggaaatgagcctgaagctgcagagtgtggaatacgtggtgttcgatgaagctgaccggctttttgaaatgggtttcgcagagcagctgcaggagatcatcgcccgcctccccgggggccaccagacggtgctgttctccgccacgctgcccaaactgctggtggaatttgcccgggctggcctcacggagcccgtgctcatccggcttgacgtggataccaagctcaacgagcagctgaagacctccttcttcctcgtgcgggaggacaccaaggctgccgtgctgctccacctgctgcacaacgtggtgcggccccaggaccagaccgtggtgtttgtggccacgaagcaccacgccgagtacctcactgagctgctgacgacccagcgggtgagctgcgcccacatctacagtgccctagacccgacagcccgcaagatcaatctcgccaaattcacgcttggcaagtgctccactctcattgtgactgacctggccgcccgaggcctggacatcccgctgctggacaatgtcatcaactacagcttccccgccaagggcaaactcttcctgcaccgcgtgggccgtgtggctcgggctggccgaagtggcacagcctactccttggtggcccctgatgaaatcccctacctgctggatctgcacctgttcctgggccgctccctcaccctcgcccgacccctcaaggagccctcaggtgtggccggtgtggatggcatgctgggtcgggtgccacagagtgtggtggacgaggaggacagtggtctgcagagcaccctggaggcatcgctggagctacggggcctggcccgcgttgctgataacgcccagcagcagtatgtgcgctcacgcccggcgccctcgcctgagtccatcaagagggccaaggagatggaccttgtggggctgggcctgcaccccctcttcagctcgcgttttgaggaggaggagctgcagcggctgaggctggtggacagcataaagaactaccgctcccgggcgactatctttgagatcaacgcctccagccgagacctgtgcagccaggtgatgcgcgccaagcggcagaaggaccgcaaggccatcgcccgcttccagcagggacagcaggggcggcaggagcagcaggagggcccagtgggcccagccccgagccgcccagcactgcaggagaagcagcctgagaaggaggaggaggaggaggcgggagagagtgtggaggacattttctcagaggtcgtgggccggaagcggcagcggtcaggacccaacaggggagccaagaggcggagggaggaggcccggcagcgggaccaggaattctacatcccctaccggcccaaggactttgacagcgagcggggcctgagcatcagcggggaagggggagcctttgagcagcaggcagctggcgctgtcctggacttgatgggggatgaagcccagaacctgacgaggggccggcagcagctcaagtgggaccgtaagaagaagcggtttgtgggacagtcaggacaggaagacaagaagaagattaagacagagagcggccgctacatcagcagctcctacaagcgagacctctatcagaagtggaaacagaaacagaaaattgatgatcgtgactcggacgaagaaggggcatctgaccggcgaggcccagagcgaagaggtgggaagcgagaccgtggccaaggtgcatcccggccccacgccccaggcacccctgcaggccgagtccgcccggaactcaagaccaagcagcagatcctgaagcagcggcgccgggcccagaagctgcacttcctgcagcgtggtggcctcaagcagctctctgcccgcaaccgccgccgcgtccaggagctgcagcagggcgccttcggccggggtgcccgctccaagaagggcaagatgcggaagaggatgtgaggaccaggacccagccccgtggctccttgattggccttagggtgggcatcagcagacgttcccgtgcaccactgtgtgcctggccctgtgctgggcactgggggcactccctgcaggagccatcatctgtgaaaaggagcactgtatggccacagaagggcagcagctgcgtcagcctaagacagagacatttgaacagggccttgaagggtgtgcaggagttcgccagcaaagccaggcaggccaagacttgagttggcaactcagctgctgctgcttccatgtgttctgggttcagaggtcatggctgcaccggtcagagccctgagtgcctcagggtttggcaatggaatttttaatgtaataaatctttattgagcactgctggtggccaggagtgcggtctacttggggaactggaatggagagacccaggtactaaaatcccagctaacgtggcagaggagttgcgggtctcctgagggtgagttctgctgccttgtccatttagcgatgaggaaagtgaagctcagagcacaaaccaggtgccagaggcgggagttggtcccccttcctcccactggacatggttgcagctgggagtgggctgggggaggggaacaggatgcccagcccagggggcaaggacacagctgctcccctctggctatgaagaggttaacgcggcccctccacacctggaggtcagaacctggcctgtcctctgtcttcttgccacccaccccctgtttgaggttctgagaaggtcaagggcagccccagcagctggattctcaggctgggcccctcacctggcagagtccatagtggagggggccttggtgatctctcatctagcatggaccctgttctgagacctgacaaagagttttttttcatgccccaaccaccctggcagggagggcctggtctgatctcattttagaggcagttgccccacacatagccccttgaccttcccatcacctcctcatcagggcctgcatttatggagtgcttgctatgtgcccctcatggcaggcccacagcactctgaacaggcacagccctcccatcttcccaatgaggaaacggattcaggaagagccactcagtccacaccccattggaaatgtgggccctcctatctcagggtctctcaggggttccctctcccgctgctcacctgtgtcagggctaggaggcaggggctgcaggctcagcctgacccaggccggccagcatggcagagaggtcctgcatgaacagcttcacctgggggggcccagcacgaagtcacatcccagccccagagtcactgtccagcccccacccctcaacacgcgggggaggccgaaaggtagggcggggactggagatcccctcattaaaagaacagtgatgatggtggttcccagaggtggtgactgagatcctaaaccgttctgggttttgaaagcctcaggccaaccttcccaactgctgcgtgagcagacaccttcacagcttcctcgctgctgtcacctgcactatccaattagtattttcatttacatcaatcagctttattttcttgtaactggatcagtcatattcattggtttgtgacctactcttatctccgtgggtggctctccttttgttttaattaacttctttatgaatatgaacttaataaataccatggatccattgtaaaaact

SEQ ID NO: 125490 - DNA, 4380 bp, Homo sapiens
  Payload ID: 4602
  Gene Symbol: DDX54
  Gene Name: DEAD (Asp-Glu-Ala-Asp) box polypeptide 54
  Uniprot ID: Q8TDD1
  ENST ID: ENST00000314045
  CDS Start-End: 29-2677
ccttctgcgttcccagcgcgcggcccgaatggcggccgacaagggcccggcggctggacctcggtcgcgagctgccatggcccagtggaggaagaagaaagggctccggaagcgccgaggcgcggcctcccaggcccgcggcagcgactcggaggacggcgagtttgagatccaggcggaagatgacgcccgggcccggaagctgggacctggaagacccctgcccaccttccccacctcggaatgcacctcggatgtggagccggacacccgggagatggtgcgtgcccagaacaagaagaagaagaagtctggaggcttccagtccatgggcctgagctacccggtgttcaaaggcatcatgaagaaggggtacaaggtgccaacacccatccagaggaagaccatcccggtgatcttggatggcaaggacgtggtggccatggcccggacgggcagtggcaagacagcctgcttcctcctcccaatgttcgagcggctcaagacccacagtgcccagaccggggcccgcgccctcatcctctcgccgacccgagagctggccctgcagaccctgaagttcactaaggagctaggcaagttcactggcctcaagactgccctgatcctgggtggagacaggatggaagaccagtttgcagccctgcacgaaaatcccgacataattattgccacgcccggacggttggtgcatgtggctgtggaaatgagcctgaagctgcagagtgtggaatacgtggtgttcgatgaagctgaccggctttttgaaatgggtttcgcagagcagctgcaggagatcatcgcccgcctccccgggggccaccagacggtgctgttctccgccacgctgcccaaactgctggtggaatttgcccgggctggcctcacggagcccgtgctcatccggcttgacgtggataccaagctcaacgagcagctgaagacctccttcttcctcgtgcgggaggacaccaaggctgccgtgctgctccacctgctgcacaacgtggtgcggccccaggaccagaccgtggtgtttgtggccacgaagcaccacgccgagtacctcactgagctgctgacgacccagcgggtgagctgcgcccacatctacagtgccctagacccgacagcccgcaagatcaatctcgccaaattcacgcttggcaagtgctccactctcattgtgactgacctggccgcccgaggcctggacatcccgctgctggacaatgtcatcaactacagcttccccgccaagggcaaactcttcctgcaccgcgtgggccgtgtggctcgggctggccgaagtggcacagcctactccttggtggcccctgatgaaatcccctacctgctggatctgcacctgttcctgggccgctccctcaccctcgcccgacccctcaaggagccctcaggtgtggccggtgtggatggcatgctgggtcgggtgccacagagtgtggtggacgaggaggacagtggtctgcagagcaccctggaggcatcgctggagctacggggcctggcccgcgttgctgataacgcccagcagcagtatgtgcgctcacgcccggcgccctcgcctgagtccatcaagagggccaaggagatggaccttgtggggctgggcctgcaccccctcttcagctcgcgttttgaggaggaggagctgcagcggctgaggctggtggacagcataaagaactaccgctcccgggcgactatctttgagatcaacgcctccagccgagacctgtgcagccaggtgatgcgcgccaagcggcagaaggaccgcaaggccatcgcccgcttccagcagggacagcaggggcggcaggagcagcaggagggcccagtgggcccagccccgagccgcccagcactgcaggagaagcagcctgagaaggaggaggaggaggaggcgggagagagtgtggaggacattttctcagaggtcgtgggccggaagcggcagcggtcaggacccaacaggggagccaagaggcggagggaggaggcccggcagcgggaccaggaattctacatcccctaccggcccaaggactttgacagcgagcggggcctgagcatcagcggggaagggggagcctttgagcagcaggcagctggcgctgtcctggacttgatgggggatgaagcccagaacctgacgaggggccggcagcagctcaagtgggaccgtaagaagaagcggtttgtgggacagtcaggacaggaagacaagaagaagattaagacagagagcggccgctacatcagcagctcctacaagcgagacctctatcagaagtggaaacagaaacagaaaattgatgatcgtgactcggacgaagaaggggcatctgaccggcgaggcccagagcgaagaggtgggaagcgagaccgtggccaagcaggtgcatcccggccccacgccccaggcacccctgcaggccgagtccgcccggaactcaagaccaagcagcagatcctgaagcagcggcgccgggcccagaagctgcacttcctgcagcgtggtggcctcaagcagctctctgcccgcaaccgccgccgcgtccaggagctgcagcagggcgccttcggccggggtgcccgctccaagaagggcaagatgcggaagaggatgtgaggaccaggacccagccccgtggctccttgattggccttagggtgggcatcagcagacgttcccgtgcaccactgtgtgcctggccctgtgctgggcactgggggcactccctgcaggagccatcatctgtgaaaaggagcactgtatggccacagaagggcagcagctgcgtcagcctaagacagagacatttgaacagggccttgaagggtgtgcaggagttcgccagcaaagccaggcaggccaagacttgagttggcaactcagctgctgctgcttccatgtgttctgggttcagaggtcatggctgcaccggtcagagccctgagtgcctcagggtttggcaatggaatttttaatgtaataaatctttattgagcactgctggtggccaggagtgcggtctacttggggaactggaatggagagacccaggtactaaaatcccagctaacgtggcagaggagttgcgggtctcctgagggtgagttctgctgccttgtccatttagcgatgaggaaagtgaagctcagagcacaaaccaggtgccagaggcgggagttggtcccccttcctcccactggacatggttgcagctgggagtgggctgggggaggggaacaggatgcccagcccagggggcaaggacacagctgctcccctctggctatgaagaggttaacgcggcccctccacacctggaggtcagaacctggcctgtcctctgtcttcttgccacccaccccctgtttgaggttctgagaaggtcaagggcagccccagcagctggattctcaggctgggcccctcacctggcagagtccatagtggagggggccttggtgatctctcatctagcatggaccctgttctgagacctgacaaagagttttttttcatgccccaaccaccctggcagggagggcctggtctgatctcattttagaggcagttgccccacacatagccccttgaccttcccatcacctcctcatcagggcctgcatttatggagtgcttgctatgtgcccctcatggcaggcccacagcactctgaacaggcacagccctcccatcttcccaatgaggaaacggattcaggaagagccactcagtccacaccccattggaaatgtgggccctcctatctcagggtctctcaggggttccctctcccgctgctcacctgtgtcagggctaggaggcaggggctgcaggctcagcctgacccaggccggccagcatggcagagaggtcctgcatgaacagcttcacctgggggggcccagcacgaagtcacatcccagccccagagtcactgtccagcccccacccctcaacacgcgggggaggccgaaaggtagggcggggactggagatcccctcattaaaagaacagtgatgatggtggttcccagaggtggtgactgagatcctaaaccgttctgggttttgaaagcctcaggccaaccttcccaactgctgcgtgagcagacaccttcacagcttcctcgctgctgtcacctgcactatccaattagtattttcatttacatcaatcagctttattttcttgtaactggatcagtcatattcattggtttgtgacctactcttatctccgtgggtggctctccttttgttttaattaacttctttatgaatatgaacttaataaataccatggatccattgtaaaaact

SEQ ID NO: 125491 - DNA, 479 bp, Homo sapiens
  Payload ID: 4602
  Gene Symbol: DDX54
  Gene Name: DEAD (Asp-Glu-Ala-Asp) box polypeptide 54
  ENST ID: ENST00000546898
  CDS Start-End: 1-479
gccctcgcctgagtccatcaagagggccaaggagatggaccttgtggggctgggcctgcaccccctcttcagctcgcgttttgaggaggaggagctgcagcggctgaggctggtggacagcataaagaactaccgctcccgggcggacattttctcagaggtcgtgggccggaagcggcagcggtcaggacccaacaggggagccaagaggcggagggaggaggcccggcagcgggaccaggaattctacatcccctaccggcccaaggactttgacagcgagcggggcctgagcatcagcggggaagggggagcctttgagcagcaggcagctggcgctgtcctggacttgatgggggatgaagcccagaacctgacgaggggccggcagcagctcaagtgggaccgtaagaagaagcggtttgtgggacagtcaggacaggaagacaagaagaagattaagacagagagcggccgct

SEQ ID NO: 125492 - DNA, 872 bp, Homo sapiens
  Payload ID: 4602
  Gene Symbol: DDX54
  Gene Name: DEAD (Asp-Glu-Ala-Asp) box polypeptide 54
  ENST ID: ENST00000551344
  CDS Start-End: 1-247
caagggcccggcggctggacctcggtcgcgagctgccatggcccagtggaggaagaagaaagggctccggaagcgccgaggcgcggcctcccaggcccgcggcagcgactcggaggacggcgagtttgagatccaggcggaagatgacgcccgggcccggaagctgggacctggaagacccctgcccaccttccccacctcggaatgcacctcggatgtggagccggacacccgggagatggcctgagctacccggtgttcaaaggcatcatgaagaaggggtacaaggtgccaacacccatccagaggaagaccatcccggtgatcttggatggcaaggacgtggtggccatggcccggacgggcagtggcaagacagcctgcttcctcctcccaatgttcgagcggctcaagacccacagtgcccagaccggggcccgcgccctcatcctctcgccgacccgagagctggccctgcagaccctgaagttcactaaggagctaggcaagttcactggcctcaagactgccctgatcctgggtggagacaggatggaagaccagtttgcagccctgcacgaaaatcccgacataattattgccacgcccggacggttggtgcatgtggctgtggaaatgagcctgaagctgcagagtgtggaatacgtggtgttcgatgaagctgaccggctttttgaaatgggtttcgcagagcagctgcaggagatcatcgcccgcctccccgggggccaccagacggtgctgttctccgccacgctgcccaaactgctggtggaatttgcccgggctggcctcacggagcccgtgctcatccggcttgacgtggataccaagctcaacgagcagctgaa

SEQ ID NO: 125493 - DNA, 780 bp, Homo sapiens
  Payload ID: 4602
  Gene Symbol: DDX54
  Gene Name: DEAD (Asp-Glu-Ala-Asp) box polypeptide 54
  ENST ID: ENST00000552375
  CDS Start-End: 156-780
aaaaaagaaaaaaaaaaaaaagggagatcccatctttacaaaaaaagagagaaagcagcttgaccaagacctcacagcttctgggacctggaagacccctgcccaccttccccacctcggaatgcacctcggatgtggagccggacacccgggagatggtgcgtgcccagaacaagaagaagaagaagtctggaggcttccagtccatgggcctgagctacccggtgttcaaaggcatcatgaagaaggggtacaaggtgccaacacccatccagaggaagaccatcccggtgatcttggatggcaaggacgtggtggccatggcccggacgggcagtggcaagacagcctgcttcctcctcccaatgttcgagcggctcaagacccacagtgcccagaccggggcccgcgccctcatcctctcgccgacccgagagctggccctgcagaccctgaagttcactaaggagctaggcaagttcactggcctcaagactgccctgatcctgggtggagacaggatggaagaccagtttgcagccctgcacgaaaatcccgacataattattgccacgcccggacggttggtgcatgtggctgtggaaatgagcctgaagctgcagagtgtggaatacgtggtgttcgatgaagctgaccggctttttgaaatgggtttcgcagagcagctgcaggagatcatcgcccgcctccccgggggccaccagacggtgctgttctccgccacgctgcccaaactgctggtggaatttgcccgggctg

SEQ ID NO: 125494 - DNA, 2654 bp, Homo sapiens
  Payload ID: 4603
  Gene Symbol: DDX55
  Gene Name: DEAD (Asp-Glu-Ala-Asp) box polypeptide 55
  Uniprot ID: Q8NHQ9
  ENST ID: ENST00000238146
  CDS Start-End: 51-1853
gcacaaggcgcgttcgagcagcggcgaccgacgcggcgaaggagcgcgccatggagcatgtgacagagggctcctgggagtcgctgcctgtgccgctgcacccgcaggtgctgggcgcgctgcgggagctgggcttcccgtacatgacgccggtgcagtccgcaaccatccctctgttcatgcgaaacaaagatgtcgctgcagaagcggtcacaggtagtggcaaaacactcgcttttgtcatccccatcctggaaattcttctgagaagagaagagaagttaaaaaagagtcaggttggagccataatcatcacccccactcgagagctggccattcaaatagacgaggtcctgtcgcatttcacgaagcacttccccgagttcagccagattctttggatcggaggcaggaatcctggagaagatgttgagaggtttaagcaacaaggtgggaacatcattgtggccactccaggccgcttggaggacatgttccggaggaaggccgaaggcttggatctggccagctgtgtgcgatccctggatgtcctggtgttggatgaggcagacagacttctggacatggggtttgaggcaagcatcaacaccattctggagtttttgccaaagcagaggagaacaggccttttctctgccactcagacgcaggaagtggagaacctggtgagagcgggcctccggaaccctgtccgggtctcagtgaaggagaagggcgtggcagccagcagtgcccagaagaccccctcccgcctggaaaactactacatggtatgcaaggcagatgagaaatttaatcagctggtccattttcttcgcaatcataagcaggagaaacacctggtcttcttcagcacctgtgcctgtgtggaatactatgggaaggctctggaagtgctggtgaagggcgtgaagattatgtgcattcacggaaagatgaaatataaacgcaataagatcttcatggagttccgcaaattgcaaagtgggattttagtgtgcactgatgtgatggcccggggaattgatattcctgaagtcaactgggttttgcagtatgaccctcccagcaatgcaagtgccttcgtgcatcgctgcggtcgcacagctcgcattggccacgggggcagcgctctggtgttcctcctgcccatggaagagtcatacatcaatttccttgcaattaaccaaaaatgccccctgcaggagatgaagccccagagaaacacagcggaccttctgccaaaactcaagtccatggccctggctgacagagctgtgtttgaaaagggcatgaaagcttttgtgtcatatgtccaagcttatgcaaagcatgaatgcaacctgattttcagattaaaggatcttgattttgccagccttgctcgaggttttgccctgctgaggatgcccaagatgccagaattgagaggaaagcagtttccagattttgtgcccgtggacgttaataccgacacgattccatttaaagataaaatcagagaaaagcagaggcagaaactcctggagcaacaaagaagagagaaaacagaaaatgaagggagaagaaaattcataaaaaataaagcttggtcaaagcagaaggccaaaaaagaaaagaagaaaaaaatgaatgagaaaaggaaaagggaagagggttctgatattgaagatgaggacatggaagaacttcttaatgacacaagactcttgaaaaaacttaagaaaggcaaaataactgaagaagaatttgagaagggcttgttgacaactggcaaaagaacaatcaagacagtggatttagggatctcagatttggaagatgactgctgattccagtgccacagatgaacccacaaggacatagctgttccctaacttggtggatggctccagtttgcttttaacgaaaatcacaacttcaggagacatctgaaaagaatgatgtctctgaaagctgtcctttcagatgagggagaaatgaaggatttcacacttcagaatattttactaaaaacattccagtcttggccgggtgcggtggctcctgcctataatcccagcactttgggaggctgaggcaggaggatcacttgagcccaggagttcaagaccagcctgggaacacagcgagaccctctcattaaaaacaacaaaacaaaacaattccagtcttggagtagtctaacagaagaaaatgtaaaattatttgagtgtaaataatagatgtcagtatttatcatgatgggtcacatatagacatatgtacatattatatatatatatatatatatatatatatatatatatatatatatataagctcttttttctgaggctattttatagttatttttaaacataaagatacagaagtcttcttgacttctgattttcaaaaccattcctcagtatcttcaggcatttgacctcctgaatgtgcttggccctgggcttcagttatcctttgatgtcctgcaggggtggctaatgtgctggggtttttctgtgttaatagtcacagtattgttttattggtgaatagctgaaaaacagagggattaagtcatattccgggaaagagaattatagtttttatgcctcctgttgaataaatggtgtcctgattgcctg

SEQ ID NO: 125495 - DNA, 1004 bp, Homo sapiens
  Payload ID: 4603
  Gene Symbol: DDX55
  Gene Name: DEAD (Asp-Glu-Ala-Asp) box polypeptide 55
  ENST ID: ENST00000354291
  CDS Start-End: 20-595
cgcggcgaaggagcgcgccatggagcatgtgacagagggctcctgggagtcgctgcctgtgccgctgcacccgcaggtgctgggcgcgctgcgggagctgggcttcccgtacatgacgccggtgcagtccgcaaccatccctctgttcatgcgaaacaaagatgtcgctgcagaagcggtcacaggtagtggcaaaacactcgcttttgtcatccccatcctggaaattcttctgagaagagaagagaagttaaaaaagagtcaggttggagccataatcatcacccccactcgagagctggccattcaaatagacgaggtcctgtcgcatttcacgaagcacttccccgagttcagccagattctttggatcggaggcaggaatcctggagaagatgttgagaggtttaagcaacaaggtgggaacatcattgtggccactccaggccgcttggaggacatgttccggaggaaggccgaaggcttggatctggccagctgtgtgcgatccctggatgtcctggtgttggatgaggcagacagacttctggacatggggtttgaggcaagacgcaggaagtggagaacctggtgagagcgggcctccggaaccctgtccgggtctcagtgaaggagaagggcgtggcagccagcagtgcccagaagaccccctcccgcctggaaaactactacatggtatgcaaggcagatgagaaatttaatcagctggtccattttcttcgcaatcataagcaggagaaacacctggtcttcttcagcacctgtgcctgtgtggaatactatgggaaggctctggaagtgctggtgaagggcgtgaagattatgtgcattcacggaaagatgaaatataaacgcaataagatcttcatggagttccgcaaattgcaaagtgggattttagtgtgcactgatgtgatggcccggggaattgatattcctgaagtcaactgggttttgcagtatgaccctcccagcaatgcaag

SEQ ID NO: 125496 - DNA, 1574 bp, Homo sapiens
  Payload ID: 4603
  Gene Symbol: DDX55
  Gene Name: DEAD (Asp-Glu-Ala-Asp) box polypeptide 55
  Uniprot ID: Q8NHQ9
  ENST ID: ENST00000421670
  CDS Start-End: 669-1292
ttttttttttttttttttgagacggagtttcactcttgttgcccaggctggagtgcaatggcactatctcggttcaccgcaacctccacctcccgggttcaatggattctcctgcctcagcctcccaagtagctgggattacaggcatgcgccaccccagctaattttgtatttttagtagagatggggtttctccatgttggtcaggctggtcttgaactcccgacctcaggtgatccgcccacctcggcctcccaaagtgctgggatgacaggcgtgagccaccgtgcccggccaccctggtgggctttaaggctgtggaggcacctcggtcatggagtgaccaagtctcctgtgtggtagcatgccctgctgggacccaggcaagggttacttcttgtgaatagagacccagtgttgccatactttgctaccagattaggattgtcatgtgaaatctgatttttaaattttcttttaaaaatttaacatactttacagagcatgtgaaatatttgggttggagttgggcttcagacctcaacagttgaaaaggaattgtttcgcttttgtttttcttggttgtgatggggagccctggggatatgatgccagccagggaaggtgagaatgtggtatgtgtgtgtgtgtagtgccccctgcaggagatgaagccccagagaaacacagcggaccttctgccaaaactcaagtccatggccctggctgacagagctgtgtttgaaaagggcatgaaagcttttgtgtcatatgtccaagcttatgcaaagcatgaatgcaacctgattttcagattaaaggatcttgattttgccagccttgctcgaggttttgccctgctgaggatgcccaagatgccagaattgagaggaaagcagtttccagattttgtgcccgtggacgttaataccgacacgattccatttaaagataaaatcagagaaaagcagaggcagaaactcctggagcaacaaagaagagagaaaacagaaaatgaagggagaagaaaattcataaaaaataaagcttggtcaaagcagaaggccaaaaaagaaaagaagaaaaaaatgaatgagaaaaggaaaagggaagagggttctgatattgaagatgaggacatggaagaacttcttaatgacacaagactcttgaaaaaacttaagaaaggcaaaataactgaagaagaatttgagaagggcttgttgacaactggcaaaagaacaatcaagacagtggatttagggatctcagatttggaagatgactgctgattccagtgccacagatgaacccacaaggacatagctgttccctaacttggtggatggctccagtttgcttttaacgaaaatcacaacttcaggagacatctgaaaagaatgatgtctctgaaagctgtcctttcagatgagggagaaatgaaggatttcacacttcagaatattttactaaaaacattccagtcttggccgggtgcggtggctcctgcctataatcccagcactttgggaggctgaggcaggaggatcacttgagcccaggagttcaagacc

SEQ ID NO: 125497 - DNA, 956 bp, Homo sapiens
  Payload ID: 4603
  Gene Symbol: DDX55
  Gene Name: DEAD (Asp-Glu-Ala-Asp) box polypeptide 55
  ENST ID: ENST00000544738
  CDS Start-End: 25-177
accgacgcggcgaaggagcgcgccatggagcatgtgacagagggctcctgggagtcgctgcctgtgccgctgcacccgcaggtgctgggcgcgctgcgggagctgggcttcccgtacatgacgccggtgcagccagattctttggatcggaggcaggaatcctggagaagatgttgagaggtttaagcaacaaggtgggaacatcattgtggccactccaggccgcttggaggacatgttccggaggaaggccgaaggcttggatctggccagctgtgtgcgatccctggatgtcctggtgttggatgaggcagacagacttctggacatggggtttgaggcaagcatcaacaccattctggagtttttgccaaagcagaggagaacaggccttttctctgccactcagacgcaggaagtggagaacctggtgagagcgggcctccggaaccctgtccgggtctcagtgaaggagaagggcgtggcagccagcagtgcccagaagaccccctcccgcctggaaaactactacatggtatgcaaggcagatgagaaatttaatcagctggtccattttcttcgcaatcataagcaggagaaacacctggtcttcttcagcacctgtgcctgtgtggaatactatgggaaggctctggaagtgctggtgaagggcgtgaagattatgtgcattcacggaaagatgaaatataaacgcaataagatcttcatggagttccgcaaattgcaaagtgggattttagtgtgcactgatgtgatggcccggggaattgatattcctgaagtcaactgggttttgcagtatgaccctcccagcaatgcaagtgccttcgtgcatcgctgcggtcgcacagctcgcattggccacgggggcagcgctctggtgttcctcctgcccatggaagagtcatacatcaatttccttgcaattaaccaaa

SEQ ID NO: 125498 - DNA, 1735 bp, Homo sapiens
  Payload ID: 4603
  Gene Symbol: DDX55
  Gene Name: DEAD (Asp-Glu-Ala-Asp) box polypeptide 55
  ENST ID: ENST00000538744
  CDS Start-End: 22-1731
gacgcggcgaaggagcgcgccatggagcatgtgacagagggctcctgggagtcgctgcctgtgccgctgcacccgcaggtgctgggcgcgctgcgggagctgggcttcccgtacatgacgccggtgcagtccgcaaccatccctctgttcatgcgaaacaaagatgtcgctgcagaagcggtcacaggtagtggcaaaacactcgcttttgtcatccccatcctggaaattcttctgagaagagaagagaagttaaaaaagagtcaggttggagccataatcatcacccccactcgagagctggccattcaaatagacgaggtcctgtcgcatttcacgaagcacttccccgagttcagccagattctttggatcggaggcaggaatcctggagaagatgttgagaggtttaagcaacaaggtgggaacatcattgtggccactccaggccgcttggaggacatgttccggaggaaggccgaaggcttggatctggccagctgtgtgcgatccctggatgtcctggtgttggatgaggcagacagacttctggacatggggtttgaggcaagcatcaacaccattctggagtttttgccaaagcagaggagaacaggccttttctctgccactcagacgcaggaagtggagaacctggtgagagcgggcctccggaaccctgtccgggtctcagtgaaggagaagggcgtggcagccagcagtgcccagaagaccccctcccgcctggaaaactactacatggtatgcaaggcagatgagaaatttaatcagctggtccattttcttcgcaatcataagcaggagaaacacctggtcttcttcagcacctgtgcctgtgtggaatactatgggaaggctctggaagtgctggtgaagggcgtgaagattatgtgcattcacggaaagatgaaatataaacgcaataagatcttcatggagttccgcaaattgcaaagtgccttcgtgcatcgctgcggtcgcacagctcgcattggccacgggggcagcgctctggtgttcctcctgcccatggaagagtcatacatcaatttccttgcaattaaccaaaaatgccccctgcaggagatgaagccccagagaaacacagcggaccttctgccaaaactcaagtccatggccctggctgacagagctgtgtttgaaaagggcatgaaagcttttgtgtcatatgtccaagcttatgcaaagcatgaatgcaacctgattttcagattaaaggatcttgattttgccagccttgctcgaggttttgccctgctgaggatgcccaagatgccagaattgagaggaaagcagtttccagattttgtgcccgtggacgttaataccgacacgattccatttaaagataaaatcagagaaaagcagaggcagaaactcctggagcaacaaagaagagagaaaacagaaaatgaagggagaagaaaattcataaaaaataaagcttggtcaaagcagaaggccaaaaaagaaaagaagaaaaaaatgaatgagaaaaggaaaagggaagagggttctgatattgaagatgaggacatggaagaacttcttaatgacacaagactcttgaaaaaacttaagaaaggcaaaataactgaagaagaatttgagaagggcttgttgacaactggcaaaagaacaatcaagacagtggatttagggatctcagatttggaagatgactgctgattcc

SEQ ID NO: 125499 - DNA, 799 bp, Homo sapiens
  Payload ID: 4603
  Gene Symbol: DDX55
  Gene Name: DEAD (Asp-Glu-Ala-Asp) box polypeptide 55
  ENST ID: ENST00000540763
  CDS Start-End: 22-150
gacgcggcgaaggagcgcgccatggagcatgtgacagagggctcctgggagtcgctgcctgtgccgctgcacccgcaggtgctgggcgcgctgcgggagctgggcttcccgtacatgacgccggtgcagggcttcgggtctcacctgtgaattgatggcatcctttaaccagtgctttgcaatctctctctttagtccgcaaccatccctctgttcatgcgaaacaaagatgtcgctgcagaagcggtcacaggtagtggcaaaacactcgcttttgtcatccccatcctggaaattcttctgagaagagaagagaagttaaaaaagagtcaggttggagccataatcatcacccccactcgagagctggccattcaaatagacgaggtcctgtcgcatttcacgaagcacttccccgagttcagattctttggatcggaggcaggaatcctggagaagatgttgagaggtttaagcaacaaggtgggaacatcattgtggccactccaggccgcttggaggacatgttccggaggaaggccgaaggcttggatctggccagctgtgtgcgatccctggatgtcctggtgttggatgaggcagacagacttctggacatggggtttgaggcaagcatcaacaccattctggagtttttgccaaagcagaggagaacaggccttttctctgccactcagacgcaggaagtggagaacctggtgagagcgggcctccggaaccctgtccgggtctcagtgaaggagaagggcgtggcagccagcagtgcccagaagacccc

SEQ ID NO: 125500 - DNA, 4089 bp, Homo sapiens
  Payload ID: 4604
  Gene Symbol: DDX58
  Gene Name: DEAD (Asp-Glu-Ala-Asp) box polypeptide 58
  ENST ID: ENST00000379868
  CDS Start-End: 504-2672
acagcctgcggggaacgtagctagctgcaagcagaggccggcatgaccaccgagcagcgacgcagcctgcaagccttccaggattatatccggaagaccctggaccctacctacatcctgagctacatggccccctggtttagggaggaagaggtgcagtatattcaggctgagaaaaacaacaagggcccaatggaggctgccacactttttctcaagttcctgttggagctccaggaggaaggctggttccgtggctttttggatgccctagaccatgcaggttattctggactttatgaagccattgaaagttgggatttcaaaaaaattgaaaagttggaggagtatagattacttttaaaacgtttacaaccagaatttaaaaccagaattatcccaaccgatatcatttctgatctgtctgaatgtttaattaatcaggaatgtgaagaaattctacaggtataaaagatgttgaaacagaagatcttgaggataagatggaaacttctgacatacagattttctaccaagaagatccagaatgccagaatcttagtgagaattcatgtccaccttcagaagtgtctgatacaaacttgtacagcccatttaaaccaagaaattaccaattagagcttgctttgcctgctatgaaaggaaaaaacacaataatatgtgctcctacaggttgtggaaaaacctttgtttcactgcttatatgtgaacatcatcttaaaaaattcccacaaggacaaaaggggaaagttgtcttttttgcgaatcagatcccagtgtatgaacagcagaaatctgtattctcaaaatactttgaaagacatgggtatagagttacaggcatttctggagcaacagctgagaatgtcccagtggaacagattgttgagaacaatgacatcatcattttaactccacagattcttgtgaacaaccttaaaaagggaacgattccatcactatccatctttactttgatgatatttgatgaatgccacaacactagtaaacaacacccgtacaatatgatcatgtttaattatctagatcagaaacttggaggatcttcaggcccactgccccaggtcattgggctgactgcctcggttggtgttggggatgccaaaaacacagatgaagccttggattatatctgcaagctgtgtgcttctcttgatgcgtcagtgatagcaacagtcaaacacaatctggaggaactggagcaagttgtttataagccccagaagtttttcaggaaagtggaatcacggattagcgacaaatttaaatacatcatagctcagctgatgagggacacagagagtctggcaaagagaatctgcaaagacctcgaaaacttatctcaaattcaaaatagggaatttggaacacagaaatatgaacaatggattgttacagttcagaaagcatgcatggtgttccagatgccagacaaagatgaagagagcaggatttgtaaagccctgtttttatacacttcacatttgcggaaatataatgatgccctcattatcagtgagcatgcacgaatgaaagatgctctggattacttgaaagacttcttcagcaatgtccgagcagcaggattcgatgagattgagcaagatcttactcagagatttgaagaaaagctgcaggaactagaaagtgtttccagggatcccagcaatgagaatcctaaacttgaagacctctgcttcatcttacaagaagagtaccacttaaacccagagacaataacaattctctttgtgaaaaccagagcacttgtggacgctttaaaaaattggattgaaggaaatcctaaactcagttttctaaaacctggcatattgactggacgtggcaaaacaaatcagaacacaggaatgaccctcccggcacagaagtgtatattggatgcattcaaagccagtggagatcacaatattctgattgccacctcagttgctgatgaaggcattgacattgcacagtgcaatcttgtcatcctttatgagtatgtgggcaatgtcatcaaaatgatccaaaccagaggcagaggaagagcaagaggtagcaagtgcttccttctgactagtaatgctggtgtaattgaaaaagaacaaataaacatgtacaaagaaaaaatgatgaatgactctattttacgccttcagacatgggacgaagcagtatttagggaaaagattctgcatatacagactcatgaaaaattcatcagagatagtcaagaaaaaccaaaacctgtacctgataaggaaaataaaaaactgctctgcagaaagtgcaaagccttggcatgttacacagctgacgtaagagtgatagaggaatgccattacactgtgcttggagatgcttttaaggaatgctttgtgagtagaccacatcccaagccaaagcagttttcaagttttgaaaaaagagcaaagatattctgtgcccgacagaactgcagccatgactggggaatccatgtgaagtacaagacatttgagattccagttataaaaattgaaagttttgtggtggaggatattgcaactggagttcagacactgtactcgaagtggaaggactttcattttgagaagataccatttgatccagcagaaatgtccaaatgatatcaggtcctcaatcttcagctacagggaatgagtaactttgagtggagaagaaacaaacatagtgggtataatcatggatcgcttgtacccctgtgaaaatatattttttaaaaatatctttagcagtttgtactatattatatatgcaaagcacaaatgagtgaatcacagcactgagtattttgtaggccaacagagctcatagtacttgggaaaaattaaaaagcctcatttctagccttctttttagagtcaactgccaacaaacacacagtaatcactctgtacacactgggatagatgaatgaatggaatgttgggaatttttatctccctttgtctccttaacctactgtaaactggcttttgcccttaacaatctactgaaattgttcttttgaaggttaccagtgactctggttgccaaatccactgggcacttcttaaccttctatttgacctctgcgcatttggccctgttgagcactcttcttgaagctctccctgggcttctctctcttctagttctattctagtctttttttattgagtcctcctctttgctgatcccttccaagggttcaatatatatacatgtatatactgtacatatgtatatgtaactaatatacatacatacaggtatgtatatgtaatggttatatgtactcatgttcctggtgtagcaacgtgtggtatggctacacagagaacatgagaacataaagccatttttatgcttactactaaaagctgtccactgtagagttgctgtatgtagcaatgtgtatccactctacagtggtcagcttttagtagagagcataaaaatgataaaatacttcttgaaaacttagtttactatacatcttgccctattaatatgttctcttaacgtgtgccattgttctctttgaccattttcctataatgatgttgatgttcaacacctggactgaatgtctgttctcagatcccttggatgttacagatgaggcagtctgactgtcctttctacttgaaagattagaatatgtatccaaatggcattcacgtgtcacttagcaaggtttgctgatgcttcaaagagcttagtttgcggtttcctggacgtggaaacaagtatctgagttccctggagatcaacgggatgaggtgttacagctgcctccctcttcatgcaatctggtgagcagtggtgcaggcggggagccagagaaacttgccagttatataacttctctttggcttttcttcatctgtaaaacaaggataatactgaactgtaagggttagtggagagtttttaattaaaagaatgtgtgaaaagtacatgacacagtagttgcttgataatagttactagtagtagtattcttactaagacccaatacaaatggattatttaaaccaa

SEQ ID NO: 125501 - DNA, 4353 bp, Homo sapiens
  Payload ID: 4604
  Gene Symbol: DDX58
  Gene Name: DEAD (Asp-Glu-Ala-Asp) box polypeptide 58
  Uniprot ID: O95786
  ENST ID: ENST00000379883
  CDS Start-End: 159-2936
tagttattaaagttcctatgcagctccgcctcgcgtccggcctcatttcctcggaaaatccctgctttccccgctcgccacgccctcctcctacccggctttaaagctagtgaggcacagcctgcggggaacgtagctagctgcaagcagaggccggcatgaccaccgagcagcgacgcagcctgcaagccttccaggattatatccggaagaccctggaccctacctacatcctgagctacatggccccctggtttagggaggaagaggtgcagtatattcaggctgagaaaaacaacaagggcccaatggaggctgccacactttttctcaagttcctgttggagctccaggaggaaggctggttccgtggctttttggatgccctagaccatgcaggttattctggactttatgaagccattgaaagttgggatttcaaaaaaattgaaaagttggaggagtatagattacttttaaaacgtttacaaccagaatttaaaaccagaattatcccaaccgatatcatttctgatctgtctgaatgtttaattaatcaggaatgtgaagaaattctacagatttgctctactaaggggatgatggcaggtgcagagaaattggtggaatgccttctcagatcagacaaggaaaactggcccaaaactttgaaacttgctttggagaaagaaaggaacaagttcagtgaactgtggattgtagagaaaggtataaaagatgttgaaacagaagatcttgaggataagatggaaacttctgacatacagattttctaccaagaagatccagaatgccagaatcttagtgagaattcatgtccaccttcagaagtgtctgatacaaacttgtacagcccatttaaaccaagaaattaccaattagagcttgctttgcctgctatgaaaggaaaaaacacaataatatgtgctcctacaggttgtggaaaaacctttgtttcactgcttatatgtgaacatcatcttaaaaaattcccacaaggacaaaaggggaaagttgtcttttttgcgaatcagatcccagtgtatgaacagcagaaatctgtattctcaaaatactttgaaagacatgggtatagagttacaggcatttctggagcaacagctgagaatgtcccagtggaacagattgttgagaacaatgacatcatcattttaactccacagattcttgtgaacaaccttaaaaagggaacgattccatcactatccatctttactttgatgatatttgatgaatgccacaacactagtaaacaacacccgtacaatatgatcatgtttaattatctagatcagaaacttggaggatcttcaggcccactgccccaggtcattgggctgactgcctcggttggtgttggggatgccaaaaacacagatgaagccttggattatatctgcaagctgtgtgcttctcttgatgcgtcagtgatagcaacagtcaaacacaatctggaggaactggagcaagttgtttataagccccagaagtttttcaggaaagtggaatcacggattagcgacaaatttaaatacatcatagctcagctgatgagggacacagagagtctggcaaagagaatctgcaaagacctcgaaaacttatctcaaattcaaaatagggaatttggaacacagaaatatgaacaatggattgttacagttcagaaagcatgcatggtgttccagatgccagacaaagatgaagagagcaggatttgtaaagccctgtttttatacacttcacatttgcggaaatataatgatgccctcattatcagtgagcatgcacgaatgaaagatgctctggattacttgaaagacttcttcagcaatgtccgagcagcaggattcgatgagattgagcaagatcttactcagagatttgaagaaaagctgcaggaactagaaagtgtttccagggatcccagcaatgagaatcctaaacttgaagacctctgcttcatcttacaagaagagtaccacttaaacccagagacaataacaattctctttgtgaaaaccagagcacttgtggacgctttaaaaaattggattgaaggaaatcctaaactcagttttctaaaacctggcatattgactggacgtggcaaaacaaatcagaacacaggaatgaccctcccggcacagaagtgtatattggatgcattcaaagccagtggagatcacaatattctgattgccacctcagttgctgatgaaggcattgacattgcacagtgcaatcttgtcatcctttatgagtatgtgggcaatgtcatcaaaatgatccaaaccagaggcagaggaagagcaagaggtagcaagtgcttccttctgactagtaatgctggtgtaattgaaaaagaacaaataaacatgtacaaagaaaaaatgatgaatgactctattttacgccttcagacatgggacgaagcagtatttagggaaaagattctgcatatacagactcatgaaaaattcatcagagatagtcaagaaaaaccaaaacctgtacctgataaggaaaataaaaaactgctctgcagaaagtgcaaagccttggcatgttacacagctgacgtaagagtgatagaggaatgccattacactgtgcttggagatgcttttaaggaatgctttgtgagtagaccacatcccaagccaaagcagttttcaagttttgaaaaaagagcaaagatattctgtgcccgacagaactgcagccatgactggggaatccatgtgaagtacaagacatttgagattccagttataaaaattgaaagttttgtggtggaggatattgcaactggagttcagacactgtactcgaagtggaaggactttcattttgagaagataccatttgatccagcagaaatgtccaaatgatatcaggtcctcaatcttcagctacagggaatgagtaactttgagtggagaagaaacaaacatagtgggtataatcatggatcgcttgtacccctgtgaaaatatattttttaaaaatatctttagcagtttgtactatattatatatgcaaagcacaaatgagtgaatcacagcactgagtattttgtaggccaacagagctcatagtacttgggaaaaattaaaaagcctcatttctagccttctttttagagtcaactgccaacaaacacacagtaatcactctgtacacactgggatagatgaatgaatggaatgttgggaatttttatctccctttgtctccttaacctactgtaaactggcttttgcccttaacaatctactgaaattgttcttttgaaggttaccagtgactctggttgccaaatccactgggcacttcttaaccttctatttgacctctgcgcatttggccctgttgagcactcttcttgaagctctccctgggcttctctctcttctagttctattctagtctttttttattgagtcctcctctttgctgatcccttccaagggttcaatatatatacatgtatatactgtacatatgtatatgtaactaatatacatacatacaggtatgtatatgtaatggttatatgtactcatgttcctggtgtagcaacgtgtggtatggctacacagagaacatgagaacataaagccatttttatgcttactactaaaagctgtccactgtagagttgctgtatgtagcaatgtgtatccactctacagtggtcagcttttagtagagagcataaaaatgataaaatacttcttgaaaacttagtttactatacatcttgccctattaatatgttctcttaacgtgtgccattgttctctttgaccattttcctataatgatgttgatgttcaacacctggactgaatgtctgttctcagatcccttggatgttacagatgaggcagtctgactgtcctttctacttgaaagattagaatatgtatccaaatggcattcacgtgtcacttagcaaggtttgctgatgcttcaaagagcttagtttgcggtttcctggacgtggaaacaagtatctgagttccctggagatcaacgggatgaggtgttacagctgcctccctcttcatgcaatctggtgagcagtggtgcaggcggggagccagagaaacttgccagttatataacttctctttggcttttcttcatctgtaaaacaaggataatactgaactgtaagggttagtggagagtttttaattaaaagaatgtgtgaaaagtacatgacacagtagttgcttgataatagttactagtagtagtattcttactaagacccaatacaaatggattatttaaaccaa

SEQ ID NO: 125502 - DNA, 2289 bp, Homo sapiens
  Payload ID: 4605
  Gene Symbol: DDX59
  Gene Name: DEAD (Asp-Glu-Ala-Asp) box polypeptide 59
  Uniprot ID: Q5T1V6
  ENST ID: ENST00000331314
  CDS Start-End: 215-2074
aaagcgggctgcggccccctcccaaaacccggggaagtggattctactctacgctccgctccgctccgctccgcaccaccaaccccgggccgcagtcctgacgagcgggtcagggcttgtcgggcggaagcctggcctggagcctggaagggggagacggcccgagcgggagcgggagcggacgcggcctcagtcctgcgcggaatattgaaggatgtttgttccaagatctctaaaaatcaagaggaatgctaatgatgatggcaaaagttgtgtggctaagataattaaaccagacccagaagaccttcagttggacaaaagcagagatgttcccgttgatgctgtagctacagaagcagccacaatagacaggcacatcagcgaatcatgccctttccccagcccaggtggccagttggcagaggttcattcagtaagtcccgagcagggtgcgaaggacagccatccttctgaagagcccgttaagtcattttccaaaacacagcgctgggcagaaccaggggaacccatctgtgttgtctgtggtcgttatggagagtatatctgtgataagacagatgaagatgtgtgtagtttggagtgtaaagcgaaacatcttctacaagttaaggaaaaggaagagaaatcaaaactcagcaatccacagaaggctgattctgagccagagtctccactgaatgcttcctatgtctacaaagagcacccctttattttgaaccttcaggaagaccagattgaaaatcttaaacagcagctgggaattttagttcaagggcaagaagtcaccaggcccattattgactttgaacattgtagtctccctgaggtcttaaatcacaacttgaagaaatcaggctatgaggtgccaactcccattcaaatgcagatgattcctgtgggacttctgggaagagacattctggccagtgcagatactggctcaggaaaaacagctgcttttcttcttcctgttatcatgcgagctttattcgagagcaaaactccatctgcgctcattcttacaccaaccagagagttagccattcagatagagagacaagctaaagaattgatgagtggcctgccacgcatgaaaactgtgcttcttgtagggggcttacccttacccccacagctttatcgtctgcaacaacatgttaaggttatcatagcaacccctgggcgacttctggatataataaagcagagctctgtagaactctgtggtgtaaagattgtggtagtagatgaagctgataccatgttaaagatgggttttcaacaacaagtgcttgacattttggaaaacattcctaatgattgtcagaccattttggtttcagccacaattccaactagcatagaacagctagcaagccagcttctgcataatcctgtgagaattatcactggagaaaagaacctaccttgtgccaatgtacgtcagattattttgtgggtagaagacccagccaaaaagaaaaaattatttgaaattttaaatgataagaaactctttaagcctccagtgttagtatttgtggactgcaaactaggagcagatcttttgagtgaagccgttcagaaaatcacagggctgaaaagcatatctatacattcagagaagtcgcaaatagaaaggaaaaacatattgaagggattacttgaaggagactatgaagttgtagtgagcacaggagtcttgggacgaggcctagacttgatcagtgtcaggctggttgtcaattttgatatgccttcaagtatggatgagtatgtccatcagattggaagagtaggaagattaggtcaaaatggaacagcgattactttcatcaataataattcaaaaagactcttctgggatattgcaaaacgagtaaagcccacaggatccattcttccccctcagttattaaattccccataccttcatgaccagaagagaaaggaacaacagaaagataaacagacacagaatgatctggttacaggagctaatcttatggatattatcagaaaacatgataaaagtaattctcagaaatgattttctctgccacttgaatatttttttttattgtatatagtcagcaaaaaattatggtttgcataaatggaaatgtacatgaattttaaaaattttaagatatttttaatttaataaaatttatataactatattgtatttatttcccttaattcttataaattaaaaacatcagaaaatgaattattaaataaaagacagtgttttcttttctg

SEQ ID NO: 125503 - DNA, 635 bp, Homo sapiens
  Payload ID: 4605
  Gene Symbol: DDX59
  Gene Name: DEAD (Asp-Glu-Ala-Asp) box polypeptide 59
  ENST ID: ENST00000436897
  CDS Start-End: 154-635
tggggcgctaggccgcggcggcagaactggtgcccctgcgcggccttcctcccatccttacagttccccgtgtcccaggcctctacccggaaccggagccccgcccgtctcctagcagctccgtgacgtgaagcgcctcgggaatattgaaggatgtttgttccaagatctctaaaaatcaagaggaatgctaatgatgatggcaaaagttgtgtggctaagataattaaaccagacccagaagaccttcagttggacaaaagcagagatgttcccgttgatgctgtagctacagaagcagccacaatagacaggcacatcagcgaatcatgccctttccccagcccaggtggccagttggcagaggttcattcagtaagtcccgagcagggtgcgaaggacagccatccttctgaagagcccgttaagtcattttccaaaacacagcgctgggcagaaccaggggaacccatctgtgttgtctgtggtcgttatggagagtatatctgtgataagacagatgaagatgtgtgtagtttggagtgtaaagcgaaacatcttctacaagttaaggaaaaggaagagaaatcaaaactcagcaatccacagaaggctgattctgagccagagtctcc

SEQ ID NO: 125504 - DNA, 945 bp, Homo sapiens
  Payload ID: 4605
  Gene Symbol: DDX59
  Gene Name: DEAD (Asp-Glu-Ala-Asp) box polypeptide 59
  ENST ID: ENST00000413408
  CDS Start-End: 1-618
tttcaacaacaagtgcttgacattttggaaaacattcctaatgattgtcagaccattttggtttcagccacaattccaactagcatagaacagctagcaagccagcttctgcataatcctgtgagaattatcactggagaaaagaacctaccttgtgccaatgtacgtcagattattttgtgggtagaagacccagccaaaaagaaaaaattatttgaaattttaaatgataagaaactctttaagcctccagtgttagtatttgtggactgcaaactaggagcagatcttttgagtgaagccgttcagaaaatcacagggctgaaaagcatatctatacattcagagaagtcgcaaatagaaaggaaaaacatattgaagggattacttgaaggagactatgaagttgtagtgagcacaggagtcttgggacgaggcctagacttgatcagtgtcaggctggttgtcaattttgatatgccttcaagtatggatgagtatgtccatcagctgaatattatttgggttgtgcccttctctggaattaatatcaacgcatctcttattgccttgttatacagtctactcaccacaatcaatatgaagtttactccataaacagaggtatggtacaagaggtaacgtgtcatccaaggtgactttcctggcagccaccagtaaactgactccggacagataggactcttttgttgccgccaaggcatacttacaatgacctcagaggctctagggccacagtgtgaaaaccaaccaatggataattaagtaaacacagttctcttgttctactgttagtgtgagaacctattttatattttataatgtgttgcacgtgtgatgatataggacaaaattacaaataaagcataagacgagtgtttatttttgtaatgtttacaaatagtaacttacaaataaatttta

SEQ ID NO: 125505 - DNA, 2900 bp, Homo sapiens
  Payload ID: 4605
  Gene Symbol: DDX59
  Gene Name: DEAD (Asp-Glu-Ala-Asp) box polypeptide 59
  Uniprot ID: Q5T1V6
  ENST ID: ENST00000447706
  CDS Start-End: 153-1895
gctccgctccgcaccaccaaccccgggccgcagtcctgacgagcgggtcagggcttgtcgggcggaagcctggcctggagcctggaagggggagacggcccgagcgggagcgggagcggacgcggcctcagtcctgcgcggaatattgaaggatgtttgttccaagatctctaaaaatcaagaggaatgctaatgatgatggcaaaagttgtgtggctaagataattaaaccagacccagaagaccttcagttggacaaaagcagagatgttcccgttgatgctgtagctacagaagcagccacaatagacaggcacatcagcgaatcatgccctttccccagcccaggtggccagttggcagaggttcattcagtaagtcccgagcagggtgcgaaggacagccatccttctgaagagcccgttaagtcattttccaaaacacagcgctgggcagaaccaggggaacccatctgtgttgtctgtggtcgttatggagagtatatctgtgataagacagatgaagatgtgtgtagtttggagtgtaaagcgaaacatcttctacaagttaaggaaaaggaagagaaatcaaaactcagcaatccacagaaggctgattctgagccagagtctccactgaatgcttcctatgtctacaaagagcacccctttattttgaaccttcaggaagaccagattgaaaatcttaaacagcagctgggaattttagttcaagggcaagaagtcaccaggcccattattgactttgaacattgtagtctccctgaggtcttaaatcacaacttgaagaaatcaggctatgaggtgccaactcccattcaaatgcagatgattcctgtgggacttctgggaagagacattctggccagtgcagatactggctcaggaaaaacagctgcttttcttcttcctgttatcatgcgagctttattcgagagcaaaactccatctgcgctcattcttacaccaaccagagagttagccattcagatagagagacaagctaaagaattgatgagtggcctgccacgcatgaaaactgtgcttcttgtagggggcttacccttacccccacagctttatcgtctgcaacaacatgttaaggttatcatagcaacccctgggcgacttctggatataataaagcagagctctgtagaactctgtggtgtaaagattgtggtagtagatgaagctgataccatgttaaagatgggttttcaacaacaagtgcttgacattttggaaaacattcctaatgattgtcagaccattttggtttcagccacaattccaactagcatagaacagctagcaagccagcttctgcataatcctgtgagaattatcactggagaaaagaacctaccttgtgccaatgtacgtcagattattttgtgggtagaagacccagccaaaaagaaaaaattatttgaaattttaaatgataagaaactctttaagcctccagtgttagtatttgtggactgcaaactaggagcagatcttttgagtgaagccgttcagaaaatcacagggctgaaaagcatatctatacattcagagaagtcgcaaatagaaaggaaaaacatattgaagggattacttgaaggagactatgaagttgtagtgagcacaggagtcttgggacgaggcctagacttgatcagtgtcaggctggttgtcaattttgatatgccttcaagtatggatgagtatgtccatcaggaaaatacctacaagtctacttggaggaatccccagcattttcaacaggatgtcagaatgaccttgggctatgttggcaaagcacaatgggaagaagacaaccaattgaaggtcaaactaggccttaaaaaaaattgttcttcctaaatgaaactttatgtaagacccaagcttcctttatgtaaaaataggatactcactaggctttggggctgacaatggtttttaaatcttgctaatcttccctggaatgaaaccagcatgactcaaagagaaaaagagagtctataatattttctaatccctgagttcttttctttatatattaaaaaggattactaggctgggtgtggtggctcacgcctgtaatcccagcactttgggaggccgaggggagtggatcacctgagttcgagaccagcctaaccaacatggagaaaccctgtctctactaaaaatacaaaattagccaggcgtggtggcgcatgcctgtaatcccagctactcaggaggctgcggcaggagaattgcttgaactcgggaggcagagccaagatcgcaccactgcactccagcctgggcaacaagagtgaaactctgtctcaaaataatattaatgataataataataataataatagggattacttgcataattgttcttttaaaattattggcagtattgctgaatgtatttagattttttcaccaagtgacaacaactgaattcataaagattcatcaacaagacctgataaaaaaaaatgtaagcatattatagtggatacttccaagactcttggtctaacatgtattagaaagcagaaggagcccaggcacaggggctcccgccggtaatcccaaagctttgggaagccaaggcaggtggatcgcttgagctcaggagttagagaccagcctgggcaacatggtgaaatcccgtcaccacaaaaaaatgcaaaaattaactgggcgtggtggcatgcacctgtagtcccagctactctggaggctgaggtgaggggaatcacctgagccgggggaatcacctgagcccagggaagttgaggctgctgtgagccatggtcatgacactgccctccagcctggacaacagattgagaccctgtctcaaaaaaaaaaaaaaaaaaa

SEQ ID NO: 125506 - DNA, 643 bp, Homo sapiens
  Payload ID: 4605
  Gene Symbol: DDX59
  Gene Name: DEAD (Asp-Glu-Ala-Asp) box polypeptide 59
  ENST ID: ENST00000453944
  CDS Start-End: 419-643
aaaataggcattggggagtccctctgagccttttctggctcaggaggttgccgataaaattttaaaaaataaaataggcatcggaatccatgaaacgtatggtttctctaagggaggcaagttagaaatgagcagaaacagaggcaggggctagggctaagggcctggcttgtggagtctgaagatgagtcagtaaaaaagctgcttgagacaccagagaggaactgagaatgaataatatccttgaagaagagagaaccattgtttcaagaggaggatgaagatgcaaatagtcagaggagtcacctggcttgcttagtgaccatcagacgagaccagacctctcacttggatattctgattcagtaggtgtgagttggagccaggaatctctacaaactcattccaggctgataccatgttaaagatgggttttcaacaacaagtgcttgacattttggaaaacattcctaatgattgtcagaccattttggtttcagccacaattccaactagcatagaacagctagcaagccagcttctgcataatcctgtgagaattatcactggagaaaagaacctaccttgtgccaatgtacgtcagattattttgtgggtagaagacccagccaaaaagaaaaaa

SEQ ID NO: 125507 - DNA, 725 bp, Homo sapiens
  Payload ID: 4605
  Gene Symbol: DDX59
  Gene Name: DEAD (Asp-Glu-Ala-Asp) box polypeptide 59
  ENST ID: ENST00000429498
  CDS Start-End: 1-592
cttacccttacccccacagctttatcgtctgcaacaacatgttaaggataagaaactctttaagcctccagtgttagtatttgtggactgcaaactaggagcagatcttttgagtgaagccgttcagaaaatcacagggctgaaaagcatatctatacattcagagaagtcgcaaatagaaaggaaaaacatattgaagggattacttgaaggagactatgaagttgtagtgagcacaggagtcttgggacgaggcctagacttgatcagtgtcaggctggttgtcaattttgatatgccttcaagtatggatgagtatgtccatcagattggaagagtaggaagattaggtcaaaatggaacagcgattactttcatcaataataattcaaaaagactcttctgggatattgcaaaacgagtaaagcccacaggatccattcttccccctcagttattaaattccccataccttcatgaccagaagagaaaggaacaacagaaagataaacagacacagaatgatctggttacaggagctaatcttatggatattatcagaaaacatgataaaagtaattctcagaaatgattttctctgccacttgaatatttttttttattgtatatagtcagcaaaaaattatggtttgcataaatggaaatgtacatgaattttaaaaattttaagatatttttaatttaataaaatttatataactata

SEQ ID NO: 125508 - DNA, 889 bp, Homo sapiens
  Payload ID: 4605
  Gene Symbol: DDX59
  Gene Name: DEAD (Asp-Glu-Ala-Asp) box polypeptide 59
  ENST ID: ENST00000433235
  CDS Start-End: 216-889
taatatccttgaagaagagagaaccattgtttcaagaggaggatgaagatgcaaatagtcagagcacagtgtttgcccaagtttccttaataataggagtcacctggcttgcttagtgaccatcagacgagaccagacctctcacttggatattctgattcagtaggtgtgagttggagccaggaatctctacaaactcattccaggctgataccatgttaaagatgggttttcaacaacaagtgcttgacattttggaaaacattcctaatgattgtcagaccattttggtttcagccacaattccaactagcatagaacagctagcaagccagcttctgcataatcctgtgagaattatcactggagaaaagaacctaccttgtgccaatgtacgtcagattattttgtgggtagaagacccagccaaaaagaaaaaattatttgaaattttaaatgataagaaactctttaagcctccagtgttagtatttgtggactgcaaactaggagcagatcttttgagtgaagccgttcagaaaatcacagggctgaaaagcatatctatacattcagagaagtcgcaaatagaaaggaaaaacatattgaagggattacttgaaggagactatgaagttgtagtgagcacaggagtcttgggacgaggcctagacttgatcagtgtcaggctggttgtcaattttgatatgccttcaagtatggatgagtatgtccatcagattggaagagtaggaagattaggtcaaaatggaacagcgattactttcatcaataataattcaaaaagactcttctgggatattgcaaaacgagtaaagcccacaggatccattcttccccctcagttattaaattccccataccttca

SEQ ID NO: 125509 - DNA, 580 bp, Homo sapiens
  Payload ID: 4605
  Gene Symbol: DDX59
  Gene Name: DEAD (Asp-Glu-Ala-Asp) box polypeptide 59
  ENST ID: ENST00000452560
  CDS Start-End: 1-283
tcagaaaatcacagggctgaaaagcatatctatacattcagagaagtcgcaaatagaaaggaaaaacatattgaagggattacttgaaggagactatgaagttgtagtgagcacaggagtcttgggacgaggcctagacttgatcagtgtcaggctggttgtcaattttgatatgccttcaagtatggatgagtatgtccatcagtctactcaccacaatcaatatgaagtttactccataaacagaggtatggtacaagaggtaacgtgtcatccaaggtgactttcctggcagccaccagtaaactgactccggacagataggactcttttgttgccgccaaggcatacttacaatgacctcagaggctctagggccacagtgtgaaaaccaaccaatggataattaagtaaacacagttctcttgttctactgttagtgtgagaacctattttatattttataatgtgttgcacgtgtgatgatataggacaaaattacaaataaagcataagacgagtgtttatttttgtaatgtttacaaatagtaacttacaaataaattttagctttgaaaaa

SEQ ID NO: 125510 - DNA, 6071 bp, Homo sapiens
  Payload ID: 4606
  Gene Symbol: DDX60
  Gene Name: DEAD (Asp-Glu-Ala-Asp) box polypeptide 60
  Uniprot ID: Q8IY21
  ENST ID: ENST00000393743
  CDS Start-End: 293-5431
aggaaaccgaaactcccgccggatgcataaaagactggctgcggtggctcagagcgccgagtcctaggccaggtctggggtaacctggaacttccacctgggctctgcgctaggtctctgtttcactccctccccgcggggcgcgcagctcgcgggtctttggacaccaccggtcctgagtccgcggactgccattttcattaagaactgccacttagaggtaccaaaataaagggtatttgctacctttaatacttgccagttcaggttggaggcacaggcagcagcaagaatggaaagaaatgttcttacaacattttcacaggaaatgtcccagttaattttgaatgaaatgccaaaagctgaatattccagtttattcaatgattttgttgaatctgaattttttttgattgatggggattcattacttatcacatgtatctgtgagatatcatttaagcctgggcagaacctccatttcttctatctggttgaacgctatcttgtggatcttattagcaaaggaggacaattcaccatagttttcttcaaggatgccgagtatgcgtatttcaacttccctgaacttctttctttgagaactgctttaattcttcatcttcagaagaataccaccattgatgttcgaacaacattttcgagatgcttatcaaaagagtggggaagtttcttggaagagagttacccatatttcctgatagttgcagacgaaggcctgaacgatctacaaacacagcttttcaactttttaatcattcattcttgggcaaggaaggtcaacgttgtactttcctcagggcaagaatctgatgttctttgcctttatgcataccttcttccaagcatgtacagacaccagattttttcctggaagaataagcagaacattaaagatgcttatacaaccctgcttaaccagttggaaagatttaagctttcagcattagcacctctttttggaagtttaaaatggaataatattacggaagaggcacacaagactgtatctctgcttacacaagtctggccagaaggatctgacattcggcgtgtcttttgtgttacttcatgctcattatctttgagaatgtaccatcgctttttaggaaacagagagccctcctctggtcaggaaactgagatccaacaggtgaacagtaattgcttaaccctgcaggagatggaagatttgtgtaaactgcattgtctcactgtggtttttctactccatctgcctctttctcaaagagcttgtgctagagtcatcacttcccattgggctgaggacatgaagcctttattacaaatgaaaaagtggtgtgaatatttcatcttaagaaatatacatacttttgaattttggaatctgaatttaattcacctttctgacttaaatgatgagcttttgttgaagaatattgctttttactatgaaaatgaaaatgtaaaaggcctacatttgaatttgggagataccattatgaaagattatgaatatctctggaataccgtatcaaagttggtcagagactttgaggttggacagccatttcctctgagaacaacaaaagtttgttttcttgaaaagaaaccatcaccaatcaaagacagctccaatgaaatggtgcccaatttgggttttattccaacgtcatcttttgtggttgataaatttgctggagatattttgaaagatttgccttttctaaagagtgatgatcctattgttacttcactggttaaacaaaaggaatttgatgaacttgtgcactggcattctcataaacccctgagtgatgattatgacaggtccaggtgtcagtttgatgaaaaatctagagaccctcgtgttcttagatctgtgcaaaagtatcatgttttccaacggttttatgggaattcattagaaacagtctcttcgaaaatcatcgtgactcaaactattaagtcaaagaaggattttagtgggcccaagagcaaaaaggcacacgagaccaaggctgaaataattgctagagagaataagaaaaggttatttgccagggaagaacaaaaggaagagcaaaagtggaatgctttgtcattttctattgaagagcaattgaaagaaaatttacactctggaataaagagcctggaagattttttgaaatcctgtaaaagtagctgtgtgaaacttcaggttgaaatggtggggttaactgcttgcttgaaagcctggaaagaacattgccgaagtgaagaaggtaaaaccacgaaagatttaagtatagctgttcaggtgatgaaaaggatccactccttgatggaaaaatactcagaacttttacaagaagatgatcggcaactcatagccagatgccttaagtatttaggatttgatgagttggcaagttctttacatccagcccaggatgcagaaaatgatgtaaaagtgaagaaaaggaataaatattcagttggcattgggccagctcggttccaactgcaatacatgggccattatttgatacgagatgagagaaaagacccagatcccagggtccaggattttattcccgacacatggcagcgagagctccttgatgttgtggataagaatgagtcagcagtgattgttgccccaacgtcctcaggcaaaacctatgcctcctactactgtatggagaaagtgctgaaggagagcgacgacggggtggtcgtgtacgttgcacccacaaaggcccttgttaatcaagtggcagcaactgttcagaatcgttttacgaaaaatctgccaagtggtgaagttctctgtggtgttttcaccagggagtatcgtcatgatgccttaaactgtcaggtacttattacagtgcctgcctgctttgaaattctgctgcttgctcctcatcgccaaaactgggtgaaaaagatcagatatgttatatttgatgaggttcattgtcttggtggagaaattggagcagaaatctgggaacatctccttgtcatgatccgatgtccctttttggctctttcagctaccataagtaatcctgaacatctcaccgagtggctacaatcggtaaaatggtactggaaacaagaagacaaaataattgaaaataataccgcttctaaaagacatgtgggtcgtcaggccggctttcccaaagactacttgcaagtaaaacaatcgtataaagttagacttgtgctctatggagagaggtataatgatctagagaagcatgtatgttcaataaaacatggtgacattcattttgatcattttcacccatgtgctgcactaacaacagatcatattgaaaggtatggattccctcctgatcttaccctttcacctcgagaaagcatccagctgtatgatgccatgtttcaaatttggaaaagttggcctcgggcccaggaactgtgcccagaaaacttcattcattttaacaataaattagtcattaaaaagatggatgctaggaaatatgaagagagtctaaaggcagaattaacaagttggattaaaaatggcaacgtagagcaggccagaatggtacttcagaatcttagtcctgaagcagatttgagtccagaaaacatgatcaccatgtttccacttctagttgaaaaactaaggaaaatggagaagttacctgcactattttttttattcaagttaggagctgtagaaaacgcagctgaaagtgtgagcactttcctaaagaaaaagcaggagacaaaaaggcctcccaaagctgataaagaagcccatgtcatggctaacaaacttcgaaaagttaaaaaatccatagagaaacaaaagatcatagatgaaaagagccagaaaaaaaccagaaatgtggatcaaagcctaatacatgaagctgaacatgataatctagtgaagtgtctagagaagaacctggaaatcccacaggactgcacatatgctgatcaaaaagcagtggacactgagactttgcagaaggtatttggtcgagtaaaatttgaaagaaaaggtgaagaattgaaagccttggcagaaaggggtattggatatcatcacagtgctatgagtttcaaagaaaaacaattagttgaaatcctctttagaaaaggatatcttagggtggtgacagctactggaacacttgctttaggtgtcaacatgccttgtaaatctgtggtttttgctcaaaactcagtctatctggatgcgttgaattatagacagatgtctggccgtgctggaagaagaggtcaagacctgatgggagatgtatatttctttgatattccattccccaaaataggaaaactcataaaatccaatgttcctgagctgagaggacacttccctctcagcataaccctggtcctgcgactcatgctgctggcttccaagggagatgacccagaggatgccaaggcaaaggtgctatcagtgctaaagcattcattgctgtccttcaagcaacccagagtcatggacatgttaaaactttacttcctgttttctttgcagttcctggtgaaagagggctatttagatcaagaaggtaatcctatggggtttgctggacttgtatcacatttgcattatcatgaaccttctaatcttgtttttgtcagttttcttgtaaatggactcttccatgatctctgtcagccaaccaggaaaggctcaaaacatttttctcaagacgttatggaaaagctagtattagtattggcacatctctttggaagaagatattttccaccaaagttccaagatgcacacttcgagttttatcaatcaaaggtgttccttgatgatctccctgaggattttagtgatgctttagatgaatataacatgaaaattatggaggactttaccactttcctacgaattgtttccaaactggctgatatgaatcaggaatatcaactcccattgtcaaaaatcaaattcacaggtaaagaatgtgaagactctcaactcgtatctcatttgatgagctgcaaggaaggaagagtagcaatttcaccatttgtttgtctgtctgggaactttgatgatgatttgcttcgactagaaactccaaaccatgttactctaggcacaatcggtgtcaatcgctctcaggctccagtgctgttgtcacagaaatttgataaccgaggaaggaaaatgtcgcttaatgcctatgcactggatttctacaaacatggttccttgataggattagtccaggataacaggatgaatgaaggagatgcttattatttgttgaaggattttgcactcaccattaaatctatcagtgtttccttgcgtgagctatgtgaaaatgaagacgacaacgttgtcttagcctttgaacaactgagtacaactttttgggaaaagttaaacaaagtctaaaaacaaagtctatgcaaaccacttaaaaataattccatagtagtttttcaggtcacgtttttgattcttatgcttcttgccagaaatacattatgataaagtggaaatacattacgatgaagtggaaagagcaaacactttggaatcaaacagagttgcaatcaaacctgccatgttctgtcatgaatactcacaaattatttagtatacctgaatcttggtttctttttataactgagtaataatggttacatctcaggtagtttgaggattgactaaaaaaatgcgagaatgttgtatgtgactgaataacaatttttactctgcgaagccaaagtaaatataatattatcagtaactttatccccagtgtcagtatttataaaatgtttattaaggctagaaaaaatgaatacaatatcctgaaggtgaaatatattctcttcaattagcataaatatgatttacataagttagctatacagctattgagatagtactttctagtaaacttaaactactttttaaacatacattttgtgatgatttaacaaaaatatagagaatgatttgctttattgtaattgtatataagtgactggaaaagcacaaagaaataaagtgggttcgatctgtttac

SEQ ID NO: 125511 - DNA, 618 bp, Homo sapiens
  Payload ID: 4606
  Gene Symbol: DDX60
  Gene Name: DEAD (Asp-Glu-Ala-Asp) box polypeptide 60
  ENST ID: ENST00000511317
  CDS Start-End: 1-575
atcaatcaaaggtgttccttgatgatctccctgaggattttagtgatgctttagatgaatataacatgaaaattatggaggactttaccactttcctacgaattgtttccaaactggctgatatgaatcaggaatatcaactcccattgtcaaaaatcaaattcacaggtaaagaatgtgaagactctcaactcgtatctcatttgatgagctgcaaggaaggaagagtagcaatttcaccatttgtttgtctgtctgggaactttgatgatgatttgcttcgactagaaactccaaaccatgttactctaggcacaatcggtgtcaatcgctctcaggctccagtgctgttgtcacagaaatttgataaccgaggaaggaaaatgtcgcttaatgcctatgcactggatttctacaaacatggttccttgataggattagtccaggataacaggatgaatgaaggagatgcttattatttgttgaaggattttgcactcaccattaaatctatcaggtgtgttatatatttaaatattgattttagattttttaataatttatttataatttgaaaaatgttgagctgttactataagccaggtacatgaaggtgcc

SEQ ID NO: 125512 - DNA, 534 bp, Homo sapiens
  Payload ID: 4606
  Gene Symbol: DDX60
  Gene Name: DEAD (Asp-Glu-Ala-Asp) box polypeptide 60
  ENST ID: ENST00000514995
  CDS Start-End: 176-534
aaaccgaaactcccgccggatgcataaaagactggctgcggtggctcagagcgccgagtcctaggccaggactgccattttcattaagaactgccacttagaggtaccaaaataaagggtatttgctacctttaatacttgccagttcaggttggaggcacaggcagcagcaagaatggaaagaaatgttcttacaacattttcacaggaaatgtcccagttaattttgaatgaaatgccaaaagctgaatattccagtttattcaatgattttgttgaatctgaattttttttgattgatggggattcattacttatcacatgtatctgtgagatatcatttaagcctgggcagaacctccatttcttctatctggttgaacgctatcttgtggatcttattagcaaaggaggacaattcaccatagttttcttcaaggatgccgagtatgcgtatttcaacttccctgaacttctttctttgagaactgctttaattcttcatcttcagaagaataccaccattgatgttcg

SEQ ID NO: 125513 - DNA, 542 bp, Homo sapiens
  Payload ID: 4606
  Gene Symbol: DDX60
  Gene Name: DEAD (Asp-Glu-Ala-Asp) box polypeptide 60
  ENST ID: ENST00000513997
  CDS Start-End: 1-314
tccgatgtccctttttggctctttcagctaccataagtaatcctgaacatctcaccgagtggctacaatcggtaaaatggtactggaaacaagaagacaaaataattgaaaataataccgcttctaaaagacatgtgggtcgtcaggccggctttcccaaagactacttgcaagtaaaacaatcgtataaagttagacttgtgctctatggagagaggtataatgatctagagaagcatgtatgttcaataaaacatggtgacattcattttgatcattttcacccatgtgctgcactaacaacagatcattagctattaatggagtaactggaaagcaatagaactgctacagtgtgctgtgaccccagatgacttctgcaaaggtcatgctgttgtatgagtcttcttaagatgtctagacttttgtggcaggaatgcagaatgaacataaagacttagattgaaaggtatggattccctcctgatcttaccctttcacctcgagaaagcatccagctgtatgatgccatgtttcaaatt

SEQ ID NO: 125514 - DNA, 6754 bp, Homo sapiens
  Payload ID: 4607
  Gene Symbol: DDX60L
  Gene Name: DEAD (Asp-Glu-Ala-Asp) box polypeptide 60-like
  Uniprot ID: Q5H9U9
  ENST ID: ENST00000260184
  CDS Start-End: 222-5342
agagcgcccagtccgacgccaggctctgcgctcggtctcctctgctccacctcctccccgcggggcgtgcagctccgaagctctttggacctagcaggttcggcggccgggaggtgccattcacatcaaatgtagccattttagaggtgtcaaaataaatcagccatatttaataaattccagctctactcttctaccctgtagcccaagaagcagcaacgatggggtcaaaggatcatgcagtatttttcagggaaatgacacagttaattttgaatgaaatgccaaaagctgggtattccagcatattaaatgattttgtggaatctaatttttttgtgattgatggagattccttgcttgtcacatgcctgggtgtaaaatcattcaagtggggacagaatctccactttttctatctggttgaatgctatcttgtggatcttctgagtaacggaggacaattcaccatagttttctttaaggatgctgaatatgcatattttgattttcctgaacttctttcattgaggaccgctttaattctccaccttcaacacaatactaacattgatgtgcaaacggagttttctggatgcttatcacaagattggaagttattcttggaacagcattacccgtattttctgatagtttcagaggaaggcctgagtgatttacaaacgtacctttttaacttcctaatcatacattcctggggaatgaaagtcaatgttgtgctttcatcagggcatgaatctgatactctcagattttatgcatatactatggaaagcacagacagaaaccaaactttttccaaggagaatgaaacagtgattcagagtgcatataaaagcctcatacaacacttggaagaaataagggttttagtattagcaactcattttgaacatttgaaatggaatgatatgatggaagaggcgtatcagactctatttctgcttcagcacctatggtcagaaggatcggacatccagcgtgttctctgtgtcacttcatgttcactatccttgagaatgtaccatcgtgtcttagtgcacagtaattgcctatccctgcaggaggtggaagatttctgcagactgcgttgcctctgtgtggcttttcaactccacttacccctttctcagagagcttgttctcgagtcatcacatgctcttggattaggaacagtgattctttcttaaaaatgaacaagtggtgtgaatatttcattttaagcaacttaaacgtttttggatgctggaatctgaatttaaatcatgtttctgacttgtatgatgagcaattgttaaagaatatagccttctactatgaatttgaaagtactcaagaaccacatttgaatttgggagattccattaggagggattatgaagacctgtggaatgttgtgtcacacctggttaaagaatttaacgttggaaagtcttttcctctgagaacaacaagaagacattttcttagacaagagaaatcggtcattcaagaaatctccttggaaaagatgcctagtgtgggctttattccaatgacatctgctgtaattgatgagtttgttggagatatgatgaaggatttgcctattctaaagagtgatgatccggttgttccttcactgtttaaacaaaagacatctgatgaacttttgcactggcatgctcaaagactccttagtgacgactatgacaggatcaaatgtcatgttgatgaacaatctagagatcctcatgttcttgatttcctgaaaaagattcaggattatcagcaattttatgggaaatcgttagaatcaatctctacgaaagtcattgtgactcaaactactcggccaaaggaggattccagtggtgccagtggtgaaatattacagaataccaaaccccaccaaattaccaaaaagagtaagaaaaagtcatttctcaaagaagatcagaacaaagctcagcaaaacgatgatctgctgttttctattgaagaggagatgaagaacaatttacattctggaataaggaaattggaagattatttgacatcatgtgcaagtaattcagtgaaatttggagttgaaatgttaggattaattgcctgctttaaagcatggaaaaaacattgccgaggtgaaggcaaaatttcgaaagatttaagtatagctgttcaaatgatgaaaaggattcattcactcctggagagatacccagaaattttggaagcagaacatcatcaatatatagctaaatgccttaaatatttaggctttaatgatctggcaaactctttggatccaactctgataggagatgacaaaaataagaagaaatattcgattgacattggaccagctcggtttcaactgcaatacatgggccattacttgataagagatgaaagaaaagatcgggatcccagggtccaggattttattcccaacgcatggcagcaggaactcctggatgtggtagataagaatgagtcagcagtgattgttgccccaacgtcctcaggcaaaacctatgcttcctactactgcatggagaaagtgctgagggagagcgatgtcggggtggttgtgtacgttgcacccgcaaagtcccttgttggtcaagtggctgcaactgttgagaatcgttttactaaaacgttgcctgccggcagaactctatgcggtgcttttacaagagattattgtcacaatgtactaaactgtcaggtacttattacagtgccggaatgttttgaaatcctgttgcttgctcctcatcgccaaaaatgggtggaaaggatcagatatgttatatttgatgaggtccattatcttggcagagaagttggagcaaaattttgggagctcctccttgtcattattcgatgtccctttttggttctttcagctaccataaataacccaaatcttctcaccaagtggctgcaatcagtaaaacagtactggaaacaggcagacaagattatggaagagaaatgtatttctgaaaaacaggctgacaaatgtctcaactttctccaagaccattcatataaaaatcaatcatatgaagttagacttgtgctctgtggagagagatacaatgatttagagaagcatatatgttcagtaaaacatgatgatgtttattttgatcattttcatccctgtgctgcgctaacgacagatattattgaaaagtatggattcccacctgatcttaccctcacccctcaagaaagcatccagctttatgataccatggctcaagtctgggaaacttggcccagggctcaggaattgtgtccagaggaattcattctttttaagaataagatagtcattaagaagttggatgctagaaaatatgaagaaaacttaaaggcagaattgacaaattggattaaaaatggccaagtgaagaaggtcaaaagagtactgaagaaccttagtccggattcattgtctagttcaaaagatatggtgaaaatgtttcctcttcttgttgaaaagttaagacaaatggataagttgcctgcaatattttttttgtttaagaatgatgatgtgggaaaaagagctggaagtgtgtgcacttttctggagaagacagagacaaaaagccatccccacactgaatgtcatagttatgtctttgcaatagatgaagtacttgaaaaagtgaggaagacacagaaaaggatcactaaaaaaaacccaaagaaggctgaaaaactggaaagaaaaaaagtgtatagagctgaatatattaatttcctggagaatctgaagattctggaaatttctgaggactgcacgtatgctgatgtcaaagccctacacactgaaattaccaggaataaagactcaactttggagagggtattaccgcgagtgcgatttacaagacacggcaaagaactgaaggctttagcacaaagggggattggatatcatcacagcagcatgtattttaaagaaaaagagtttgttgagatactctttgtaaaagggcttattagggtagtgacagctactgaaacacttgccttagggatccacatgccatgcaaatctgttgtttttgcccaagactcagtctatctggatgctttaaattacagacagatgtctggtcgtgctggaagaagaggtcaagacctgcttggaaatgtgtatttctttgatatcccattgcccaaaataaaaagactccttgcatccagtgttcctgagctgagaggacagttccctctcagcataaccctggtcctgcgactcatgctgctggcttccaagggagatgacccagaggatgccaaggcaaaggtgttgtcagtgctaaagcattcattgctgtcttttaagagacgaagagccatggagactttgaaactttactttttgttttccttgcagctccttatcaaagaggactatttaaataaaaagggtaatccaaagaaatttgcaggacttgcatcatatttgcatggtcatgaaccttcaaatcttgtttttgtaaattttctcaagagaggccttttccataatctctgtaagccagcctggaaaggctcacaacaattttcccaagatgtgatggaaaagctcgtgttagtattggcaaatttgtttggaagaaaatatattccagcaaaattccaaaatgctaatttaagtttttctcagtcaaaggtgatccttgccgaactcccggaggattttaaagctgctttatatgagtataacctggcagtaatgaaggattttgcctccttcctgctgattgcttccaagtcggtgaacatgaaaaaagagcatcaactccctttgtcaagaatcaaattcacaggtaaagaatgtgaagactcccaactcgtgtctcacttgatgagctgcaagaaaggaagagtagccatttcaccatttgtttgtctttcggggaacacagataatgatttgcttcgaccagagactatcaaccaggtcatcctgcgcacagtcggtgttagtggcactcaggctcctctgctgtggccatggaaattagataaccgaggaaggagaatgccactaaatgcatatgtgctcaatttctataaacacaactgcttgacaagattagaccaaaaaaatgggatgcgtatgggacagcttttaaagtgtttgaaagattttgcattcaacattcaggctatcagtgactccttgagtgaactatgtgaaaataagcgtgacaatgtagtcctggcatttaaacaattgagtcaaaccttttatgagaaacttcaagaaatgcaaattcaaatgagtcaaaatcatttagaataacaccatggaaaactttcaagtctgattatgtggtatttatccctttgcaaggagagatataattaagcttacacaatgaaatggaaaaaatgtttgtcttggagtcaaacagaattaaactcagatatcagctctgctattttctaactgaatgactttaagttatgtaatatatctgagctttaacttcatttttggcaaaaccggagtaaaaatgaatacctctagttgttttgaggattaaatgagataatgtaagaaaagtgattgggattgggtggtgacttaatgaacggtagtggtttttttagtagttaatgtatagcaaaattagtttcacattgtcaagttttcaatacatccccaagttaattgaattttaaattaatgatcaataaatcacaaaggacccaaatcaattctgaacaacaatttagttatgtaagaagacttctgagattacaagaaactcactgctgtggactggatgtttgtgccctcccctccaaaatttttatattgaaattctaaccctcaatgtgatggtattaggagatgataggtcatgagggtggagctccttggatgtaattagtgcctttaacagagagacaagagagcttgttctccaatctctgctcactaccactggatgatacaatgggaagatggccatctgcagaccaagaagcaagccctcaacagaactgaatctacttacaccatgatcttgaactttccagcctccaggattgtgagaaatacatgtttgttgtttagccatctagtctgtggttttctgttgaagcagtctgaattgactaaaacagtcacttggagtagttataaaccactttcctgttgaaagcagaacatgctgattcaactgttttgttcaatagcaatgatagattttgtttaagtcccctacactttcttatttctaaatgatcaagagtacacttcctggcagtgattaaggagtgtgtatctaacagaaaaaatatatataccctgtgaacccgaatatggaattcagattgtttctgccctcagtatcatacttaaaaaacaagcatacaaacaaacataagggaacaaacagcaaccataacaaaaacaaacctttaaaggtgcgtttttgctgtgataaatgaatacggtactctgaaggagaaaaaagtttctcaaatgagcttaaactgcaagtgatttaaaaattagagaatataattcttaaagctattgaaagtttcaaccagaaaacctcaagtgaattttgtatgtaaatgaaatcttgaatgtaagttctgtgattctttaagcaaacaattagctgaaaacttggtattgttgtagtttatgtagtaagtgacttggcacccatcagaaaataaagggcattaaattga

SEQ ID NO: 125515 - DNA, 2605 bp, Homo sapiens
  Payload ID: 4607
  Gene Symbol: DDX60L
  Gene Name: DEAD (Asp-Glu-Ala-Asp) box polypeptide 60-like
  ENST ID: ENST00000505863
  CDS Start-End: 1-2605
agaatgtaccatcgtgtcttagtgcacagtaattgcctatccctgcaggaggtggaagatttctgcagactgcgttgcctctgtgtggcttttcaactccacttacccctttctcagagagcttgttctcgagtcatcacatgctcttggattaggaacagtgattctttcttaaaaatgaacaagtggtgtgaatatttcattttaagcaacttaaacgtttttggatgctggaatctgaatttaaatcatgtttctgacttgtatgatgagcaattgttaaagaatatagccttctactatgaatttgaaagtactcaagaaccacatttgaatttgggagattccattaggagggattatgaagacctgtggaatgttgtgtcacacctggttaaagaatttaacgttggaaagtcttttcctctgagaacaacaagaagacattttcttagacaagagaaatcggtcattcaagaaatctccttggaaaagatgcctagtgtgggctttattccaatgacatctgctgtaattgatgagtttgttggagatatgatgaaggatttgcctattctaaagagtgatgatccggttgttccttcactgtttaaacaaaagacatctgatgaacttttgcactggcatgctcaaagactccttagtgacgactatgacaggatcaaatgtcatgttgatgaacaatctagagatcctcatgttcttgatttcctgaaaaagattcaggattatcagcaattttatgggaaatcgttagaatcaatctctacgaaagtcattgtgactcaaactactcggccaaaggaggattccagtggtgccagtggtgaaatattacagaataccaaaccccaccaaattaccaaaaagagtaagaaaaagtcatttctcaaagaagatcagaacaaagctcagcaaaacgatgatctgctgttttctattgaagaggagatgaagaacaatttacattctggaataaggaaattggaagattatttgacatcatgtgcaagtaattcagtgaaatttggagttgaaatgttaggattaattgcctgctttaaagcatggaaaaaacattgccgaggtgaaggcaaaatttcgaaagatttaagtatagctgttcaaatgatgaaaaggattcattcactcctggagagatacccagaaattttggaagcagaacatcatcaatatatagctaaatgccttaaatatttaggctttaatgatctggcaaactctttggatccaactctgataggagatgacaaaaataagaagaaatattcgattgacattggaccagctcggtttcaactgcaatacatgggccattacttgataagagatgaaagaaaagatcgggatcccagggtccaggattttattcccaacgcatggcagcaggaactcctggatgtggtagataagaatgagtcagcagtgattgttgccccaacgtcctcaggcaaaacctatgcttcctactactgcatggagaaagtgctgagggagagcgatgtcggggtggttgtgtacgttgcacccgcaaagtcccttgttggtcaagtggctgcaactgttgagaatcgttttactaaaacgttgcctgccggcagaactctatgcggtgcttttacaagagattattgtcacaatgtactaaactgtcaggtccattatcttggcagagaagttggagcaaaattttgggagctcctccttgtcattattcgatgtccctttttggttctttcagctaccataaataacccaaatcttctcaccaagtggctgcaatcagtaaaacagtactggaaacaggcagacaagattatggaagagaaatgtatttctgaaaaacaggctgacaaatgtctcaactttctccaagaccattcatataaaaatcaatcatatgaagttagacttgtgctctgtggagagagatacaatgatttagagaagcatatatgttcagtaaaacatgatgatgtttattttgatcattttcatccctgtgctgcgctaacgacagatattattgaaaagtatggattcccacctgatcttaccctcacccctcaagaaagcatccagctttatgataccatggctcaagtctgggaaacttggcccagggctcaggaattgtgtccagaggaattcattctttttaagaataagatagtcattaagaagttggatgctagaaaatatgaagaaaacttaaaggcagaattgacaaattggattaaaaatggccaagtgaagaaggtcaaaagagtactgaagaaccttagtccggattcattgtctagttcaaaagatatggtgaaaatgtttcctcttcttgttgaaaagttaagacaaatggataagttgcctgcaatattttttttgtttaagaatgatgatgtgggaaaaagagctggaagtgtgtgcacttttctggagaagacagagacaaaaagccatccccacactgaatgtcatagttatgtctttgcaatagatgaagtacttgaaaaagtgaggaagacacagaaaaggatcactaaaaaaaacccaaagaaggctg

SEQ ID NO: 125516 - DNA, 4568 bp, Homo sapiens
  Payload ID: 4607
  Gene Symbol: DDX60L
  Gene Name: DEAD (Asp-Glu-Ala-Asp) box polypeptide 60-like
  Uniprot ID: Q5H9U9
  ENST ID: ENST00000505890
  CDS Start-End: 222-4148
agagcgcccagtccgacgccaggctctgcgctcggtctcctctgctccacctcctccccgcggggcgtgcagctccgaagctctttggacctagcaggttcggcggccgggaggtgccattcacatcaaatgtagccattttagaggtgtcaaaataaatcagccatatttaataaattccagctctactcttctaccctgtagcccaagaagcagcaacgatggggtcaaaggatcatgcagtatttttcagggaaatgacacagttaattttgaatgaaatgccaaaagctgggtattccagcatattaaatgattttgtggaatctaatttttttgtgattgatggagattccttgcttgtcacatgcctgggtgtaaaatcattcaagtggggacagaatctccactttttctatctggttgaatgctatcttgtggatcttctgagtaacggaggacaattcaccatagttttctttaaggatgctgaatatgcatattttgattttcctgaacttctttcattgaggaccgctttaattctccaccttcaacacaatactaacattgatgtgcaaacggagttttctggatgcttatcacaagattggaagttattcttggaacagcattacccgtattttctgatagtttcagaggaaggcctgagtgatttacaaacgtacctttttaacttcctaatcatacattcctggggaatgaaagtcaatgttgtgctttcatcagggcatgaatctgatactctcagattttatgcatatactatggaaagcacagacagaaaccaaactttttccaaggagaatgaaacagtgattcagagtgcatataaaagcctcatacaacacttggaagaaataagggttttagtattagcaactcattttgaacatttgaaatggaatgatatgatggaagaggcgtatcagactctatttctgcttcagcacctatggtcagaaggatcggacatccagcgtgttctctgtgtcacttcatgttcactatccttgagaatgtaccatcgtgtcttagtgcacagtaattgcctatccctgcaggaggtggaagatttctgcagactgcgttgcctctgtgtggcttttcaactccacttacccctttctcagagagcttgttctcgagtcatcacatgctcttggattaggaacagtgattctttcttaaaaatgaacaagtggtgtgaatatttcattttaagcaacttaaacgtttttggatgctggaatctgaatttaaatcatgtttctgacttgtatgatgagcaattgttaaagaatatagccttctactatgaatttgaaagtactcaagaaccacatttgaatttgggagattccattaggagggattatgaagacctgtggaatgttgtgtcacacctggttaaagaatttaacgttggaaagtcttttcctctgagaacaacaagaagacattttcttagacaagagaaatcggtcattcaagaaatctccttggaaaagatgcctagtgtgggctttattccaatgacatctgctgtaattgatgagtttgttggagatatgatgaaggatttgcctattctaaagagtgatgatccggttgttccttcactgtttaaacaaaagacatctgatgaacttttgcactggcatgctcaaagactccttagtgacgactatgacaggatcaaatgtcatgttgatgaacaatctagagatcctcatgttcttgatttcctgaaaaagattcaggattatcagcaattttatgggaaatcgttagaatcaatctctacgaaagtcattgtgactcaaactactcggccaaaggaggattccagtggtgccagtggtgaaatattacagaataccaaaccccaccaaattaccaaaaagagtaagaaaaagtcatttctcaaagaagatcagaacaaagctcagcaaaacgatgatctgctgttttctattgaagaggagatgaagaacaatttacattctggaataaggaaattggaagattatttgacatcatgtgcaagtaattcagtgaaatttggagttgaaatgttaggattaattgcctgctttaaagcatggaaaaaacattgccgaggtgaaggcaaaatttcgaaagatttaagtatagctgttcaaatgatgaaaaggattcattcactcctggagagatacccagaaattttggaagcagaacatcatcaatatatagctaaatgccttaaatatttaggctttaatgatctggcaaactctttggatccaactctgataggagatgacaaaaataagaagaaatattcgattgacattggaccagctcggtttcaactgcaatacatgggccattacttgataagagatgaaagaaaagatcgggatcccagggtccaggattttattcccaacgcatggcagcaggaactcctggatgtggtagataagaatgagtcagcagtgattgttgccccaacgtcctcaggcaaaacctatgcttcctactactgcatggagaaagtgctgagggagagcgatgtcggggtggttgtgtacgttgcacccgcaaagtcccttgttggtcaagtggctgcaactgttgagaatcgttttactaaaacgttgcctgccggcagaactctatgcggtgcttttacaagagattattgtcacaatgtactaaactgtcaggtacttattacagtgccggaatgttttgaaatcctgttgcttgctcctcatcgccaaaaatgggtggaaaggatcagatatgttatatttgatgaggtccattatcttggcagagaagttggagcaaaattttgggagctcctccttgtcattattcgatgtccctttttggttctttcagctaccataaataacccaaatcttctcaccaagtggctgcaatcagtaaaacagtactggaaacaggcagacaagattatggaagagaaatgtatttctgaaaaacaggctgacaaatgtctcaactttctccaagaccattcatataaaaatcaatcatatgaagttagacttgtgctctgtggagagagatacaatgatttagagaagcatatatgttcagtaaaacatgatgatgtttattttgatcattttcatccctgtgctgcgctaacgacagatattattgaaaagtatggattcccacctgatcttaccctcacccctcaagaaagcatccagctttatgataccatggctcaagtctgggaaacttggcccagggctcaggaattgtgtccagaggaattcattctttttaagaataagatagtcattaagaagttggatgctagaaaatatgaagaaaacttaaaggcagaattgacaaattggattaaaaatggccaagtgaagaaggtcaaaagagtactgaagaaccttagtccggattcattgtctagttcaaaagatatggtgaaaatgtttcctcttcttgttgaaaagttaagacaaatggataagttgcctgcaatattttttttgtttaagaatgatgatgtgggaaaaagagctggaagtgtgtgcacttttctggagaagacagagacaaaaagccatccccacactgaatgtcatagttatgtctttgcaatagatgaagtacttgaaaaagtgaggaagacacagaaaaggattagcactaaaaaaaacccaaagaaggctgaaaaactggaaagaaaaaaagtgtatagagctgaatatattaatttcctggagaatctgaagattctggaaatttctgaggactgcacgtatgctgatgtcaaagccctacacactgaaattaccaggaataaagactcaactttggagagggtattaccgcgagtgcgatttacaagacacggcaaagaactgaaggctttagcacaaagggggattggatatcatcacagcagcatgtattttaaagaaaaagagtttgttgagatactctttgtaaaagggcttattagggtagtgacagctactgaaacacttgccttagggatccacatgccatgcaaatctgttgtttttgcccaagactcagtctatctggatgctttaaattacagacagatcatgtgaactctcctagactggaatatgaagactgtgattttacagagaaaaggagtttatctccatttcatgaccttttaggatgttgctgtttcaactttaaaagccatattttccttttctcaagtatagctatagaccatatcaccttttaccatgttctgttatgaaaaacaggaagtccctgagctggaatttttcagtctttctctttttcatgtagagagcaaagtttctcttaagggacttttgtttccttcagaattatggtctccttttttctcttccttgccaaaatcactagtttggaagaaatccaacatcatttatttactatggaccacaatgagagtggaactactttgttatcctgccctgatgacttagcattatctcctaggacagaataaaatatactttctctgt

SEQ ID NO: 125517 - DNA, 6781 bp, Homo sapiens
  Payload ID: 4607
  Gene Symbol: DDX60L
  Gene Name: DEAD (Asp-Glu-Ala-Asp) box polypeptide 60-like
  Uniprot ID: Q5H9U9
  ENST ID: ENST00000511577
  CDS Start-End: 249-5369
actcaggcgctggctgctgtgtggctcagagcgcccagtccgacgccaggctctgcgctcggtctcctctgctccacctcctccccgcggggcgtgcagctccgaagctctttggacctagcaggttcggcggccgggaggtgccattcacatcaaatgtagccattttagaggtgtcaaaataaatcagccatatttaataaattccagctctactcttctaccctgtagcccaagaagcagcaacgatggggtcaaaggatcatgcagtatttttcagggaaatgacacagttaattttgaatgaaatgccaaaagctgggtattccagcatattaaatgattttgtggaatctaatttttttgtgattgatggagattccttgcttgtcacatgcctgggtgtaaaatcattcaagtggggacagaatctccactttttctatctggttgaatgctatcttgtggatcttctgagtaacggaggacaattcaccatagttttctttaaggatgctgaatatgcatattttgattttcctgaacttctttcattgaggaccgctttaattctccaccttcaacacaatactaacattgatgtgcaaacggagttttctggatgcttatcacaagattggaagttattcttggaacagcattacccgtattttctgatagtttcagaggaaggcctgagtgatttacaaacgtacctttttaacttcctaatcatacattcctggggaatgaaagtcaatgttgtgctttcatcagggcatgaatctgatactctcagattttatgcatatactatggaaagcacagacagaaaccaaactttttccaaggagaatgaaacagtgattcagagtgcatataaaagcctcatacaacacttggaagaaataagggttttagtattagcaactcattttgaacatttgaaatggaatgatatgatggaagaggcgtatcagactctatttctgcttcagcacctatggtcagaaggatcggacatccagcgtgttctctgtgtcacttcatgttcactatccttgagaatgtaccatcgtgtcttagtgcacagtaattgcctatccctgcaggaggtggaagatttctgcagactgcgttgcctctgtgtggcttttcaactccacttacccctttctcagagagcttgttctcgagtcatcacatgctcttggattaggaacagtgattctttcttaaaaatgaacaagtggtgtgaatatttcattttaagcaacttaaacgtttttggatgctggaatctgaatttaaatcatgtttctgacttgtatgatgagcaattgttaaagaatatagccttctactatgaatttgaaagtactcaagaaccacatttgaatttgggagattccattaggagggattatgaagacctgtggaatgttgtgtcacacctggttaaagaatttaacgttggaaagtcttttcctctgagaacaacaagaagacattttcttagacaagagaaatcggtcattcaagaaatctccttggaaaagatgcctagtgtgggctttattccaatgacatctgctgtaattgatgagtttgttggagatatgatgaaggatttgcctattctaaagagtgatgatccggttgttccttcactgtttaaacaaaagacatctgatgaacttttgcactggcatgctcaaagactccttagtgacgactatgacaggatcaaatgtcatgttgatgaacaatctagagatcctcatgttcttgatttcctgaaaaagattcaggattatcagcaattttatgggaaatcgttagaatcaatctctacgaaagtcattgtgactcaaactactcggccaaaggaggattccagtggtgccagtggtgaaatattacagaataccaaaccccaccaaattaccaaaaagagtaagaaaaagtcatttctcaaagaagatcagaacaaagctcagcaaaacgatgatctgctgttttctattgaagaggagatgaagaacaatttacattctggaataaggaaattggaagattatttgacatcatgtgcaagtaattcagtgaaatttggagttgaaatgttaggattaattgcctgctttaaagcatggaaaaaacattgccgaggtgaaggcaaaatttcgaaagatttaagtatagctgttcaaatgatgaaaaggattcattcactcctggagagatacccagaaattttggaagcagaacatcatcaatatatagctaaatgccttaaatatttaggctttaatgatctggcaaactctttggatccaactctgataggagatgacaaaaataagaagaaatattcgattgacattggaccagctcggtttcaactgcaatacatgggccattacttgataagagatgaaagaaaagatcgggatcccagggtccaggattttattcccaacgcatggcagcaggaactcctggatgtggtagataagaatgagtcagcagtgattgttgccccaacgtcctcaggcaaaacctatgcttcctactactgcatggagaaagtgctgagggagagcgatgtcggggtggttgtgtacgttgcacccgcaaagtcccttgttggtcaagtggctgcaactgttgagaatcgttttactaaaacgttgcctgccggcagaactctatgcggtgcttttacaagagattattgtcacaatgtactaaactgtcaggtacttattacagtgccggaatgttttgaaatcctgttgcttgctcctcatcgccaaaaatgggtggaaaggatcagatatgttatatttgatgaggtccattatcttggcagagaagttggagcaaaattttgggagctcctccttgtcattattcgatgtccctttttggttctttcagctaccataaataacccaaatcttctcaccaagtggctgcaatcagtaaaacagtactggaaacaggcagacaagattatggaagagaaatgtatttctgaaaaacaggctgacaaatgtctcaactttctccaagaccattcatataaaaatcaatcatatgaagttagacttgtgctctgtggagagagatacaatgatttagagaagcatatatgttcagtaaaacatgatgatgtttattttgatcattttcatccctgtgctgcgctaacgacagatattattgaaaagtatggattcccacctgatcttaccctcacccctcaagaaagcatccagctttatgataccatggctcaagtctgggaaacttggcccagggctcaggaattgtgtccagaggaattcattctttttaagaataagatagtcattaagaagttggatgctagaaaatatgaagaaaacttaaaggcagaattgacaaattggattaaaaatggccaagtgaagaaggtcaaaagagtactgaagaaccttagtccggattcattgtctagttcaaaagatatggtgaaaatgtttcctcttcttgttgaaaagttaagacaaatggataagttgcctgcaatattttttttgtttaagaatgatgatgtgggaaaaagagctggaagtgtgtgcacttttctggagaagacagagacaaaaagccatccccacactgaatgtcatagttatgtctttgcaatagatgaagtacttgaaaaagtgaggaagacacagaaaaggatcactaaaaaaaacccaaagaaggctgaaaaactggaaagaaaaaaagtgtatagagctgaatatattaatttcctggagaatctgaagattctggaaatttctgaggactgcacgtatgctgatgtcaaagccctacacactgaaattaccaggaataaagactcaactttggagagggtattaccgcgagtgcgatttacaagacacggcaaagaactgaaggctttagcacaaagggggattggatatcatcacagcagcatgtattttaaagaaaaagagtttgttgagatactctttgtaaaagggcttattagggtagtgacagctactgaaacacttgccttagggatccacatgccatgcaaatctgttgtttttgcccaagactcagtctatctggatgctttaaattacagacagatgtctggtcgtgctggaagaagaggtcaagacctgcttggaaatgtgtatttctttgatatcccattgcccaaaataaaaagactccttgcatccagtgttcctgagctgagaggacagttccctctcagcataaccctggtcctgcgactcatgctgctggcttccaagggagatgacccagaggatgccaaggcaaaggtgttgtcagtgctaaagcattcattgctgtcttttaagagacgaagagccatggagactttgaaactttactttttgttttccttgcagctccttatcaaagaggactatttaaataaaaagggtaatccaaagaaatttgcaggacttgcatcatatttgcatggtcatgaaccttcaaatcttgtttttgtaaattttctcaagagaggccttttccataatctctgtaagccagcctggaaaggctcacaacaattttcccaagatgtgatggaaaagctcgtgttagtattggcaaatttgtttggaagaaaatatattccagcaaaattccaaaatgctaatttaagtttttctcagtcaaaggtgatccttgccgaactcccggaggattttaaagctgctttatatgagtataacctggcagtaatgaaggattttgcctccttcctgctgattgcttccaagtcggtgaacatgaaaaaagagcatcaactccctttgtcaagaatcaaattcacaggtaaagaatgtgaagactcccaactcgtgtctcacttgatgagctgcaagaaaggaagagtagccatttcaccatttgtttgtctttcggggaacacagataatgatttgcttcgaccagagactatcaaccaggtcatcctgcgcacagtcggtgttagtggcactcaggctcctctgctgtggccatggaaattagataaccgaggaaggagaatgccactaaatgcatatgtgctcaatttctataaacacaactgcttgacaagattagaccaaaaaaatgggatgcgtatgggacagcttttaaagtgtttgaaagattttgcattcaacattcaggctatcagtgactccttgagtgaactatgtgaaaataagcgtgacaatgtagtcctggcatttaaacaattgagtcaaaccttttatgagaaacttcaagaaatgcaaattcaaatgagtcaaaatcatttagaataacaccatggaaaactttcaagtctgattatgtggtatttatccctttgcaaggagagatataattaagcttacacaatgaaatggaaaaaatgtttgtcttggagtcaaacagaattaaactcagatatcagctctgctattttctaactgaatgactttaagttatgtaatatatctgagctttaacttcatttttggcaaaaccggagtaaaaatgaatacctctagttgttttgaggattaaatgagataatgtaagaaaagtgattgggattgggtggtgacttaatgaacggtagtggtttttttagtagttaatgtatagcaaaattagtttcacattgtcaagttttcaatacatccccaagttaattgaattttaaattaatgatcaataaatcacaaaggacccaaatcaattctgaacaacaatttagttatgtaagaagacttctgagattacaagaaactcactgctgtggactggatgtttgtgccctcccctccaaaatttttatattgaaattctaaccctcaatgtgatggtattaggagatgataggtcatgagggtggagctccttggatgtaattagtgcctttaacagagagacaagagagcttgttctccaatctctgctcactaccactggatgatacaatgggaagatggccatctgcagaccaagaagcaagccctcaacagaactgaatctacttacaccatgatcttgaactttccagcctccaggattgtgagaaatacatgtttgttgtttagccatctagtctgtggttttctgttgaagcagtctgaattgactaaaacagtcacttggagtagttataaaccactttcctgttgaaagcagaacatgctgattcaactgttttgttcaatagcaatgatagattttgtttaagtcccctacactttcttatttctaaatgatcaagagtacacttcctggcagtgattaaggagtgtgtatctaacagaaaaaatatatataccctgtgaacccgaatatggaattcagattgtttctgccctcagtatcatacttaaaaaacaagcatacaaacaaacataagggaacaaacagcaaccataacaaaaacaaacctttaaaggtgcgtttttgctgtgataaatgaatacggtactctgaaggagaaaaaagtttctcaaatgagcttaaactgcaagtgatttaaaaattagagaatataattcttaaagctattgaaagtttcaaccagaaaacctcaagtgaattttgtatgtaaatgaaatcttgaatgtaagttctgtgattctttaagcaaacaattagctgaaaacttggtattgttgtagtttatgtagtaagtgacttggcacccatcagaaaataaagggcattaaattga

SEQ ID NO: 125518 - DNA, 813 bp, Homo sapiens
  Payload ID: 4607
  Gene Symbol: DDX60L
  Gene Name: DEAD (Asp-Glu-Ala-Asp) box polypeptide 60-like
  ENST ID: ENST00000514580
  CDS Start-End: 1-586
gtttaagaatgatgatgtgggaaaaagagctggaagtgtgtgcacttttctggagaagacagagacaaaaagccatccccacactgaatgtcatagttatgtctttgcaatagatgaagtacttgaaaaagtgaggaagacacagaaaaggatcactaaaaaaaacccaaagaaggctgaaaaactggaaagaaaaaaagtgtatagagctgaatatattaatttcctggagaatctgaagattctggaaatttctgaggactgcacgtatgctgatgtcaaagccctacacactgaaattaccaggaataaagactcaactttggagagggtattaccgcgagtgcgatttacaagacacggcaaagaactgaaggctttagcacaaagggggattggatatcatcacagcagcatgtattttaaagaaaaagagtttgttgagatactctttgtaaaagggcttattagggtagtgacagctactgaaacacttgccttagggatccacatgccatgcaaatctgttgtttttgcccaagactcagtctatctggatgctttaaattacagacagatcatgtgaactctcctagactggaatatgaagactgtgattttacagagaaaaggagtttatctccatttcatgaccttttaggatgttgctgtttcaactttaaaagccatattttccttttctcaagtatagctatagaccatatcaccttttaccatgttctgttatgaaaaacaggaagtccctgagctggaatttttcagtctttctctttttcatgtagagagcaaagt

SEQ ID NO: 125519 - DNA, 588 bp, Homo sapiens
  Payload ID: 4607
  Gene Symbol: DDX60L
  Gene Name: DEAD (Asp-Glu-Ala-Asp) box polypeptide 60-like
  ENST ID: ENST00000505696
  CDS Start-End: 215-588
aacatccagatggaccgggcggggaggtggcctggtggcttcgtgcgcgccgggcgagggaagctggggcgcccactgggctcgggcggcagcttcgcggagagaggtgccattcacatcaaatgtagccattttagaggtgtcaaaataaatcagccatatttaataaattccagctctactcttctaccctgtagcccaagaagcagcaacgatggggtcaaaggatcatgcagtatttttcagggaaatgacacagttaattttgaatgaaatgccaaaagctgggtattccagcatattaaatgattttgtggaatctaatttttttgtgattgatggagattccttgcttgtcacatgcctgggtgtaaaatcattcaagtggggacagaatctccactttttctatctggttgaatgctatcttgtggatcttctgagtaacggaggacaattcaccatagttttctttaaggatgctgaatatgcatattttgattttcctgaacttctttcattgaggaccgctttaattctccaccttcaacacaatactaacattgatgtgcaaacggagttttctgg

SEQ ID NO: 125520 - DNA, 632 bp, Homo sapiens
  Payload ID: 4607
  Gene Symbol: DDX60L
  Gene Name: DEAD (Asp-Glu-Ala-Asp) box polypeptide 60-like
  ENST ID: ENST00000514748
  CDS Start-End: 337-632
gtccgacgccaggctctgcgctcggtctcctctgctccacctcctccccgcggggcgtgcagctccgaagctctttggacctagcaggttcggcggccgggtttgctaaagctgccataacaaaatattatagagtggtggcttaaacaacagaaatttatttctcactattctggaggctgtgaagtacaagatcaagattctggctgattgagtttctggtgagaggtgccattcacatcaaatgtagccattttagaggtgtcaaaataaatcagccatatttaataaattccagctctactcttctaccctgtagcccaagaagcagcaacgatggggtcaaaggatcatgcagtatttttcagggaaatgacacagttaattttgaatgaaatgccaaaagctgggtattccagcatattaaatgattttgtggaatctaatttttttgtgattgatggagattccttgcttgtcacatgcctgggtgtaaaatcattcaagtggggacagaatctccactttttctatctggttgaatgctatcttgtggatcttctgagtaacggaggacaattcaccatagttttctttaaggatgctgaatatgcatattttgattttcctga

SEQ ID NO: 125521 - DNA, 428 bp, Homo sapiens
  Payload ID: 4607
  Gene Symbol: DDX60L
  Gene Name: DEAD (Asp-Glu-Ala-Asp) box polypeptide 60-like
  ENST ID: ENST00000512371
  CDS Start-End: 198-428
gtccgacgccaggctctgcgctcggtctcctctgctccacctcctccccgcggggcgtgcagctccgaagctctttggacctagcagaggtgccattcacatcaaatgtagccattttagaggtgtcaaaataaatcagccatatttaataaattccagctctactcttctaccctgtagcccaagaagcagcaacgatggggtcaaaggatcatgcagtatttttcagggaaatgacacagttaattttgaatgaaatgccaaaagctgggtattccagcatattaaatgattttgtggaatctaatttttttgtgattgatggagattccttgcttgtcacatgcctgggtgtaaaatcattcaagtggggacagaatctccactttttctatctggttgaatgctatcttgtggatcttctgagt

SEQ ID NO: 125522 - DNA, 3717 bp, Homo sapiens
  Payload ID: 4608
  Gene Symbol: DDX11
  Gene Name: DEAD/H (Asp-Glu-Ala-Asp/His) box helicase 11
  Uniprot ID: Q96FC9
  ENST ID: ENST00000228264
  CDS Start-End: 120-2762
gttgttccggctgcctttcactgaggggacccgccagtttctaactcagtggcgtttgccctgattcccggggcctggctttcagcgtagcaattctgccggcgaagaaggaagacttcatggcagagctgtaccgggttttggaggctggcaagattgggatatttgagagtccaactggcactgggaagtccttaagtcttatttgtggggccctctcttggctccgtgactttgaacagaagaagcgtgaagaagaggcacgactccttgaaactggaactggccccttacatgatgagaaagatgaatccctgtgtctgtcttcttcctgcgaaggggctgcaggcaccccgaggcctgctggagaaccggcctgggttactcagtttgtgcagaagaaagaagagagggacctggtggaccgactaaaggcggagcaggccaggaggaagcagcgagaagaacgcctgcagcagctgcagcacagggtgcagctcaagtatgcagccaagcgcctgaggcaggaagaagaagaaagagagaatctcctccgcctcagcagggagatgctagagacaggcccggaggctgagcggctggagcagctggagtctggggaggaggagctggtcctcgccgaatacgagagtgatgaggagaaaaaggtggcgagcagagtggatgaggatgaggatgacctggaggaagaacacataactaagatttattactgtagtcggacacactcccagctggcccagtttgtgcatgaggtgaagaagagcccctttggcaaggatgttcggctggtctcccttggctcccggcagaacctttgtgtaaatgaagacgtgaaaagcctaggttctgtgcagcttatcaacgaccgctgtgtggacatgcagagaagcaggcacgagaagaagaaaggagctgaggaggagaagccaaagaggaggaggcaggagaagcaggcagcctgccccttctacaaccacgagcagatgggccttctccgggatgaggccctggcagaggtgaaggacatggagcagctgctggcccttgggaaggaggcccgggcctgtccctattacgggagccgccttgccatccctgcagcccagctggtggtgctgccctatcagatgctgctgcatgcggccactcggcaggccgcgggcatccggctgcaggaccaggtggtgatcatcgacgaggcgcacaacctgatcgacaccatcacgggcatgcacagcgtggaggtcagcggctcccagctctgccaggcccattcccagctgctgcagtacgtggagcgatacgggaagcgtttgaaggccaagaacctgatgtacctgaagcagatcctgtatttgctggagaaattcgtggctgtgctaggggggaacattaagcaaaatcccaatacacagagtctgtcacagacagggacggagctgaagaccatcaacgactttctcttccagagccagatcgacaacatcaacctgttcaaggtgcagcgatactgtgagaagagcatgatcagcagaaagctctttggattcactgaacggtacggagcagtgttctcatcccgggagcagcccaaactggctgggtttcagcaattcctgcagagcctgcagcccaggacgactgaagctcttgcagcccctgcagacgagagtcaggccagcaccctgcgaccagcttctccactgatgcacatccaaggcttcctggcagctctcactacggccaaccaggacggcagggtcatcctgagccgccaaggcagcctcagtcagagcaccctgaagtttttgctcctgaatccagctgtgcactttgcccaagtggtgaaggaatgccgggcagtggtcattgcggggggtaccatgcagccggtgtctgacttccggcagcagctgctggcctgtgccggggtggaagctgagcgcgtggtggagttttcctgtggtcacgtgatccctccagacaacatcctgcccctcgtcatctgcagcgggatctccaaccagccgctggaattcacgttccagaaaagagagctgcctcagatgatggacgaggtgggtcgcattctctgtaacctgtgcggtgtggttcctggaggggtggtctgtttcttcccctcctacgagtacctgcgccaggtccatgcccactgggagaagggtggcctgctgggccgtctggctgccaggaagaagatattccaggaacctaagagcgcacaccaggtggagcaggtgctgctggcatattccaggtgcatccaggcctgtggccaggagagaggccaggtgacaggggccctgctcctctctgtggttggaggaaagatgagtgaagggatcaacttctctgacaacctaggccggtgtgtggtgatggtgggcatgcccttccccaacatcaggtctgcagagctgcaggagaagatggcctacttggatcaaaccctccccagagcccccggccaggcacccccagggaaggctctggtggagaacctgtgcatgaaggccgtcaaccagtccataggcagggccatcaggcaccagaaggattttgccagcgtagtgctcctggaccagcgatatgcccggccccctgtcctggccaagctgccggcctggatccgagcccgtgtggaggtcaaagctacctttggccccgccattgctgctgtgcagaagtttcaccgggagaagtcggcctcttcctgatgggcaaccacaccactgcctggcgccgtgcccttcctttgtcctgcccgctggagacagtgtttgtcgtgggcgtggtctgcggggatcctgttacaaaggtgaaacccaggaggagagtgtggagtccagagtgctgccaggacccaggcacaggcgttagctcccgtaggagaaaatgggggaatcctgaatgaacagtgggtcctggctgtccttggggcgttccagggcagctcccctcctggaatagaatctttctttccatcctgcatggctgagagccaggcttccttcctggtctccgcaggaggctgtggcagctgtggcatccactgtggcatctccgtcctgcccaccttcttaagaggcgagatggagcaggcccatctgcctctgccctttctagccaaggttatagctgccctggactgctcactctctggtctcaatttaaaatgatccatggccacagggctcctgcccaggggcttgtcaccttcccctcctccttcctgagtcactccttcagtagaaggccctgctccctatcctgtcccacagccctgcctggatttgtatccttggcttcgtgccagttcctccaagtctatggcacctccctccctctcaaccacttgagcaaactccaagacaccttctaccccaacaccagcaattatgccaagggccgttaggctctcaacatgactatagagaccccgtgtcatcacggagacctttgttcctgtgggaaaatatccctcccacctgcaacagctgcccctgctgactgcgcctgtcttctccctctgaccccagagaaaggggctgtggtcagctgggatcttctgccaccatcagggacaaacgggggcaggaggaaagtcactgatgcccagatgtttgcatcctgcacagctataggtccttaaataaaagtgtgctgttggtt

SEQ ID NO: 125523 - DNA, 3724 bp, Homo sapiens
  Payload ID: 4608
  Gene Symbol: DDX11
  Gene Name: DEAD/H (Asp-Glu-Ala-Asp/His) box helicase 11
  Uniprot ID: Q96FC9
  ENST ID: ENST00000350437
  CDS Start-End: 199-2769
ttctaactcagtggcgtttgccctgattcccggggcctggctttcagcgtagcaattctgccggcgaagaaggtgagcgcagtgctgtgtggcagcagagctccttaggacgaggagcagcgggacgaggaagggcagactggtgaaatcgcaaactgggcgtctgttccggcgccggacccctatttgcaaaggtccatggctaatgaaacacagaaggttggtgccatccattttccttttcccttcacaccctattccatccaggaagacttcatggcagagctgtaccgggttttggaggctggcaagattgggatatttgagagtccaactggcactgggaagtccttaagtcttatttgtggggccctctcttggctccgtgactttgaacagaagaagcgtgaagaagaggcacgactccttgaaactggaactggccccttacatgatgagaaagatgaatccctgtgtctgtcttcttcctgcgaaggggctgcaggcaccccgaggcctgctggagaaccggcctgggttactcagtttgtgcagaagaaagaagagagggacctggtggaccgactaaaggcggagcaggccaggaggaagcagcgagaagaacgcctgcagcagctgcagcacagggtgcagctcaagtatgcagccaagcgcctgaggcaggaagaagaagaaagagagaatctcctccgcctcagcagggagatgctagagacaggcccggaggctgagcggctggagcagctggagtctggggaggaggagctggtcctcgccgaatacgagagtgatgaggagaaaaaggtggcgagcagagtggatgaggatgaggatgacctggaggaagaacacataactaagatttattactgtagtcggacacactcccagctggcccagtttgtgcatgaggtgaagaagagcccctttggcaaggatgttcggctggtctcccttggctcccggcagaacctttgtgtaaatgaagacgtgaaaagcctaggttctgtgcagcttatcaacgaccgctgtgtggacatgcagagaagcaggcacgagaagaagaaaggagctgaggaggagaagccaaagaggaggaggcaggagaagcaggcagcctgccccttctacaaccacgagcagatgggccttctccgggatgaggccctggcagaggtgaaggacatggagcagctgctggcccttgggaaggaggcccgggcctgtccctattacgggagccgccttgccatccctgcagcccagctggtggtgctgccctatcagatgctgctgcatgcggccactcggcaggccgcgggcatccggctgcaggaccaggtggtgatcatcgacgaggcgcacaacctgatcgacaccatcacgggcatgcacagcgtggaggtcagcggctcccagctctgccaggcccattcccagctgctgcagtacgtggagcgatacgggaagcgtttgaaggccaagaacctgatgtacctgaagcagatcctgtatttgctggagaaattcgtggctgtgctaggggggaacattaagcaaaatcccaatacacagagtctgtcacagacagggacggagctgaagaccatcaacgactttctcttccagagccagatcgacaacatcaacctgttcaaggtgcagcgatactgtgagaagagcatgatcagcagaaagctctttggattcactgaacggtacggagcagtgttctcatcccgggagcagcccaaactggctgggtttcagcaattcctgcagagcctgcagcccaggacgactgaagctcttgcagcccctgcagacgagagtcaggccagcaccctgcgaccagcttctccactgatgcacatccaaggcttcctggcagctctcactacggccaaccaggacggcagggtcatcctgagccgccaaggcagcctcagtcagagcaccctgaagtttttgctcctgaatccagctgtgcactttgcccaagtggtgaaggaatgccgggcagtggtcattgcggggggtaccatgcagccggtgtctgacttccggcagcagctgctggcctgtgccggggtggaagctgagcgcgtggtggagttttcctgtggtcacgtgatccctccagacaacatcctgcccctcgtcatctgcagcgggatctccaaccagccgctggaattcacgttccagaaaagagagctgcctcagatgatattccaggaacctaagagcgcacaccaggtggagcaggtgctgctggcatattccaggtgcatccaggcctgtggccaggagagaggccaggtgacaggggccctgctcctctctgtggttggaggaaagatgagtgaagggatcaacttctctgacaacctaggccggtgtgtggtgatggtgggcatgcccttccccaacatcaggtctgcagagctgcaggagaagatggcctacttggatcaaaccctccccagagcccccggccaggcacccccagggaaggctctggtggagaacctgtgcatgaaggccgtcaaccagtccataggcagggccatcaggcaccagaaggattttgccagcgtagtgctcctggaccagcgatatgcccggccccctgtcctggccaagctgccggcctggatccgagcccgtgtggaggtcaaagctacctttggccccgccattgctgctgtgcagaagtttcaccgggagaagtcggcctcttcctgatgggcaaccacaccactgcctggcgccgtgcccttcctttgtcctgcccgctggagacagtgtttgtcgtgggcgtggtctgcggggatcctgttacaaaggtgaaacccaggaggagagtgtggagtccagagtgctgccaggacccaggcacaggcgttagctcccgtaggagaaaatgggggaatcctgaatgaacagtgggtcctggctgtccttggggcgttccagggcagctcccctcctggaatagaatctttctttccatcctgcatggctgagagccaggcttccttcctggtctccgcaggaggctgtggcagctgtggcatccactgtggcatctccgtcctgcccaccttcttaagaggcgagatggagcaggcccatctgcctctgccctttctagccaaggttatagctgccctggactgctcactctctggtctcaatttaaaatgatccatggccacagggctcctgcccaggggcttgtcaccttcccctcctccttcctgagtcactccttcagtagaaggccctgctccctatcctgtcccacagccctgcctggatttgtatccttggcttcgtgccagttcctccaagtctatggcacctccctccctctcaaccacttgagcaaactccaagacaccttctaccccaacaccagcaattatgccaagggccgttaggctctcaacatgactatagagaccccgtgtcatcacggagacctttgttcctgtgggaaaatatccctcccacctgcaacagctgcccctgctgactgcgcctgtcttctccctctgaccccagagaaaggggctgtggtcagctgggatcttctgccaccatcagggacaaacgggggcaggaggaaagtcactgatgcccagatgtttgcatcctgcacagctataggtccttaaataaaagtgtgctgttggtt

SEQ ID NO: 125524 - DNA, 883 bp, Homo sapiens
  Payload ID: 4608
  Gene Symbol: DDX11
  Gene Name: DEAD/H (Asp-Glu-Ala-Asp/His) box helicase 11
  ENST ID: ENST00000415475
  CDS Start-End: 210-883
gccagtttctaactcagtggcgtttgccctgattcccggggcctggctttcagcgtagcaattctgccggcgaagaaggtgagcgcagtgctgtgtggcagcagagctccttaggacgaggagcagcgggacgaggaagggcagactggtgaaatcgcaaactgggcgtctgttccggcgccggacccctatttgcaaaggaagacttcatggcagagctgtaccgggttttggaggctggcaagattgggatatttgagagtccaactggcactgggaagtccttaagtcttatttgtggggccctctcttggctccgtgactttgaacagaagaagcgtgaagaagaggcacgactccttgaaactggaactggccccttacatgatgagaaagatgaatccctgtgtctgtcttcttcctgcgaaggggctgcaggcaccccgaggcctgctggagaaccggcctgggttactcagtttgtgcagaagaaagaagagagggacctggtggaccgactaaaggcggagcaggccaggaggaagcagcgagaagaacgcctgcagcagctgcagcacagggtgcagctcaagtatgcagccaagcgcctgaggcaggaagaagaagaaagagagaatctcctccgcctcagcagggagatgctagagacaggcccggaggctgagcggctggagcagctggagtctggggaggaggagctggtcctcgccgaatacgagagtgatgaggagaaaaaggtggcgagcagagtggatgaggatgaggatgacctggaggaagaacacataactaagatttattactgtagtcggacacactcccagctggcccagtttgtgcatgaggtgaagaagagcccctt

SEQ ID NO: 125525 - DNA, 4182 bp, Homo sapiens
  Payload ID: 4608
  Gene Symbol: DDX11
  Gene Name: DEAD/H (Asp-Glu-Ala-Asp/His) box helicase 11
  Uniprot ID: Q96FC9
  ENST ID: ENST00000435753
  CDS Start-End: 221-1087
ttcactgaggggacccgccagtttctaactcagtggcgtttgccctgattcccggggcctggctttcagcgtagcaattctgccggcgaagaaggtgagcgcagtgctgtgtggcagcagagctccttaggacgaggagcagcgggacgaggaagggcagactggtgaaatcgcaaactgggcgtctgttccggcgccggacccctatttgcaaaggtccatggctaatgaaacacagaaggttggtgccatccattttccttttcccttcacaccctattccatccaggaagacttcatggcagagctgtaccgggttttggaggctggcaagattgggatatttgagagtccaactggcactgggaagtccttaagtcttatttgtggggccctctcttggctccgtgactttgaacagaagaagcgtgaagaagaggcacgactccttgaaactggaactggccccttacatgatgagaaagatgaatccctgtgtctgtcttcttcctgcgaaggggctgcaggcaccccgaggcctgctggagaaccggcctgggttactcagtttgtgcagaagaaagaagagagggacctggtggaccgactaaaggcggagcaggccaggaggaagcagcgagaagaacgcctgcagcagctgcagcacagggtgcagctcaagtatgcagccaagcgcctgaggcaggaagaagaagaaagagagaatctcctccgcctcagcagggagatgctagagacaggcccggaggctgagcggctggagcagctggagtctggggaggaggagctggtcctcgccgaatacgagagtgatgaggagaaaaaggtggcgagcagggcgccttctgatgccacctccagccgccatccaccagacgccagcttccccgctgccctgaacttcctccagcgcaccaggccttcctctgtcctgtctgaggatttgctcatgcaacgtgctgtggccaaacaccctgccctcctcccttggcagatgtcttcctctcctttaaggcctggctcagagtggatgaggatgaggatgacctggaggaagaacacataactaagatttattactgtagtcggacacactcccagctggcccagtttgtgcatgaggtgaagaagagcccctttggcaaggatgttcggctggtctcccttggctcccggcagaacctttgtgtaaatgaagacgtgaaaagcctaggttctgtgcagcttatcaacgaccgctgtgtggacatgcagagaagcaggcacgaagaaaggagctgaggaggagaagccaaagaggaggaggcaggagaagcaggcagcctgccccttctacaaccacgagcagatgggccttctccgggatgaggccctggcagaggtgaaggacatggagcagctgctggcccttgggaaggaggcccgggcctgtccctattacgggagccgccttgccatccctgcagcccagctggtggtgctgccctatcagatgctgctgcatgcggccactcggcaggccgcgggcatccggctgcaggaccaggtggtgatcatcgacgaggcgcacaacctgatcgacaccatcacgggcatgcacagcgtggaggtcagcggctcccagctctgccaggcccattcccagctgctgcagtacgtggagcgatacgggaagcgtttgaaggccaagaacctgatgtacctgaagcagatcctgtatttgctggagaaattcgtggctgtgctaggggggaacattaagcaaaatcccaatacacagagtctgtcacagacagggacggagctgaagaccatcaacgactttctcttccagagccagatcgacaacatcaacctgttcaaggtgcagcgatactgtgagaagagcatgatcagcagaaagctctttggattcactgaacggtacggagcagtgttctcatcccgggagcagcccaaactggctgggtttcagcaattcctgcagagcctgcagcccaggacgactgaagctcttgcagcccctgcagacgagagtcaggccagcaccctgcgaccagcttctccactgatgcacatccaaggcttcctggcagctctcactacggccaaccaggacggcagggtcatcctgagccgccaaggcagcctcagtcagagcaccctgaagtttttgctcctgaatccagctgtgcactttgcccaagtggtgaaggaatgccgggcagtggtcattgcggggggtaccatgcagccggtgtctgacttccggcagcagctgctggcctgtgccggggtggaagctgagcgcgtggtggagttttcctgtgttttcggcccctccctggctcttaccaggtcacgtgatccctccagacaacatcctgcccctcgtcatctgcagcgggatctccaaccagccgctggaattcacgttccagaaaagagagctgcctcagatgatggacgaggtgggtcgcattctctgtaacctgtgcggtgtggttcctggaggggtggtctgtttcttcccctcctacgagtacctgcgccaggtccatgcccactgggagaagggtggcctgctgggccgtctggctgccaggaagaagatattccaggaacctaagagcgcacaccaggtggagcaggtgctgctggcatattccaggtgcatccaggcctgtggccaggagagaggccaggtgacaggggccctgctcctctctgtggttggaggaaagatgagtgaagggatcaacttctctgacaacctaggccggtgtgtggtgatggtgggcatgcccttccccaacatcaggtctgcagagctgcaggagaagatggcctacttggatcaaaccctccccagagcccccggccaggcacccccagggaaggctctggtggagaacctgtgcatgaaggccgtcaaccagtccataggcagggccatcaggcaccagaaggattttgccagcgtagtgctcctggaccagcgatatgcccggccccctgtcctggccaagctgccggcctggatccgagcccgtgtggaggtcaaagctacctttggccccgccattgctgctgtgcagaaggtcagtcctacctttttctttctgagagcctccccaccccgagatcacatttctcactgccttctgtctgcccagtttcaccgggagaagtcggcctcttcctgatgggcaaccacaccactgcctggcgccgtgcccttcctttgtcctgcccgctggagacagtgtttgtcgtgggcgtggtctgcggggatcctgttacaaaggtgaaacccaggaggagagtgtggagtccagagtgctgccaggacccaggcacaggcgttagctcccgtaggagaaaatgggggaatcctgaatgaacagtgggtcctggctgtccttggggcgttccagggcagctcccctcctggaatagaatctttctttccatcctgcatggctgagagccaggcttccttcctggtctccgcaggaggctgtggcagctgtggcatccactgtggcatctccgtcctgcccaccttcttaagaggcgagatggagcaggcccatctgcctctgccctttctagccaaggttatagctgccctggactgctcactctctggtctcaatttaaaatgatccatggccacagggctcctgcccaggggcttgtcaccttcccctcctccttcctgagtcactccttcagtagaaggccctgctccctatcctgtcccacagccctgcctggatttgtatccttggcttcgtgccagttcctccaagtctatggcacctccctccctctcaaccacttgagcaaactccaagacaccttctaccccaacaccagcaattatgccaagggccgttaggctctcaacatgactatagagaccccgtgtcatcacggagacctttgttcctgtgggaaaatatccctcccacctgcaacagctgcccctgctgactgcgcctgtcttctccctctgaccccagagaaaggggctgtggtcagctgggatcttctgccaccatcagggacaaacgggggcaggaggaaagtcactgatgcccagatgtttgcatcctgcacagctataggtccttaaataaaagtgtgctgttggtt

SEQ ID NO: 125526 - DNA, 1135 bp, Homo sapiens
  Payload ID: 4608
  Gene Symbol: DDX11
  Gene Name: DEAD/H (Asp-Glu-Ala-Asp/His) box helicase 11
  ENST ID: ENST00000438391
  CDS Start-End: 229-1135
ggctgcctttcactgaggggacccgccagtttctaactcagtggcgtttgccctgattcccggggcctggctttcagcgtagcaattctgccggcgaagaaggtgagcgcagtgctgtgtggcagcagagctccttaggacgaggagcagcgggacgaggaagggcagactggtgaaatcgcaaactgggcgtctgttccggcgccggacccctatttgcaaaggtccatggctaatgaaacacagaaggttggtgccatccattttccttttcccttcacaccctattccatccaggaagacttcatggcagagctgtaccgggttttggaggctggcaagattgggatatttgagagtccaactggcactgggaagtccttaagtcttatttgtggggccctctcttggctccgtgactttgaacagaagaagcgtgaagaagaggcacgactccttgaaactggaactggccccttacatgatgagaaagatgaatccctgtgtctgtcttcttcctgcgaaggggctgcaggcaccccgaggcctgctggagaaccggcctgggttactcagtttgtgcagaagaaagaagagagggacctggtggaccgactaaagaggcaggaagaagaagaaagagagaatctcctccgcctcagcagggagatgctagagacaggcccggaggctgagcggctggagcagctggagtctggggaggaggagctggtcctcgccgaatacgagagtgatgaggagaaaaaggtggcgagcagagtggatgaggatgaggatgacctggaggaagaacacataactaagatttattactgtagtcggacacactcccagctggcccagtttgtgcatgaggtgaagaagagcccctttggcaaggatgttcggctggtctcccttggctcccggcagaacctttgtgtaaatgaagacgtgaaaagcctaggttctgtgcagcttatcaacgaccgctgtgtggacatgcagagaagcaggcacgagaagaagaaaggagctgaggaggagaagccaaagaggaggaggcaggagaagcaggcagcctgccccttctacaaccacgagcagatgggccttctccgggatgaggccctgg

SEQ ID NO: 125527 - DNA, 613 bp, Homo sapiens
  Payload ID: 4608
  Gene Symbol: DDX11
  Gene Name: DEAD/H (Asp-Glu-Ala-Asp/His) box helicase 11
  ENST ID: ENST00000543756
  CDS Start-End: 188-424
tggcgtttgccctgattcccggggcctggctttcagcgtagcaattctgccggcgaagaaggtgagcgcagtgctgtgtggcagcagagctccttaggacgaggagcagcgggacgaggaagggcagactggtgaaatcgcaaactgggcgtctgttccggcgccggacccctatttgcaaaggtccatggctaatgaaacacagaaggttggtgccatccattttccttttcccttcacaccctattccatccaggaagacttcatggcagagctgtaccgggttttggaggctggcaagattgggatatttgagagtccaactggcactgggctgcaggcaccccgaggcctgctggagaaccggcctgggttactcagtttgtgcagaagaaagaagagagggacctggtggaccgactaaaggcggagcaggccaggaggaagcagcgagaagaacgcctgcagcagctgcagcacagggtgcagctcaagtatgcagccaagcgcctgaggcaggaagaagaagaaagagagaatctcctccgcctcagcagggagatgctagagacaggcccggaggctgagcggctggagcagctggagtctgggg

SEQ ID NO: 125528 - DNA, 879 bp, Homo sapiens
  Payload ID: 4608
  Gene Symbol: DDX11
  Gene Name: DEAD/H (Asp-Glu-Ala-Asp/His) box helicase 11
  ENST ID: ENST00000535317
  CDS Start-End: 305-879
tagatttggcccagctgtgttgagcttttcatggattatcttacgtagataagacactgcaacagacttcacaacgggataaagtgaagtagcttcggcttgtgaatgtgcattgcagagacgtgggagaagaaagctgcaaaagtcattataagcaacacccttgatcttaggggtgctggtctgtgagaagagagctctaagccttttgtagaggcattagaaaggtatcggagccacggtgaaatgcaggggagattgggtttaggggctttcctggtctgcattctgctacagccgttaaatgccgctagatggagtgcgtgattctggtatggcctcacgtggacctgctgcgaaggatggagagaacatggtctctgcttcccagaaaaaaggagaaatttggtccatggctaatgaaacacagaaggttggtgccatccattttccttttcccttcacaccctattccatccaggaagacttcatggcagagctgtaccgggttttggaggctggcaagattgggatatttgagagtccaactggcactgggaagtccttaagtcttatttgtggggccctctcttggctccgtgactttgaacagaagaagcgtgaagaagaggcacgactccttgaaactggaactggccccttacatgatgagaaagatgaatccctgtgtctgtcttcttcctgcgaaggggctgcaggcaccccgaggcctgctggagaaccggcctgggttactcagtttgtgcagaagaaagaagagagggacctggtggaccgactaaaggcggagcaggccaggaggaagcagcgagaagaacgcctgcagcagctgcagcacagggtgcagctcaagtatgc

SEQ ID NO: 125529 - DNA, 3751 bp, Homo sapiens
  Payload ID: 4608
  Gene Symbol: DDX11
  Gene Name: DEAD/H (Asp-Glu-Ala-Asp/His) box helicase 11
  Uniprot ID: Q96FC9
  ENST ID: ENST00000545668
  CDS Start-End: 81-2993
cagtttctaactcagtggcgtttgccctgattcccggggcctggctttcagcgtagcaattctgccggcgaagaaggtccatggctaatgaaacacagaaggttggtgccatccattttccttttcccttcacaccctattccatccaggaagacttcatggcagagctgtaccgggttttggaggctggcaagattgggatatttgagagtccaactggcactgggaagtccttaagtcttatttgtggggccctctcttggctccgtgactttgaacagaagaagcgtgaagaagaggcacgactccttgaaactggaactggccccttacatgatgagaaagatgaatccctgtgtctgtcttcttcctgcgaaggggctgcaggcaccccgaggcctgctggagaaccggcctgggttactcagtttgtgcagaagaaagaagagagggacctggtggaccgactaaaggcggagcaggccaggaggaagcagcgagaagaacgcctgcagcagctgcagcacagggtgcagctcaagtatgcagccaagcgcctgaggcaggaagaagaagaaagagagaatctcctccgcctcagcagggagatgctagagacaggcccggaggctgagcggctggagcagctggagtctggggaggaggagctggtcctcgccgaatacgagagtgatgaggagaaaaaggtggcgagcagagtggatgaggatgaggatgacctggaggaagaacacataactaagatttattactgtagtcggacacactcccagctggcccagtttgtgcatgaggtgaagaagagcccctttggcaaggatgttcggctggtctcccttggctcccggcagaacctttgtgtaaatgaagacgtgaaaagcctaggttctgtgcagcttatcaacgaccgctgtgtggacatgcagagaagcaggcacgagaagaagaaaggagctgaggaggagaagccaaagaggaggaggcaggagaagcaggcagcctgccccttctacaaccacgagcagatgggccttctccgggatgaggccctggcagaggtgaaggacatggagcagctgctggcccttgggaaggaggcccgggcctgtccctattacgggagccgccttgccatccctgcagcccagctggtggtgctgccctatcagatgctgctgcatgcggccactcggcaggccgcgggcatccggctgcaggaccaggtggtgatcatcgacgaggcgcacaacctgatcgacaccatcacgggcatgcacagcgtggaggtcagcggctcccagctctgccaggcccattcccagctgctgcagtacgtggagcgatacgggaagcgtttgaaggccaagaacctgatgtacctgaagcagatcctgtatttgctggagaaattcgtggctgtgctaggggggaacattaagcaaaatcccaatacacagagtctgtcacagacagggacggagctgaagaccatcaacgactttctcttccagagccagatcgacaacatcaacctgttcaaggtgcagcgatactgtgagaagagcatgatcagcagaaagctctttggattcactgaacggtacggagcagtgttctcatcccgggagcagcccaaactggctgggtttcagcaattcctgcagagcctgcagcccaggacgactgaagctcttgcagcccctgcagacgagagtcaggccagcaccctgcgaccagcttctccactgatgcacatccaaggcttcctggcagctctcactacggccaaccaggacggcagggtcatcctgagccgccaaggcagcctcagtcagagcaccctgaagtttttgctcctgaatccagctgtgcactttgcccaagtggtgaaggaatgccgggcagtggtcattgcggggggtaccatgcagccggtgtctgacttccggcagcagctgctggcctgtgccggggtggaagctgagcgcgtggtggagttttcctgtggtcacgtgatccctccagacaacatcctgcccctcgtcatctgcagcgggatctccaaccagccgctggaattcacgttccagaaaagagagctgcctcagatgatggacgaggtgggtcgcattctctgtaacctgtgcggtgtggttcctggaggggtggtctgtttcttcccctcctacgagtacctgcgccaggtccatgcccactgggagaagggtggcctgctgggccgtctggctgccaggaagaagatattccaggaacctaagagcgcacaccaggtggagcaggtgctgctggcatattccaggtgcatccaggcctgtggccaggagagaggccaggtgacaggggccctgctcctctctgtggttggaggaaagatgagtgaagggatcaacttctctgacaacctaggccggtgtgtggtgatggtgggcatgcccttccccaacatcaggtctgcagagctgcaggagaagatggcctacttggatcaaaccctcagcccccggccaggcacccccagggaaggctctggtggagaacctgtgcatgaaggccgtcaaccagtccataggcagggccatcaggcaccagaaggattttgccagcgtagtgctcctggaccagcgatatgcccggccccctgtcctggccaagctgccggcctggatccgagcccgtgtggaggtcaaagctacctttggccccgccattgctgctgtgcagaagtttcaccgggagaagtcggcctcttcctgatgggcaaccacaccactgcctggcgccgtgcccttcctttgtcctgcccgctggagacagtgtttgtcgtgggcgtggtctgcggggatcctgttacaaaggtgaaacccaggaggagagtgtggagtccagagtgctgccaggacccaggcacaggcgttagctcccgtaggagaaaatgggggaatcctgaatgaacagtgggtcctggctgtccttggggcgttccagggcagctcccctcctggaatagaatctttctttccatcctgcatggctgagagccaggcttccttcctggtctccgcaggaggctgtggcagctgtggcatccactgtggcatctccgtcctgcccaccttcttaagaggcgagatggagcaggcccatctgcctctgccctttctagccaaggttatagctgccctggactgctcactctctggtctcaatttaaaatgatccatggccacagggctcctgcccaggggcttgtcaccttcccctcctccttcctgagtcactccttcagtagaaggccctgctccctatcctgtcccacagccctgcctggatttgtatccttggcttcgtgccagttcctccaagtctatggcacctccctccctctcaaccacttgagcaaactccaagacaccttctaccccaacaccagcaattatgccaagggccgttaggctctcaacatgactatagagaccccgtgtcatcacggagacctttgttcctgtgggaaaatatccctcccacctgcaacagctgcccctgctgactgcgcctgtcttctccctctgaccccagagaaaggggctgtggtcagctgggatcttctgccaccatcagggacaaacgggggcaggaggaaagtcactgatgcccagatgtttgcatcctgcacagctataggtccttaaataaaagtgtgctgttggtt

SEQ ID NO: 125530 - DNA, 951 bp, Homo sapiens
  Payload ID: 4608
  Gene Symbol: DDX11
  Gene Name: DEAD/H (Asp-Glu-Ala-Asp/His) box helicase 11
  ENST ID: ENST00000539702
  CDS Start-End: 1-518
accaggtggagcaggtgctgctggcatattccaggtgcatccaggtgcgggcgtcatgctgggcttgggcctgtggccaggagagaggccaggtgacaggggccctgctcctctctgtggttggaggaaagatgagtgaagggatcaacttctctgacaacctaggccggtgtgtggtgatggtgggcatgcccttccccaacatcaggtctgcagagctgcaggagaagatggcctacttggatcaaaccctccccagagcccccggccaggcacccccagggaaggctctggtggagaacctgtgcatgaaggccgtcaaccagtccataggcagggccatcaggcaccagaaggattttgccagcgtagtgctcctggaccagcgatatgcccggccccctgtcctggccaagctgccggcctggatccgagcccgtgtggaggtcaaagctacctttggccccgccattgctgctgtgcagaagtttcaccgggagaagtcggcctcttcctgatgggcaaccacaccactgcctggcgccgtgcccttcctttgtcctgcccgctggagacagtgtttgtcgtgggcgtggtctgcggggatcctgttacaaaggtgaaacccaggaggagagtgtggagtccagagtgctgccaggacccaggcacaggcgttagctcccgtaggagaaaatgggggaatcctgaatgaacagtgggtcctggctgtccttggggcgttccagggcagctcccctcctggaatagaatctttctttccatcctgcatggctgagagccaggcttccttcctggtctccgcaggaggctgtggcagctgtggcatccactgtggcatctccgtcctgcccaccttcttaagaggcgagatggagcaggcccatctgcctctgccctttctagccaaggttatagctgccctggact

SEQ ID NO: 125531 - DNA, 1193 bp, Homo sapiens
  Payload ID: 4608
  Gene Symbol: DDX11
  Gene Name: DEAD/H (Asp-Glu-Ala-Asp/His) box helicase 11
  ENST ID: ENST00000542244
  CDS Start-End: 113-628
ggtgcgcagaagtgggcattaacagcagccgcgtgtctgggtcttagatttggcccagctgtgttgagcttttcatggattatcttacgtagataagacactgcaacagtccatggctaatgaaacacagaaggttggtgccatccattttccttttcccttcacaccctattccatccaggaagacttcatggcagagctgtaccgggttttggaggctggcaagattgggatatttgagagtccaactggcactgggaagtccttaagtcttatttgtggggccctctcttggctccgtgactttgaacagaagaagcgtgaagaagaggcacgactccttgaaactggaactggccccttacatgatgagaaagatgaatccctgtgtctgtcttcttcctgcgaaggggctgcaggcaccccgaggcctgctggagaaccggcctgggttactcagtttgtgcagaagaaagaagagagggacctggtggaccgactaaaggcggagcaggccaggaggaagcagcgagaagaacgcctgcagcagctgcagcacagggtgcagctcaagtatgcagccaagcgcctgaagctgggctgtgagtggttgaggcgtggatcctaggagtcgacctctctccagccaggcagccaggcctatgtgaatggggcgtggtgtgctttgtctctggcatgtggggagcagggagatgctagagacaggcccggaggctgagcggctggagcagctggagtctggggaggaggagctggtcctcgccgaatacgagagtgatgaggagaaaaaggtggcgagcagagtggatgaggatgaggatgacctggaggaagaacacataactaagatttattactgtagtcggacacactcccagctggcccagtttgtgcatgaggtgaagaagagcccctttggcaaggatgttcggctggtctcccttggctcccggcagaacctttgtgtaaatgaagacgtgaaaagcctaggttctgtgcagcttatcaacgaccgctgtgtggacatgcagagaagcaggcacggtagccactgggaccatggtgtagccgcaggtggtctggagagagtgaggcaggggtggcagtgactgaagaccattaagtgtctttcatagaaagaatggcagaggagaccccagttccttcctgag

SEQ ID NO: 125532 - DNA, 1561 bp, Homo sapiens
  Payload ID: 4608
  Gene Symbol: DDX11
  Gene Name: DEAD/H (Asp-Glu-Ala-Asp/His) box helicase 11
  ENST ID: ENST00000542129
  CDS Start-End: 237-1151
gttgttccggctgcctttcactgaggggacccgccagtttctaactcagtggcgtttgccctgattcccggggcctggctttcagcgtagcaattctgccggcgaagaaggtgagcgcagtgctgtgtggcagcagagctccttaggacgaggagcagcgggacgaggaagggcagactggtgaaatcgcaaactgggcgtctgttccggcgccggacccctatttgcaaaggtccatggctaatgaaacacagaaggttggtgccatccattttccttttcccttcacaccctattccatccaggaagacttcatggcagagctgtaccgggttttggaggctggcaagattgggatatttgagagtccaactggcactgggaagtccttaagtcttatttgtggggccctctcttggctccgtgactttgaacagaagaagcgtgaagaagaggcacgactccttgaaactggaactggccccttacatgatgagaaagatgaatccctgtgtctgtcttcttcctgcgaaggggctgcaggcaccccgaggcctgctggagaaccggcctgggttactcagtttgtgcagaagaaagaagagagggacctggtggaccgactaaaggcggagcaggccaggaggaagcagcgagaagaacgcctgcagcagctgcagcacagggtgcagctcaagtatgcagccaagcgcctgaggcaggaagaagaagaaagagagaatctcctccgcctcagcagggagatgctagagacaggcccggaggctgagcggctggagcagctggagtctggggaggaggagctggtcctcgccgaatacgagagtgatgaggagaaaaaggtggcgagcagagtggatgaggatgaggatgacctggaggaagaacacataactaagatttattactgtagtcggacacactcccagctggcccagtttgtgcatgaggtgaagaagagcccctttggcaaggatgttcggctggtctcccttggctcccggcagagaagaagaaaggagctgaggaggagaagccaaagaggaggaggcaggagaagcaggcagcctgccccttctacaaccacgagcagatgggccttctccgggatgaggccctggcagaggtgaaggacatggagcagctgctggcccttgggaaggaggcccgggcctgtccctattacgggagccgccttgccatccctgcagcccagctggtggtgctgccctatcagatgctgctgcatgcggccactcggcaggccgcgggcatccggctgcaggaccaggtggtgatcatcgacgaggcgcacaacctgatcgacaccatcacgggcatgcacagcgtggaggtcagcggctcccagctctgccaggcccattcccagctgctgcagtacgtggagcgatacgggaagcgtttgaaggccaagaacctgatgtacctgaagcagatcctgtatttgctggagaaattcgtggctgtgctaggggggaacattaagcaaaatcccaatacacagagtctgtcacagaca

SEQ ID NO: 125533 - DNA, 3079 bp, Homo sapiens
  Payload ID: 4608
  Gene Symbol: DDX11
  Gene Name: DEAD/H (Asp-Glu-Ala-Asp/His) box helicase 11
  Uniprot ID: Q96FC9
  ENST ID: ENST00000542838
  CDS Start-End: 252-2972
tgcgcagcggcgggggttgttccggctgcctttcactgaggggacccgccagtttctaactcagtggcgtttgccctgattcccggggcctggctttcagcgtagcaattctgccggcgaagaaggtgagcgcagtgctgtgtggcagcagagctccttaggacgaggagcagcgggacgaggaagggcagactggtgaaatcgcaaactgggcgtctgttccggcgccggacccctatttgcaaaggtccatggctaatgaaacacagaaggttggtgccatccattttccttttcccttcacaccctattccatccaggaagacttcatggcagagctgtaccgggttttggaggctggcaagattgggatatttgagagtccaactggcactgggaagtccttaagtcttatttgtggggccctctcttggctccgtgactttgaacagaagaagcgtgaagaagaggcacgactccttgaaactggaactggccccttacatgatgagaaagatgaatccctgtgtctgtcttcttcctgcgaaggggctgcaggcaccccgaggcctgctggagaaccggcctgggttactcagtttgtgcagaagaaagaagagagggacctggtggaccgactaaaggcggagcaggccaggaggaagcagcgagaagaacgcctgcagcagctgcagcacagggtgcagctcaagtatgcagccaagcgcctgaggcaggaagaagaagaaagagagaatctcctccgcctcagcagggagatgctagagacaggcccggaggctgagcggctggagcagctggagtctggggaggaggagctggtcctcgccgaatacgagagtgatgaggagaaaaaggtggcgagcagagtggatgaggatgaggatgacctggaggaagaacacataactaagatttattactgtagtcggacacactcccagctggcccagtttgtgcatgaggtgaagaagagcccctttggcaaggatgttcggctggtctcccttggctcccggcagaacctttgtgtaaatgaagacgtgaaaagcctaggttctgtgcagcttatcaacgaccgctgtgtggacatgcagagaagcaggcacgagaagaagaaaggagctgaggaggagaagccaaagaggaggaggcaggagaagcaggcagcctgccccttctacaaccacgagcagatgggccttctccgggatgaggccctggcagaggtgaaggacatggagcagctgctggcccttgggaaggaggcccgggcctgtccctattacgggagccgccttgccatccctgcagcccagctggtggtgctgccctatcagatgctgctgcatgcggccactcggcaggccgcgggcatccggctgcaggaccaggtggtgatcatcgacgaggcgcacaacctgatcgacaccatcacgggcatgcacagcgtggaggtcagcggctcccagctctgccaggcccattcccagctgctgcagtacgtggagcgatacgggaagcgtttgaaggccaagaacctgatgtacctgaagcagatcctgtatttgctggagaaattcgtggctgtgctaggggggaacattaagcaaaatcccaatacacagagtctgtcacagacagggacggagctgaagaccatcaacgactttctcttccagagccagatcgacaacatcaacctgttcaaggtgcagcgatactgtgagaagagcatgatcagcagaaagctctttggattcactgaacggtacggagcagtgttctcatcccgggagcagcccaaactggctgggtttcagcaattcctgcagagcctgcagcccaggacgactgaagctcttgcagcccctgcagacgagagtcaggccagcaccctgcgaccagcttctccactgatgcacatccaaggcttcctggcagctctcactacggccaaccaggacggcagggtcatcctgagccgccaaggcagcctcagtcagagcaccctgaagtttttgctcctgaatccagctgtgcactttgcccaagtggtgaaggaatgccgggcagtggtcattgcggggggtaccatgcagccggtgtctgacttccggcagcagctgctggcctgtgccggggtggaagctgagcgcgtggtggagttttcctgtggtcacgtgatccctccagacaacatcctgcccctcgtcatctgcagcgggatctccaaccagccgctggaattcacgttccagaaaagagagctgcctcagatgatggacgaggtgggtcgcattctctgtaacctgtgcggtgtggttcctggaggggtggtctgtttcttcccctcctacgagtacctgcgccaggtccatgcccactgggagaagggtggcctgctgggccgtctggctgccaggaagaagatattccaggaacctaagagcgcacaccaggtggagcaggtgctgctggcatattccaggtgcatccaggcctgtggccaggagagaggccaggtgacaggggccctgctcctctctgtggttggaggaaagatgagtgaagggatcaacttctctgacaacctaggccggtgtgtggtgatggtgggcatgcccttccccaacatcaggtctgcagagctgcaggagaagatggcctacttggatcaaaccctccccagagcccccggccaggcacccccagggaaggctctggtggagaacctgtgcatgaaggccgtcaaccagtccataggcagggccatcaggcaccagaaggattttgccagcgtagtgctcctggaccagcgatatgcccggccccctgtcctggccaagctgccggcctggatccgagcccgtgtggaggtcaaagctacctttggccccgccattgctgctgtgcagaagtttcaccgggagaagtcggcctcttcctgatgggcaaccacaccactgcctggcgccgtgcccttcctttgtcctgcccgctggagacagtgtttgtcgtgggcgtggtctgcggggatcctgttacaaaggtgaaa

SEQ ID NO: 125534 - DNA, 1210 bp, Homo sapiens
  Payload ID: 4608
  Gene Symbol: DDX11
  Gene Name: DEAD/H (Asp-Glu-Ala-Asp/His) box helicase 11
  ENST ID: ENST00000540935
  CDS Start-End: 101-967
actgaggggacccgccagtttctaactcagtggcgtttgccctgattcccggggcctggctttcagcgtagcaattctgccggcgaagaaggaagacttcatggcagagctgtaccgggttttggaggctggcaagattgggatatttgagagtccaactggcactgggaagtccttaagtcttatttgtggggccctctcttggctccgtgactttgaacagaagaagcgtgaagaagaggcacgactccttgaaactggaactggccccttacatgatgagaaagatgaatccctgtgtctgtcttcttcctgcgaaggggctgcaggcaccccgaggcctgctggagaaccggcctgggttactcagtttgtgcagaagaaagaagagagggacctggtggaccgactaaaggcggagcaggccaggaggaagcagcgagaagaacgcctgcagcagctgcagcacagggtgcagctcaagtatgcagccaagcgcctgaggcaggaagaagaagaaagagagaatctcctccgcctcagcagggagatgctagagacaggcccggaggctgagcggctggagcagctggagtctggggaggaggagctggtcctcgccgaatacgagagtgatgaggagaaaaaggtggcgagcagagtggatgaggatgaggatgacctggaggaagaacacataactaagatttattactgtagtcggacacactcccagctggcccagtttgtgcatgaggtgaagaagagcccctttggcaaggatgttcggctggtctcccttggctcccggcagaacctttgtgtaaatgaagacgtgaaaagcctaggttctgtgcagcttatcaacgaccgctgtgtggacatgcagagaagcaggcacgttgctgtcctctctgttttctctctttgtgcctgtgccaccctcagagaagaagaaaggagctgaggaggagaagccaaagaggaggaggcaggagaagcaggcagcctgccccttctacaaccacgagcagatgggccttctccgggatgaggccctggcagaggtgaaggacatggagcagctgctggcccttgggaaggaggcccgggcctgtccctattacgggagccgccttgccatccctgcagcccagctggtggtgctgccctatcagatgctgctgcatgcggccactcggcaggccgc

SEQ ID NO: 125535 - DNA, 545 bp, Homo sapiens
  Payload ID: 4608
  Gene Symbol: DDX11
  Gene Name: DEAD/H (Asp-Glu-Ala-Asp/His) box helicase 11
  ENST ID: ENST00000545115
  CDS Start-End: 1-230
accaggtggagcaggtgctgctggcatattccaggtgcatccaggcctgtggccaggagagaggccaggtgacaggggccctgctcctctctgtggttggaggaaagatgagtgaagggatcaacttctctgacaacctaggccggtctgcagagctgcaggagaagatggcctacttggatcaaaccctcgcagggccatcaggcaccagaaggattttgccagcgtagtgctcctggaccagcgatatgcccggccccctgtcctggccaagctgccggcctggatccgagcccgtgtggaggtcaaagctacctttggccccgccattgctgctgtgcagaagtttcaccgggagaagtcggcctcttcctgatgggcaaccacaccactgcctggcgccgtgcccttcctttgtcctgcccgctggagacagtgtttgtcgtgggcgtggtctgcggggatcctgttacaaaggtgaaacccaggaggagagtgtggagtccagagtgctgccaggacccaggcacaggcgttagctcccg

SEQ ID NO: 125536 - DNA, 498 bp, Homo sapiens
  Payload ID: 4608
  Gene Symbol: DDX11
  Gene Name: DEAD/H (Asp-Glu-Ala-Asp/His) box helicase 11
  ENST ID: ENST00000538345
  CDS Start-End: 1-96
cttatttgtggggccctctcttggctccgtgactttgaacagaagaagcgtgacaggggccctgctcctctctgtggttggaggaaagatgagtgaagggatcaacttctctgacaacctaggccggtgtgtggtgatggtgggcatgcccttccccaacatcaggtctgcagagctgcaggagaagatggcctacttggatcaaaccctcagcccccggccaggcacccccagggaaggctctggtggagaacctgtgcatgaaggccgtcaaccagtccataggcagggccatcaggcaccagaaggattttgccagcgtagtgctcctggaccagcgatatgcccggccccctgtcctggccaagctgccggcctggatccgagcccgtgtggaggtcaaagctacctttggccccgccattgctgctgtgcagaagtttcaccgggagaagtcggcctcttcctgatgggcaaccacaccactgcctggcgccg

SEQ ID NO: 125537 - DNA, 3471 bp, Homo sapiens
  Payload ID: 4608
  Gene Symbol: DDX11
  Gene Name: DEAD/H (Asp-Glu-Ala-Asp/His) box helicase 11
  ENST ID: ENST00000539049
  CDS Start-End: 215-1108
gaggggacccgccagtttctaactcagtggcgtttgccctgattcccggggcctggctttcagcgtagcaattctgccggcgaagaaggtgagcgcagtgctgtgtggcagcagagctccttaggacgaggagcagcgggacgaggaagggcagactggtgaaatcgcaaactgggcgtctgttccggcgccggacccctatttgcaaaggtccatggctaatgaaacacagaaggttggtgccatccattttccttttcccttcacaccctattccatccaggaagacttcatggcagagctgtaccgggttttggaggctggcaagattgggatatttgagagtccaactggcactgggaagtccttaagtcttatttgtggggccctctcttggctccgtgactttgaacagaagaagcgtgaagaagaggcacgactccttgaaactggaactggccccttacatgatgagaaagatgaatccctgtgtctgtcttcttcctgcgaaggggctgcaggcaccccgaggcctgctggagaaccggcctgggttactcagtttgtgcagaagaaagaagagagggacctggtggaccgactaaaggcggagcaggccaggaggaagcagcgagaagaacgcctgcagcagctgcagcacagggtgcagctcaagtatgcagccaagcgcctgaggcaggaagaagaagaaagagagaatctcctccgcctcagcagggagatgctagagacaggcccggaggctgagcggctggagcagctggagtctggggaggaggagctggtcctcgccgaatacgagagtgatgaggagaaaaaggtggcgagcagagtggatgaggatgaggatgacctggaggaagaacacataactaagatttattactgtagtcggacacactcccagctggcccagtttgtgcatgaggtgaagaagagcccctttggcaaggatgttcggctggtctcccttggctcccggcagaacctttgtgtaaatgaagacgtgaaaagcctaggttctgtgcagcttatcaacgaccgctgtgtggacatgcagagaagcaggcacgaagaaaggagctgaggaggagaagccaaagaggaggaggcaggagaagcaggcagcctgccccttctacaaccacgagcagatgggccttctccgggatgaggccctggcagaggtgaaggacatggagcagctgctggcccttgggaaggaggcccgggcctgtccctattacgggagccgccttgccatccctgcagcccagctggtggtgctgccctatcagatgctgctgcatgcggccactcggcaggccgcgggcatccggctgcaggaccaggtggtgatcatcgacgaggcgcacaacctgatcgacaccatcacgggcatgcacagcgtggaggtcagcggctcccagctctgccaggcccattcccagctgctgcagtacgtggagcgatacgggaagcgtttgaaggccaagaacctgatgtacctgaagcagatcctgtatttgctggagaaattcgtggctgtgctaggggggaacattaagcaaaatcccaatacacagagtctgtcacagacagggacggagctgaagaccatcaacgactttctcttccagagccagatcgacaacatcaacctgttcaaggtgcagcgatactgtgagaagagcatgatcagcagaaagctctttggattcactgaacggtacggagcagtgttctcatcccgggagcagcccaaactggctgggtttcagcaattcctgcagagcctgcagcccaggacgactgaagctcttgcagcccctgcagacgagagtcaggccagcaccctgcgaccagcttctccactgatgcacatccaaggcttcctggcagctctcactacggccaaccaggacggcagggtcatcctgagccgccaaggcagcctcagtcagagcaccctgaagtttttgctcctgaatccagctgtgcactttgcccaagtggtgaaggaatgccgggcagtggtcattgcggggggtaccatgcagccgcccagacttctcgcttcctttctgctgggcctctgaggggtcatggggccgtgacgctgtggccttggtctacaggtgtctgacttccggcagcagctgctggcctgtgccggggtggaagctgagcgcgtggtggagttttcctgtggtcacgtgatccctccagacaacatcctgcccctcgtcatctgcagcgggatctccaaccagccgctggaattcacgttccagaaaagagagctgcctcagatgatggacgaggtgggtcgcattctctgtaacctgtgcggtgtggttcctggaggggtggtctgtttcttcccctcctacgagtacctgcgccaggtccatgcccactgggagaagggtggcctgctgggccgtctggctgccaggaagaagtttcaccgggagaagtcggcctcttcctgatgggcaaccacaccactgcctggcgccgtgcccttcctttgtcctgcccgctggagacagtgtttgtcgtgggcgtggtctgcggggatcctgttacaaaggtgaaacccaggaggagagtgtggagtccagagtgctgccaggacccaggcacaggcgttagctcccgtaggagaaaatgggggaatcctgaatgaacagtgggtcctggctgtccttggggcgttccagggcagctcccctcctggaatagaatctttctttccatcctgcatggctgagagccaggcttccttcctggtctccgcaggaggctgtggcagctgtggcatccactgtggcatctccgtcctgcccaccttcttaagaggcgagatggagcaggcccatctgcctctgccctttctagccaaggttatagctgccctggactgctcactctctggtctcaatttaaaatgatccatggccacagggctcctgcccaggggcttgtcaccttcccctcctccttcctgagtcactccttcagtagaaggccctgctccctatcctgtcccacagccctgcctggatttgtatccttggcttcgtgccagttcctccaagtctatggcacctccctccctctcaaccacttgagcaaactccaagacaccttctaccccaacaccagcaattatgccaagggccgttaggctctcaacatgactatagagaccccgtgtcatcacggagacctttgttcctgtgggaaaatatccctcccacctgcaacagctgcccctgctgactgcgcctgtcttctccctctgaccccagagaaaggggctgtggtcagctgggatcttctgccaccatcagggacaaacgggggcaggaggaaagtcactgatgcccagatgtttgcatcctgcacagctataggtccttaaataaaagtgtgctgttggtt

SEQ ID NO: 125538 - DNA, 400 bp, Homo sapiens
  Payload ID: 4608
  Gene Symbol: DDX11
  Gene Name: DEAD/H (Asp-Glu-Ala-Asp/His) box helicase 11
  ENST ID: ENST00000544652
  CDS Start-End: 1-276
gagagtccaactggcactgggaagtccttaagtcttatttgtggggccctctcttggctccgtgactttgaacagaagaagcgtgaagaagaggcacgactccttgaaactggaactggccccttacatgatgagaaagatgaatccctgtgtctgtcttcttcctgcgaaggggctgcaggcaccccgaggcctgctggagaaccggcctgggttactcagtttgtgcagaagaaagaagagagggacctggtggaccgactaaagagtggatgaggatgaggatgacctggaggaagaacacataactaagatttattactgtagtcggacacactcccagctggcccagtttgtgcatgaggtgaagaagagcccctttggcaaggatgttcggctg

SEQ ID NO: 125539 - DNA, 3793 bp, Homo sapiens
  Payload ID: 4609
  Gene Symbol: DDX26B
  Gene Name: DEAD/H (Asp-Glu-Ala-Asp/His) box polypeptide 26B
  Uniprot ID: Q5JSJ4
  ENST ID: ENST00000370752
  CDS Start-End: 335-2920
cagtctggggcgagcgctctagtgagcgcggacggatgcttaggcagtagtcctggcagcggcagtagtggtggcagcagaagagaggaagggggagggccccgagggctacacacgctcacactttcaagttcccttggagggagaggaggtggggctgcagaaagaggaggccaggagcggtcccatccgtcccgtcccgtcccgtctccccctcttcctcttgctccttgctccccggctctgcgagagttgagggttcaggtggccgtacgcggcagtgagggcaagagggccgggagagtggggagcggaggcaggagtgcgggggaagatgcccatcctgctgttcctcatagacacgtccgcctctatgaaccagcgcactgacctgggcacctcttatttggacattgccaaaggcgctgtggagttattcttgaagctgcgcgcccgggacccggccagccgtggagacaggtacatgctggtcacctacgacgaacccccgtactgcatcaaggctggttggaaggaaaatcatgcaacattcatgagcgaactaaaaaatcttcaggcttctggactgactactctcggtcaggctctaagatcctcatttgatttgttaaatctcaatagattaatatctggaatagacaattatggacaggggagaaatccattttttttagaaccatctattttaattaccatcacagatggaaacaagttaacaagtactgctggtgttcaagaagagctccatcttcctttgaattcccctctgcctggaagtgaactaaccaaagaaccttttcgttgggatcaaaggttatttgccctggtgttgcgtttgcctggagtggcttctaccgaaccagagcaactagggagcgtaccaactgatgaatctgccatcacacagatgtgtgaagtcacaggaggtcgctcctactgtgtgagaacacaaagaatgttgaatcaatgtttagaatctctagttcaaaaagttcagagtggtgtagttattaattttgaaaaaacaggaccagatccacttcctattggagaagatggacttatggattcatccaggccaagcaattcatttgctgctcagccatggcatagttgtcataaactcatttatgtacgacctaactctaaaactggtgttcctgttggacattggccaattccagaatctttttggccagatcagaatttaccttcactacctccacgaacatctcatcctgttgtgaggttctcctgtgtagattgtgagccaatggtaatagacaaacttccttttgacaaatatgaacttgaaccttcgcccttaactcagtatatcttggaacgaaagtctccccatacctgctggcaggtatttgttactagcagtggaaagtacaatgaacttggatatccatttggttatttaaaagccagtacaactttaacttgtgtaaacctctttgtgatgccttacaactacccagttttacttcctcttttagatgacttgtttaaagttcacaagcttaagccaaatctgaagtggcgacaggcttttgacagctacttaaaaactctgcctccatactacctattaaccaaactagagtcagaacgaatactagcatcagtggggaagaaacctccccaggaaattggaattaaagtgaaaaatcattctggaggtggcatgtccttgactcacaataaaaattttagaaaactattgaaagaaatcacaggggaaactgcacttagactgacagaattgaacaccaaagaatttgctggcttccaaattgggctcttaaacaaggatttgaaacctcagacatacagaaatgcttatgatattccccgtagaggtcttttagaccagctgaccagaatgagatccaatctgctgaaaacgcacaagtttattgttggacaagatgaagattcccttcatagtgttccagttgcacaaatgggtaactatcaggaatatctgaagacattggcttctccactgcgagagattgatccagaccaacccaaaagactgcatacttttggcaatccgtttaaacaagataagaagggaatgatgattgatgaagcagatgagtttgtagcagggccacaaaacaaagtgaaacgtccaggggaacccaacagtcctatgtcatctaagagaaggcggagtatgtccctgctgttgaggaaaccacaaacaccacctactgtaactaaccatgtgggcggaaagggaccaccctcagcctcgtggttcccatcttatccaaacctcataaaacccacccttgtacatacagatgctactatcattcacgatggccatgaggagaagatggaaaatggtcagatcacacctgatggcttcctgtcaaaatctgctccatcagagcttataaatatgacaggagatcttatgccacccaaccaagtggattctctgtctgacgacttcacaagtctcagcaaagatgggctgattcaaaaacctggtagtaacgcatttgtaggaggagccaaaaactgcagtctctccgtagatgaccaaaaagacccagtagcatctactttgggagctatgccaaatacattacaaatcactcctgctatggcacaaggaatcaatgctgatataaaacatcaattaatgaaggaagttcgaaagtttggtcgaaaatatgaaagaattttcattttgcttgaagaagtgcaaggacctctggagatgaagaaacagtttgttgaatttaccatcaaggaagccgcaaggtttaaaagacgagtcctaattcagtaccttgagaaggtactagaaaaaataaattcccaccaccttcacaacaacattagtcacatcaacagcagatcatcatgttagtgcaaagaccagtgagaaaaaaatgacaagttttctgtgctgtaggatggaacaggatattgttgaagcctcctggaatgtttgagtcaagggaattgctttccagatgctaagaagcagcagtggggcttttgaattttatgattatctggcagtgaaagctgggcttttgccttaataattttttaaagtatgaattgttttgttttgttttcctcaattgaggaagctgatgttattaattcacaggctaaattcggtaaacaccactgcccctaccacgggtaatgagaggtcactcacttgaactttgccattccaggcattctcagagtggcgaggggccacctgcaagtggagcacaacttggtgctcttactgtgtccttcagaaagaataggtgtacagaaaggaaatggcaatcttatgtgtgctgaacaaagttttcaacaattcctagttgtgccttttaaaccatgcaatattcaggatagtttgaatcaaagaagtaagaagctgctatttgggtaacttatttctctgtgggaaggggcagggagagtcaccaaacaatctacctccaactctcttctcttttgtctagagacattacaaagtgcacttgaggctgcccccaacctctgacatttgttcttgcatgtgatgatagaaagtcttcagatggacttatacattctgtgctttggaagcacaagaagaacaaaatatgtgtatatttcctttaatgtttatacaaaagtttatatggagcagtattgttatgtttgtatgaatttgcaaaaattaaagtgtacaaagagattttgattttgcatatataaaataaatcattttattgattttcacaagttc

SEQ ID NO: 125540 - DNA, 2500 bp, Homo sapiens
  Payload ID: 4610
  Gene Symbol: DEAF1
  Gene Name: DEAF1 transcription factor
  Uniprot ID: O75398
  ENST ID: ENST00000382409
  CDS Start-End: 486-2183
aaacccgcggcactaagctctctctgagaggcagaattgcgccggccgccggcgagaatctgcctagagccgtccagccctgtcggccggggacgacagccgcctcagcctgtcaggacagtgaggagagcaggggccgagtctctcggaagccctcgtgaggactcggacctattcggactgattcggcttcccacttcggggaacttcgaccctcctcggttcaggactcggtctcggctcggcggcttcgtgcaggttcggctcctactcgggcagcctctgttcgcctcggctccgctccgcgggcggactcggctcggctctgctcggcggctggctgccttttcggtccctattcgggcggcggcttcgggcggcctcggcccagctcgggcgtcctcttcgggccccgcttcgggctccgcgaccggcgcttcgggcggtcccggacggcgccttcgggaaggctcggcggagtccggatggaggactcggactcggcggcaaagcagctgggcctggctgaggcggcggcggtggcggccgcggccgctgtggcggcggcggccgcggccgcggcaggaggcgaggcggaggagccggtgctgagcagggacgaggactcggaggaggacgcagactcggaggcggagcgggagacgccgcgggtcacggcagtggcggtgatggcggcggagcccgggcacatggacatgggcgccgaggccctgcccggccccgacgaggccgccgctgccgcagccttcgcagaggtgaccacagtgacagtggccaacgtgggggctgctgcagacaatgtcttcaccacgtctgtggcgaacgcggcatccatctcaggacatgttctgtctggtaggacggcccttcagatcggggacagcctgaacaccgaaaaagcgacactgattgtcgtccacacagatgggagcatcgtggagaccaccgggctgaaaggcccggcagctcccctcaccccaggtcctcagtctcctccaacccctctggctcccggccaagaaaaaggtggaactaaatacaactgggacccttctgtgtacgacagtgagctgcccgtacggtgccggaacatcagcggcactctgtacaagaacaggctcggctcaggcggccggggacggtgcatcaagcagggggagaactggtacagtcccaccgagtttgaggccatggcaggaagagccagcagtaaggactggaaaagaagcattcgctacgcgggccgacccttgcagtgcctcatccaggatgggatcttaaaccctcacgctgcctcttgcacctgtgctgcctgctgcgacgacatgaccttaagtggcccagtcaggctttttgtgccttacaaaaggcgcaagaaggagaatgaactgcccacaactcccgtgaagaaggactcccccaagaacatcacattgcttccagccaccgcggctaccaccttcaccgtgaccccctcgggacagatcacgacctcgggggcactgacctttgaccgagcgtccacggtagaggccactgctgtcatatcagagagtccggcccagggcgacgtcttcgcaggggccacagtccaagaggccagcgtgcagcccccatgcagggccagccaccctgagcctcactaccccggctatcaggacagctgccagatcgcaccgtttccagaagctgcgttgccaacgtcacatcccaaaatagtgttgacatccctgcctgcgctggcggtcccacccccgactcccaccaaagcggcacctcccgcgttggtcaatgggctggagctgtcagagccgcggagctggctgtacctagaagagatggtcaactccttgctcaacacagcgcagcagctgaagacgctgtttgagcaagccaagcatgccagcacctaccgagaagctgccacaaaccaggccaagatccacgctgacgcagagcggaaggagcagtcctgcgttaactgcggccgggaggctatgagcgagtgcaccggctgccacaaggtcaactactgctccaccttctgccaacgcaaggactggaaggatcaccagcacatatgcggccagtcagcagctgtcaccgtccaggcagacgaagtccacgtggctgaaagcgtgatggagaaggtgaccgtgtgaggctccatcggccgccctgggagctggggcccctcgcactcctgtgaggcttttgcaggtcgaaggcccccctgaggactctggggggacgttgagaagaggggtgtgggaaggtaaagaaacttgctggacaagtcattaacacactttaagcgaatggtgccctgggaagcgcactccccctgcccgggccccctgcccgctcgcggacagattttttatccctgggatcatgagcgtccggtcttgcccacagggcctgtgctgcgacgcacatacatacgtgttgtgtctgtcaataaagtgtaaataaggtc

SEQ ID NO: 125541 - DNA, 1623 bp, Homo sapiens
  Payload ID: 4610
  Gene Symbol: DEAF1
  Gene Name: DEAF1 transcription factor
  ENST ID: ENST00000527170
  CDS Start-End: 1-1048
tctgtacaagaacaggctcggctcaggcggccggggacggtgcatcaagcagggggagaactggtacagtcccaccgagtttgaggccatggcaggaagagccagcagtaaggactggaaaagaagcattcgctacgcgggccgacccttgcagtgcctcatccaggatgggatcttaaaccctcacgctgcctcttgcacctgtgctgcctgctgcgacgacatgaccttaagtggcccagtcaggctttttgtgccttacaaaaggcgcaagaaggagaatgaactgcccacaactcccgtgaagaaggactcccccaagaacatcacattgcttccagccaccgcggctaccaccttcaccgtgaccccctcgggacagatcacgacctcgggggcactgacctttgaccgagcgtccacggtagaggccactgctgtcatatcagagagtccggcccagggcgacgtcttcgcaggggccacagtccaagaggccagcgtgcagcccccatgcagggccagccaccctgagcctcactaccccggctatcaggacagctgccagatcgcaccgtttccagaagctgcgttgccaacgtcacatcccaaaatagtgttgacatccctgcctgcgctggcggtcccacccccgactcccaccaaagcggcacctcccgcgttggtcaatgggctggagctgtcagagccgcggagctggctgtacctagaagagatggtcaactccttgctcaacacagcgcagcagctgaagacgctgtttgagcaagccaagcatgccagcacctaccgagaagctgccacaaaccaggccaagatccacgctgacgcagagcggaaggagcagtcctgcgttaactgcggccgggaggctatgagcgagtgcaccggctgccacaaggtcaactactgctccaccttctgccaacgcaagagatggagtcttactatgttgaccagcctggtctccatctcctggcttcgggcgatcctcccatgtcagcctcccaaagtgctaggattataggcatgaggcactacaccagccaacagaagtttttatattaaaatttactttttctagctgggcacagtggctcacgcctgtcatcccagcactttgggaggctgaggcaggtggatcaccggtcgggagtttgagaccagcttggctaacatggactggaaggatcaccagcacatatgcggccagtcagcagctgtcaccgtccaggcagacgaagtccacgtggctgaaagcgtgatggagaaggtgaccgtgtgaggctccatcggccgccctgggagctggggcccctcgcactcctgtgaggcttttgcaggtcgaaggcccccctgaggactctggggggacgttgagaagaggggtgtgggaaggtaaagaaacttgctggacaagtcattaacacactttaagcgaatggtgccctgggaagcgcactccccctgcccgggccccctgcccgctcgcggacagattttttatccctgggatcatgagcgtccggtcttgcccacagggcctgtgctgcgacgcacatacatacgtgttgtgtctgtcaataaagtgtaaataaggtc

SEQ ID NO: 125542 - DNA, 705 bp, Homo sapiens
  Payload ID: 4610
  Gene Symbol: DEAF1
  Gene Name: DEAF1 transcription factor
  ENST ID: ENST00000529717
  CDS Start-End: 1-259
gccggtgctgagcagggacgaggactcggaggaggacgcagactcggaggcggagcgggagacgccgcgggtcacggcagtggcggtgatggcggcggagcccgggcacatggacatgggcgccgaggccctgcccggccccgacgaggccgccgctgccgcagccttcgcaggcaagtgcgcccgccggcctctcgcctcgtccggttcccgcgcgcctaccccgcgcgcctgccccgcacaactgtcccagaggtgaccacagtgacagtggccaacgtgggggctgctgcagacaatgtcttcaccacgtctgtggcgaacgcggcatccatctcaggacatgttctgtctggtaggacggcccttcagatcggggacagcctgaacaccgaaaaagcgacactgattgtcgtccacacagatgggagcatcgtggagaccaccgggctgaaaggcccggcagctcccctcaccccaggtcctcagtctcctccaacccctctggctcccggccaagaaaaaggtggaactaaatacaactgggacccttctgtgtacgacagtgagctgcccgtacggtgccggaacatcagcggcactctgtacaagaacaggctcggctcaggcggccggggacggtgcatcaagcagggggagaactggtacagtcccaccgagtttgaggccatggcaggaagagcc

SEQ ID NO: 125543 - DNA, 485 bp, Homo sapiens
  Payload ID: 4610
  Gene Symbol: DEAF1
  Gene Name: DEAF1 transcription factor
  ENST ID: ENST00000634194
  CDS Start-End: 1-485
tgttgacatccctgcctgcgctggcggtcccacccccgactcccaccaaaacggcacctcccgcgttggtcaatgggctggagctgtcagagccgcggagctggctgtacctagaagagatggtcaactccttgctcaacacagcgcagcagctgaagacgctgtttgagcaagccaagcatgccagcacctaccgagaagctgccacaaaccaggccaagatccacgctgacgcagagcggaaggaggtgatccacccgcctcggctgcccaaagtcctgggattacagcagtcctgcgttaactgcggccgggaggctatgagcgagtgcaccggctgccacaaggtcaactactgctccaccttctgccaacgcaaggactggaaggatcaccagcacatatgcggccagtcagcagctgtcaccgtccaggcagacgaagtccacgtggctgaaagcgtgatggagaaggtgaccgtgtga

SEQ ID NO: 125544 - DNA, 760 bp, Homo sapiens
  Payload ID: 4610
  Gene Symbol: DEAF1
  Gene Name: DEAF1 transcription factor
  ENST ID: ENST00000632113
  CDS Start-End: 1-443
tgttgacatccctgcctgcgctggcggtcccacccccgactcccaccaaaacggcacctcccgcgttggtcaatgggctggagctgtcagagccgcggagctggctgtacctagaagagatggtcaactccttgctcaacacagcgcagcagctgaagacgctgtttgagcaagccaagcatgccagcacctaccgagaagctgccacaaaccaggccaagatccacgctgacgcagagcggaaggagcagtcctgcgttaactgcggccgggaggctatgagcgagtgcaccggctgccacaaggtcaactactgctccaccttctgccaacgcaaggactggaaggatcaccagcacatatgcggccagtcagcagctgtcaccgtccaggcagacgaagtccacgtggctgaaagcgtgatggagaaggtgaccgtgtgaggctccatcggccgccctgggagctggggcccctcgcactcctgtgaggcttttgcaggtcgaaggcccccctgaggactctggggggacgttgagaagaggggtgtgggaaggtaaagaaacttgctggacaagtcattaacacactttaagcgaatggtgccctgggaagcgcactccccctgcccgggccccctgcccgctcgcggacagattttttatccctgggatcatgagcgtccggtcttgcccacagggcctgtgctgcgacgcacatacatacgtgttgtgtctgtcaataaagtgtaaataaggtc

SEQ ID NO: 125545 - DNA, 1006 bp, Homo sapiens
  Payload ID: 4610
  Gene Symbol: DEAF1
  Gene Name: DEAF1 transcription factor
  ENST ID: ENST00000634067
  CDS Start-End: 1-431
tgttgacatccctgcctgcgctggcggtcccacccccgactcccaccaaaacggcacctcccgcgttggtcaatgggctggagctgtcagagccgcggagctggctgtacctagaagagatggtcaactccttgctcaacacagcgcagcagctgaagacgctgtttgagcaagccaagcatgccagcacctaccgagaagctgccacaaaccaggccaagatccacgctgacgcagagcggaaggagcagtcctgcgttaactgcggccgggaggctatgagcgagtgcaccggctgccacaaggtcaactactgctccaccttctgccaacgcaagagatggagtcttactatgttgaccagcctggtctccatctcctggcttcgggcgatcctcccatgtcagcctcccaaagtgctaggattataggcatgaggcactacaccagccaacagaagtttttatattaaaatttactttttctagctgggcacagtggctcacgcctgtcatcccagcactttgggaggctgaggcaggtggatcaccggtcgggagtttgagaccagcttggctaacatggactggaaggatcaccagcacatatgcggccagtcagcagctgtcaccgtccaggcagacgaagtccacgtggctgaaagcgtgatggagaaggtgaccgtgtgaggctccatcggccgccctgggagctggggcccctcgcactcctgtgaggcttttgcaggtcgaaggcccccctgaggactctggggggacgttgagaagaggggtgtgggaaggtaaagaaacttgctggacaagtcattaacacactttaagcgaatggtgccctgggaagcgcactccccctgcccgggccccctgcccgctcgcggacagattttttatccctgggatcatgagcgtccggtcttgcccacagggcctgtgctgcgacgcacatacatacgtgttgtgtctgtcaataaagtgtaaataaggtc

SEQ ID NO: 125546 - DNA, 2590 bp, Homo sapiens
  Payload ID: 4611
  Gene Symbol: DFNA5
  Gene Name: deafness, autosomal dominant 5
  Uniprot ID: O60443
  ENST ID: ENST00000342947
  CDS Start-End: 427-1917
agaaagcaatgtttgagcaccagctatgctgagattccctcgttcagtattcgttgagcacccagtgtgtgagagcgcctggttttgccctcaaggagcttagagtggagtttacaggaatgaatcactgattagcggcaggcctaagtgtgggcactgtcgcaccacacacccagatactactccaggcacgggcattaggggctcccacaggctggacaggccttggactttcctggttgaaccgtgaggccgcggtgtcagtccacactccactgtgggtggcgggttcggccccgcgaggaggcgccgctctcaaaccccacggtcccgcgcagcgaagaggcgaggcggccgcggaaggcaggcgcagcccactcttcccgagaggccccgacatctcccggataatctggagctttcaaaatgtttgccaaagcaaccaggaattttcttagagaagttgatgctgatggtgacctgattgcagtatcaaatctgaatgactctgataagttacagcttctaagtctggtgacaaaaaagaagagattctggtgctggcagagacccaagtaccagtttttatccctcacccttggcgatgtactcatagaagaccaatttccgagtccagtggtcgtggagtcggactttgtgaaatacgagggcaagtttgcaaaccacgtgagtggaaccctggagactgcactggggaaggtcaagctgaacctggggggcagcagccgcgtagagagccagtcttcatttggaaccctgaggaagcaggaggtggatttgcagcagctcatcagagactctgccgagagaacaataaatctgagaaaccctgtgctccagcaggtgctggaaggaaggaatgaggtcctgtgcgttttgacacagaagatcacgacgatgcagaagtgtgtgatctctgagcacatgcaggtcgaggagaagtgtggtggcatcgtgggcatccagaccaagacggtgcaggtgtcagcgacggaggatgggaatgtcaccaaggactccaacgtggtgctggagatcccagctgccaccaccattgcctacggtgtcattgagttatacgtgaaactggacggccagttcgagttctgccttctccgagggaagcaaggtggcttcgagaacaagaagagaattgactctgtctacctggaccccctggtctttcgagagtttgcattcatagacatgccagatgctgcgcatgggatatcttcccaggatggaccattaagtgttttaaagcaagcgaccctgctcctggagaggaatttccatccatttgcggagctgcctgagccacaacagacagctttgagtgacatcttccaggcggtcctatttgatgatgaactactcatggtcctggaaccagtgtgcgatgacctggtcagcggcctctcgcccacagtggcggtgctgggggagctgaagccccggcagcagcaggaccttgtggccttcctgcagctggtggggtgcagcttacagggtgggtgtccgggccccgaggatgcaggcagcaagcagctgtttatgacagcctacttcttggtcagtgccctcgcagaaatgccagatagcgcagcagctctgctgggcacttgctgcaaactccagatcattcccacactgtgccacttgcttcgtgctctgtctgatgatggagtatctgatcttgaagacccaaccttgactcccctgaaagatacagaaaggtttgggattgtgcagcgcttgtttgcctcagctgacattagtctggagagactgaagtcatctgtgaaagctgtcattctgaaggactctaaagtcttcccactgcttctttgtataaccctgaatggactctgtgctttaggcagagaacattcatgatgtcatatgtgaactagaagtacgtgttactggccaaggctatttttcagaactgttaaaggtcatatgcacgttaaaagttgaccaatgaaatgaatttacagaacagtttaagaagtggtgacattttgcatgatgaatgacctgacttttagccaccaggtactctttaaacagttttccttatcagaggccctcctgtgctggtgacccagcatctgagttaggttccagcatgtaaagagctgggagggcggagaattcttagcatacattcagacgttttttctgcacaataataagtccatctgtcacttgcattccactttttgttacatagaaagagtctgaccctttaatccaaaaggtctttttacattgtgaatgctgtgggaaggcaatttctctgcacacaagaggctacgttttggaagtgatgtatgttatttgatgactgaaaatgaactgtaaatgctcctagagtatattcctctgctgaacaaaattaaacttcaaaaaaatctaacagtaacacacccctgcttgggaccctagctatatgcattttatgtgaccttgccatgcttcagtgaacatactaattctatgtctagcacatgttgatttcctatgtattctgggtattctattaaaggaaactttgaactatgtc

SEQ ID NO: 125547 - DNA, 1689 bp, Homo sapiens
  Payload ID: 4611
  Gene Symbol: DFNA5
  Gene Name: deafness, autosomal dominant 5
  Uniprot ID: O60443
  ENST ID: ENST00000409775
  CDS Start-End: 168-1658
ggggcgcccggaccgagcaaaggtcccggcgggcgggccctctctccgccctccccaagcgcccgccccccgccggcccagcgcaggctcctccgactccgccagcgcagggggcgcggctgccggggacccagcagcgggcgcgcggataatctggagctttcaaaatgtttgccaaagcaaccaggaattttcttagagaagttgatgctgatggtgacctgattgcagtatcaaatctgaatgactctgataagttacagcttctaagtctggtgacaaaaaagaagagattctggtgctggcagagacccaagtaccagtttttatccctcacccttggcgatgtactcatagaagaccaatttccgagtccagtggtcgtggagtcggactttgtgaaatacgagggcaagtttgcaaaccacgtgagtggaaccctggagactgcactggggaaggtcaagctgaacctggggggcagcagccgcgtagagagccagtcttcatttggaaccctgaggaagcaggaggtggatttgcagcagctcatcagagactctgccgagagaacaataaatctgagaaaccctgtgctccagcaggtgctggaaggaaggaatgaggtcctgtgcgttttgacacagaagatcacgacgatgcagaagtgtgtgatctctgagcacatgcaggtcgaggagaagtgtggtggcatcgtgggcatccagaccaagacggtgcaggtgtcagcgacggaggatgggaatgtcaccaaggactccaacgtggtgctggagatcccagctgccaccaccattgcctacggtgtcattgagttatacgtgaaactggacggccagttcgagttctgccttctccgagggaagcaaggtggcttcgagaacaagaagagaattgactctgtctacctggaccccctggtctttcgagagtttgcattcatagacatgccagatgctgcgcatgggatatcttcccaggatggaccattaagtgttttaaagcaagcgaccctgctcctggagaggaatttccatccatttgcggagctgcctgagccacaacagacagctttgagtgacatcttccaggcggtcctatttgatgatgaactactcatggtcctggaaccagtgtgcgatgacctggtcagcggcctctcgcccacagtggcggtgctgggggagctgaagccccggcagcagcaggaccttgtggccttcctgcagctggtggggtgcagcttacagggtgggtgtccgggccccgaggatgcaggcagcaagcagctgtttatgacagcctacttcttggtcagtgccctcgcagaaatgccagatagcgcagcagctctgctgggcacttgctgcaaactccagatcattcccacactgtgccacttgcttcgtgctctgtctgatgatggagtatctgatcttgaagacccaaccttgactcccctgaaagatacagaaaggtttgggattgtgcagcgcttgtttgcctcagctgacattagtctggagagactgaagtcatctgtgaaagctgtcattctgaaggactctaaagtcttcccactgcttctttgtataaccctgaatggactctgtgctttaggcagagaacattcatgatgtcatatgtgaactagaagtacgtgttact

SEQ ID NO: 125548 - DNA, 2005 bp, Homo sapiens
  Payload ID: 4611
  Gene Symbol: DFNA5
  Gene Name: deafness, autosomal dominant 5
  Uniprot ID: O60443
  ENST ID: ENST00000409970
  CDS Start-End: 362-1360
cccgccggcccagcgcaggctcctccgactccgccagcgcagggggcgcggctgccggggacccagcagcgggcgcgcggtggtcgtggagtcggactttgtgaaatacgagggcaagtttgcaaaccacgtgagtggaaccctggagactgcactggggaaggtcaagctgaacctggggggcagcagccgcgtagagagccagtcttcatttggaaccctgaggaagcaggaggtggatttgcagcagctcatcagagactctgccgagagaacaataaatctgagaaaccctgtgctccagcaggtgctggaaggaaggaatgaggtcctgtgcgttttgacacagaagatcacgacgatgcagaagtgtgtgatctctgagcacatgcaggtcgaggagaagtgtggtggcatcgtgggcatccagaccaagacggtgcaggtgtcagcgacggaggatgggaatgtcaccaaggactccaacgtggtgctggagatcccagctgccaccaccattgcctacggtgtcattgagttatacgtgaaactggacggccagttcgagttctgccttctccgagggaagcaaggtggcttcgagaacaagaagagaattgactctgtctacctggaccccctggtctttcgagagtttgcattcatagacatgccagatgctgcgcatgggatatcttcccaggatggaccattaagtgttttaaagcaagcgaccctgctcctggagaggaatttccatccatttgcggagctgcctgagccacaacagacagctttgagtgacatcttccaggcggtcctatttgatgatgaactactcatggtcctggaaccagtgtgcgatgacctggtcagcggcctctcgcccacagtggcggtgctgggggagctgaagccccggcagcagcaggaccttgtggccttcctgcagctggtggggtgcagcttacagggtgggtgtccgggccccgaggatgcaggcagcaagcagctgtttatgacagcctacttcttggtcagtgccctcgcagaaatgccagatagcgcagcagctctgctgggcacttgctgcaaactccagatcattcccacactgtgccacttgcttcgtgctctgtctgatgatggagtatctgatcttgaagacccaaccttgactcccctgaaagatacagaaaggtttgggattgtgcagcgcttgtttgcctcagctgacattagtctggagagactgaagtcatctgtgaaagctgtcattctgaaggactctaaagtcttcccactgcttctttgtataaccctgaatggactctgtgctttaggcagagaacattcatgatgtcatatgtgaactagaagtacgtgttactggccaaggctatttttcagaactgttaaaggtcatatgcacgttaaaagttgaccaatgaaatgaatttacagaacagtttaagaagtggtgacattttgcatgatgaatgacctgacttttagccaccaggtactctttaaacagttttccttatcagaggccctcctgtgctggtgacccagcatctgagttaggttccagcatgtaaagagctgggagggcggagaattcttagcatacattcagacgttttttctgcacaataataagtccatctgtcacttgcattccactttttgttacatagaaagagtctgaccctttaatccaaaaggtctttttacattgtgaatgctgtgggaaggcaatttctctgcacacaagaggctacgttttggaagtgatgtatgttatttgatgactgaaaatgaactgtaaatgctcctagagtatattcctctgctgaacaaaattaaacttcaaaaaaatctaacagtaacacacccctgcttgggaccctagctatatgcattttatgtgaccttgccatgcttcagtgaacatactaattctatgtctagcacatgttgatttcctatgtattctgggtat

SEQ ID NO: 125549 - DNA, 500 bp, Homo sapiens
  Payload ID: 4611
  Gene Symbol: DFNA5
  Gene Name: deafness, autosomal dominant 5
  ENST ID: ENST00000415480
  CDS Start-End: 1-467
cagctgccaccaccattgcctacggtgtcattgagttatacgtgaaactggacggccagttcgagttctgccttctccgagggaagcaaggtggcttcgagaacaagaagagaattgactctgtctacctggaccccctggtctttcgagagtttgcattcatagacatgccagatgctgcgcatgggatatcttcccaggatggaccattaagtgttttaaagcaagcgaccctgctcctggagaggaatttccatccatttgcggagctgcctgagccacaacagacagctttgagtgacatcttccaggcggtcctatttgatgatgaactactcatggtcctggaaccagtgaaggatatcctggggaggtcaagttccttaactcttagttgtacaaatggtgagagccacacaagctgccaaccctccagccacccagattctgtgtcctccctttcttaaggctgaggctttataaacctgattttgactaca

SEQ ID NO: 125550 - DNA, 450 bp, Homo sapiens
  Payload ID: 4611
  Gene Symbol: DFNA5
  Gene Name: deafness, autosomal dominant 5
  ENST ID: ENST00000430096
  CDS Start-End: 1-168
cagctgtttatgacagcctacttcttggtcagtgccctcgcagaaatgccagatagcgcagcagctctgctgggcacttgctgcaaactccagatcattcccacactgtgccacttggtaagcaacctcccaggtgggaccttagaatggataggaatggggaaatgatgagggggtagacatccagcagccggtaaaacacctctaggacttaccacaacagctcttcaagacacattaagtaagtattgttattaaccccacttttatacacatcccaccccatgggaagactgagacccagaggaaaatgatttgtccaaataacttgttagcaggtccaggacttcatccttgtctttcgactccaactcttatacttttcccattgtttggagagaattttggccaaggtttggtgttacattacaataaaggggcctgacacca

SEQ ID NO: 125551 - DNA, 610 bp, Homo sapiens
  Payload ID: 4611
  Gene Symbol: DFNA5
  Gene Name: deafness, autosomal dominant 5
  ENST ID: ENST00000446822
  CDS Start-End: 1-578
tcgaggagaagtgtggtggcatcgtgggcatccagaccaagacggtgcaggtgtcagcgacggaggatgggaatgtcaccaaggactccaacgtggtgctggagatcccagctgccaccaccattgcctacggtgtcattgagttatacgtgaaactggacggccagttcgagttctgccttctccgagggaagcaaggtggcttcgagaacaagaagagaattgactctgtctacctggaccccctggtctttcgagagtttgcattcatagacatgccagatgctgcgcatgggatatcttcccaggatggaccattaagtgttttaaagcaagcgaccctgctcctggagaggaatttccatccatttgcggagctgcctgagccacaacagacagctttgagtgacatcttccaggcggtcctatttgatgatgaactactcatggtcctggaaccagtgcagaaggatatcctggggaggtcaagttccttaactcttagttgtacaaatggtgagagccacacaagctgccaaccctccagccacccagattctgtgtcctccctttcttaaggctgaggctttataaacctgattttgactac

SEQ ID NO: 125552 - DNA, 2265 bp, Homo sapiens
  Payload ID: 4611
  Gene Symbol: DFNA5
  Gene Name: deafness, autosomal dominant 5
  Uniprot ID: O60443
  ENST ID: ENST00000419307
  CDS Start-End: 596-1594
aggagcttagagtggagtttacaggaatgaatcactgattagcggcaggcctaagtgtgggcactgtcgcaccacacacccagatactactccaggcacgggcattaggggctcccacaggctggacaggccttggactttcctggttgaaccgtgaggccgcggtgtcagtccacactccactgtgggtggcgggttcggccccgcgaggaggcgccgctctcaaaccccacggtcccgcgcagcgaagaggcgaggcggccgcggaaggcaggcgcagcccactcttcccgagaggccccgacatctcccggtggtcgtggagtcggactttgtgaaatacgagggcaagtttgcaaaccacgtgagtggaaccctggagactgcactggggaaggtcaagctgaacctggggggcagcagccgcgtagagagccagtcttcatttggaaccctgaggaagcaggaggtggatttgcagcagctcatcagagactctgccgagagaacaataaatctgagaaaccctgtgctccagcaggtgctggaaggaaggaatgaggtcctgtgcgttttgacacagaagatcacgacgatgcagaagtgtgtgatctctgagcacatgcaggtcgaggagaagtgtggtggcatcgtgggcatccagaccaagacggtgcaggtgtcagcgacggaggatgggaatgtcaccaaggactccaacgtggtgctggagatcccagctgccaccaccattgcctacggtgtcattgagttatacgtgaaactggacggccagttcgagttctgccttctccgagggaagcaaggtggcttcgagaacaagaagagaattgactctgtctacctggaccccctggtctttcgagagtttgcattcatagacatgccagatgctgcgcatgggatatcttcccaggatggaccattaagtgttttaaagcaagcgaccctgctcctggagaggaatttccatccatttgcggagctgcctgagccacaacagacagctttgagtgacatcttccaggcggtcctatttgatgatgaactactcatggtcctggaaccagtgtgcgatgacctggtcagcggcctctcgcccacagtggcggtgctgggggagctgaagccccggcagcagcaggaccttgtggccttcctgcagctggtggggtgcagcttacagggtgggtgtccgggccccgaggatgcaggcagcaagcagctgtttatgacagcctacttcttggtcagtgccctcgcagaaatgccagatagcgcagcagctctgctgggcacttgctgcaaactccagatcattcccacactgtgccacttgcttcgtgctctgtctgatgatggagtatctgatcttgaagacccaaccttgactcccctgaaagatacagaaaggtttgggattgtgcagcgcttgtttgcctcagctgacattagtctggagagactgaagtcatctgtgaaagctgtcattctgaaggactctaaagtcttcccactgcttctttgtataaccctgaatggactctgtgctttaggcagagaacattcatgatgtcatatgtgaactagaagtacgtgttactggccaaggctatttttcagaactgttaaaggtcatatgcacgttaaaagttgaccaatgaaatgaatttacagaacagtttaagaagtggtgacattttgcatgatgaatgacctgacttttagccaccaggtactctttaaacagttttccttatcagaggccctcctgtgctggtgacccagcatctgagttaggttccagcatgtaaagagctgggagggcggagaattcttagcatacattcagacgttttttctgcacaataataagtccatctgtcacttgcattccactttttgttacatagaaagagtctgaccctttaatccaaaaggtctttttacattgtgaatgctgtgggaaggcaatttctctgcacacaagaggctacgttttggaagtgatgtatgttatttgatgactgaaaatgaactgtaaatgctcctagagtatattcctctgctgaacaaaattaaacttcaaaaaaatctaacagtaacacacccctgcttgggaccctagctatatgcattttatgtgaccttgccatgcttcagtgaacatactaattctatgtctagcacatgttgatttcctatgtattctgggtattctattaaaggaaactttgaactatg

SEQ ID NO: 125553 - DNA, 571 bp, Homo sapiens
  Payload ID: 4611
  Gene Symbol: DFNA5
  Gene Name: deafness, autosomal dominant 5
  ENST ID: ENST00000414428
  CDS Start-End: 516-571
cagatactactccaggcacgggcattaggggctcccacaggctggacaggccttggactttcctggttgaaccgtgaggccgcggtgtcagtccacactccactgtgggtggcgggttcggccccgcgaggaggcgccgctctcaaaccccacggtcccgcgcagcgaagaggcgaggcggccgcggaaggcaggcgcagcccactcttcccgagaggccccgacatctcccggtggtcgtggagtcggactttgtgaaatacgagggcaagtttgcaaaccacgtgagtggaaccctggagactgcactggggaaggtcaagctgaacctggggggcagcagccgcgtagagagccagtcttcatttggaaccctgaggaagcaggaggtggatttgcagcagctcatcagagactctgccgagagaacaataaatctgagaaaccctgtgctccagcaggtgctggaaggaaggaatgaggtcctgtgcgttttgacacagaagatcacgacgatgcagaagtgtgtgatctctgagcacatgcaggtcgaggagaagtgtggtggcat

SEQ ID NO: 125554 - DNA, 734 bp, Homo sapiens
  Payload ID: 4611
  Gene Symbol: DFNA5
  Gene Name: deafness, autosomal dominant 5
  ENST ID: ENST00000411476
  CDS Start-End: 1-651
gtgaaatacgagggcaagtttgcaaaccacgtgagtggaaccctggagactgcactggggaaggtcaagctgaacctggggggcagcagccgcgtagagagccagtcttcatttggaaccctgaggaagcaggaggtggatttgcagcagctcatcagagactctgccgagagaacaataaatctgagaaaccctgtgctccagcaggtgctggaaggaaggaatgaggtcctgtgcgttttgacacagaagatcacgacgatgcagaagtgtgtgatctctgagcacatgcaggtcgaggagaagtgtggtggcatcgtgggcatccagaccaagacggtgcaggtgtcagcgacggaggatgggaatgtcaccaaggactccaacgtggtgctggagatcccagctgccaccaccattgcctacggtgtcattgagttatacgtgaaactggacggccagttcgcccccctatgtctgccttggtggtcctgtccagtcttactgatggccagtggtgaatgtgtcactcccccgcagcttactgagagttctgccttctccgagggaagcaaggtggcttcgagaacaagaagagaattgactctgtctacctggaccccctggtctttcgagagtttgcattcatagacatgccagatgctgcgcatgggatatcttcccaggatggaccattaagtgttttaaagcaagcgaccctgctcctggagagg

SEQ ID NO: 125555 - DNA, 2847 bp, Homo sapiens
  Payload ID: 4612
  Gene Symbol: DFNB31
  Gene Name: deafness, autosomal recessive 31
  ENST ID: ENST00000265134
  CDS Start-End: 599-2173
gaaactcctaggcagcagaggcccacgactacttcctcctgagtgccgttcagtggcctgtgtccaggctctgaagggctccaagaagctggtgctgtctgtgtactcagcagggcgcatccctgggggctacgtcaccaaccacatctacacctgggtggacccgcagggccgcagcatctccccaccctcgggcctgccccagccccacggtggtgccctgaggcagcaggagggtgaccggaggagcaccctgcacctcctgcaaggaggggatgagaaaaaggtgaacctggtgctgggggacggccggtccctgggcctcacgatccgtgggggagctgagtacggccttggcatttacatcactggcgtggacccaggctctgaagcagaaggcagcgggctcaaggttggggaccagattctagaagtgaatgggcggagctttctcaacatcctacacgacgaggctgtcaggctgcttaagtcatctcggcacctcatcctgacagtgaaggacgtcgggaggctgccccatgcccgcaccactgtggacgagaccaagtggatcgccagttcccggatcagggagaccatggcgaactcggcagggtttcttggcgatctcacaacagaaggaataaacaagccaggattttacaagggcccagccggctcccaggtgaccctgagcagcctggggaaccagacacgagtgctgctggaggagcaggctcggcacctgctgaacgagcaggaacacgccaccatggcctactacctggatgagtaccgtggtggcagcgtctctgtggaggccctcgtcatggccctgttcaagctgctcaacacccacgccaagttctcactcctctctgaggtgagaggcaccatttccccgcaagacctagaacgcttcgaccacctggtgctgaggcgtgagattgagtccatgaaggcgcggcagcccccaggccccggggctggggacacctactccatggtctcctacagtgacacgggttcatccacaggcagccacggcacctccaccaccgtcagctcggccaggaacactctggacctggaggaaactggcgaggctgtccagggcaatatcaacgccctcccagatgtgtccgtggatgatgtcagatccacctcccaggggctgtcaagcttcaagccactgcctcgcccaccacctctggcccaaggcaacgacctcccactaggccagccaaggaagctggggagagaggacctccagccaccttcctccatgccttcctgctcgggcactgtcttctcggctccacagaaccgcagcccgccagcgggcaccgcacccaccccagggacctcctctgcacaggacttgccctcttcccccatctatgcctccgtctcccctgccaaccccagctccaagaggccgctggacgcccatctggccctggtcaaccaacaccccatcggccccttcccacgggtccagtcacccccgcacctgaaaagcccctctgcagaggccacagtggctgggggctgccttctgcccccatcaccctctggccacccagaccagacaggcacaaaccagcactttgtcatggtggaggtccaccgccccgacagcgagccagacgtcaatgaagtgagggcgctgccccagacgcgcacagcctctacgctctcccagctctcggacagcgggcagactctaagcgaggacagtggtgtggatgctggcgaggcagaggccagcgccccaggccgaggaaggcagtcggtgtccaccaagagcaggagtagcaaggagctgcctcggaacgagaggcccacagatggggccaacaaaccgcctggacttctggagcccacgtccactctggtccgtgtgaagaaaagtgcggccaccctgggcatcgccatcgagggtggcgccaacacccgccagcccctgcctaggattgtcactattcagagaggcggctcagctcacaactgtgggcagctcaaggtgggccacgtgattctggaagtgaatgggctgacgcttcggggcaaggagcaccgggaggccgcccgcattatcgccgaggccttcaagactaaggaccgtgactacattgactttctggtcactgagttcaatgtgatgctctagaggccaaggcctgagggcctcccaccactgcccagcccctggtcccagtccctttccaccgttggcttcatcaagctccttgcggggttggggctgcatggccagggtggcaggaagacatcccccctccatcccagcccactggaccagaactgggagaggaagagagcaggacaaggcagacagaaggtcaggtcaggaactggtgctgtactgggtacacagtaggcgcccaggacaagtgggttgcaagacaggaagaaaggaaaaggaagggcagagtgctggtttctccaggttgggttgggggcactgctgtcccccctccagctaggacccagcccatccccagatgcctgagcctttgtccaaagtgaggtcactcgagaattcatggacacggcccccagtcagggggcatcttgcaagacctttagtgccacaaataagcatcgagcacctccccattcacacccccattcctcctggctccttatcccccatggtgtttattatttatttccctccccatgcccctggggaccccaaggccccagcttccctctgcacccccagcctatcccagaggccttgcaggtgaccagcagtgtcattgtatttatatacagagcttatgactttaatttttcaataaagaaatctgaacaaggtta

SEQ ID NO: 125556 - DNA, 3566 bp, Homo sapiens
  Payload ID: 4612
  Gene Symbol: DFNB31
  Gene Name: deafness, autosomal recessive 31
  ENST ID: ENST00000362057
  CDS Start-End: 170-2893
gtctccgcgaccccctaggatccagccactgtacccgtgctccccaaacccaggctccagccgtcgtctccgcgctcccggggatccagctgtcgcgccagtacccgcgaggacagcggcaccgcccacaccccgcgcgctcagagcccggccgggcctcggcgtggagatgaacgcgccgctggacggcctgtcggtgagctcgtcctccaccggctcgctgggctcggcggccggggcgggcggcggcgggggcgcggggctgcggttactgtctgccaacgtgcgccagctgcaccaagcgctgaccgcgctgctgagcgaggcggagcgggagcagttcacccactgcctgaacgcttaccacgcgcgccgcaacgtcttcgacctggtgcgcaccctgcgcgtgctgctggacagtccggtcaagcggcgcctgctgcccatgcttcgtctggtcatcccgcgctccgaccagctgctcttcgaccaatacacggccgagggcctctacctgcccgccaccaccccctacaggcagcccgcctggggcggccccgacagcgcggggccaggggaggtgcgcctggtgagtttgcggcgtgccaaggcccacgagggcttgggcttcagcatccgtgggggctcggagcacggcgtgggcatctacgtgtctctggtggaaccaggctctctagctgagaaggaaggactgcgggtcggggaccagattctgcgcgtcaacgacaaatccctggcccgggtgacccacgcggaggccgtcaaggctctgaagggctccaagaagctggtgctgtctgtgtactcagcagggcgcatccctgggggctacgtcaccaaccacatctacacctgggtggacccgcagggccgcagcatctccccaccctcgggcctgccccagccccacggtggtgccctgaggcagcaggagggtgaccggaggagcaccctgcacctcctgcaaggaggggatgagaaaaaggtgaacctggtgctgggggacggccggtccctgggcctcacgatccgtgggggagctgagtacggccttggcatttacatcactggcgtggacccaggctctgaagcagaaggcagcgggctcaaggttggggaccagattctagaagtgaatgggcggagctttctcaacatcctacacgacgaggctgtcaggctgcttaagtcatctcggcacctcatcctgacagtgaaggacgtcgggaggctgccccatgcccgcaccactgtggacgagaccaagtggatcgccagttcccggatcagggagaccatggcgaactcggcagggtttcttggcgatctcacaacagaaggaataaacaagccaggattttacaagggcccagccggctcccaggtgaccctgagcagcctggggaaccagacacgagtgctgctggaggagcaggctcggcacctgctgaacgagcaggaacacgccaccatggcctactacctggatgagtaccgtggtggcagcgtctctgtggaggccctcgtcatggccctgttcaagctgctcaacacccacgccaagttctcactcctctctgaggtgagaggcaccatttccccgcaagacctagaacgcttcgaccacctggtgctgaggcgtgagattgagtccatgaaggcgcggcagcccccaggccccggggctggggacacctactccatggtctcctacagtgacacgggttcatccacaggcagccacggcacctccaccaccgtcagctcggccaggaacactctggacctggaggaaactggcgaggctgtccagggcaatatcaacgccctcccagatgtgtccgtggatgatgtcagatccacctcccaggggctgtcaagcttcaagccactgcctcgcccaccacctctggcccaaggcaacgacctcccactaggccagccaaggaagctggggagagaggacctccagccaccttcctccatgccttcctgctcgggcactgtcttctcggctccacagaaccgcagcccgccagcgggcaccgcacccaccccagggacctcctctgcacaggacttgccctcttcccccatctatgcctccgtctcccctgccaaccccagctccaagaggccgctggacgcccatctggccctggtcaaccaacaccccatcggccccttcccacgggtccagtcacccccgcacctgaaaagcccctctgcagaggccacagtggctgggggctgccttctgcccccatcaccctctggccacccagaccagacaggcacaaaccagcactttgtcatggtggaggtccaccgccccgacagcgagccagacgtcaatgaagtgagggcgctgccccagacgcgcacagcctctacgctctcccagctctcggacagcgggcagactctaagcgaggacagtggtgtggatgctggcgaggcagaggccagcgccccaggccgaggaaggcagtcggtgtccaccaagagcaggagtagcaaggagctgcctcggaacgagaggcccacagatggggccaacaaaccgcctggacttctggagcccacgtccactctggtccgtgtgaagaaaagtgcggccaccctgggcatcgccatcgagggtggcgccaacacccgccagcccctgcctaggattgtcactattcagagaggcggctcagctcacaactgtgggcagctcaaggtgggccacgtgattctggaagtgaatgggctgacgcttcggggcaaggagcaccgggaggccgcccgcattatcgccgaggccttcaagactaaggaccgtgactacattgactttctggtcactgagttcaatgtgatgctctagaggccaaggcctgagggcctcccaccactgcccagcccctggtcccagtccctttccaccgttggcttcatcaagctccttgcggggttggggctgcatggccagggtggcaggaagacatcccccctccatcccagcccactggaccagaactgggagaggaagagagcaggacaaggcagacagaaggtcaggtcaggaactggtgctgtactgggtacacagtaggcgcccaggacaagtgggttgcaagacaggaagaaaggaaaaggaagggcagagtgctggtttctccaggttgggttgggggcactgctgtcccccctccagctaggacccagcccatccccagatgcctgagcctttgtccaaagtgaggtcactcgagaattcatggacacggcccccagtcagggggcatcttgcaagacctttagtgccacaaataagcatcgagcacctccccattcacacccccattcctcctggctccttatcccccatggtgtttattatttatttccctccccatgcccctggggaccccaaggccccagcttccctctgcacccccagcctatcccagaggccttgcaggtgaccagcagtgtcattgtatttatatacagagcttatgactttaatttttcaataaagaaatctgaacaaggtt

SEQ ID NO: 125557 - DNA, 1718 bp, Homo sapiens
  Payload ID: 4612
  Gene Symbol: DFNB31
  Gene Name: deafness, autosomal recessive 31
  Uniprot ID: Q9P202
  ENST ID: ENST00000374057
  CDS Start-End: 650-1687
agttcgcaaagtccgggcttgcggccgggcggcgcagaggcgcggaggctccccgggcggctgcatcccggggctgccccggacatgccccgcaccccttgtcggacgcccgcgccgcttcaccggctgccactccccggagtgctctgggactagagcgccctccgccccaacttctgactttggggtcccccagccctagaggaacgggcgcccggctgggggagccccgggcatggtgtgacggggcagtcaggtcagctttgcggcgcccccaaactccagccacccgtcgtctccgtgccctccagaatgtagctgctgaccccgcgccccccggactccagcagcagtctccgccacctccgggctccagcagccaactcttgtgtctctcaggaacccgccgacgtctccgcgtcccccggattccaggttcgcgacccccgccgtcttcgcgcctccgggactctagcagcggtctccgcgaccccctaggatccagccactgtacccgtgctccccaaacccaggctccagccgtcgtctccgcgctcccggggatccagctgtcgcgccagtacccgcgaggacagcggcaccgcccacaccccgcgcgctcagagcccggccgggcctcggcgtggagatgaacgcgccgctggacggcctgtcggtgagctcgtcctccaccggctcgctgggctcggcggccggggcgggcggcggcgggggcgcggggctgcggttactgtctgccaacgtgcgccagctgcaccaagcgctgaccgcgctgctgagcgaggcggagcgggagcagttcacccactgcctgaacgcttaccacgcgcgccgcaacgtcttcgacctggtgcgcaccctgcgcgtgctgctggacagtccggtcaagcggcgcctgctgcccatgcttcgtctggtcatcccgcgctccgaccagctgctcttcgaccaatacacggccgagggcctctacctgcccgccaccaccccctacaggcagcccgcctggggcggccccgacagcgcggggccaggggaggtgcgcctggtgagtttgcggcgtgccaaggcccacgagggcttgggcttcagcatccgtgggggctcggagcacggcgtgggcatctacgtgtctctggtggaaccaggctctctagctgagaaggaaggactgcgggtcggggaccagattctgcgcgtcaacgacaaatccctggcccgggtgacccacgcggaggccgtcaaggctctgaagggctccaagaagctggtgctgtctgtgtactcagcagggcgcatccctgggggctacgtcaccaaccacatctacacctgggtggacccgcagggccgcagcatctccccaccctcgggcctgccccagccccacggtggtgccctgaggcagcaggagggtgaccggaggagcaccctgcacctcctgcaaggaggggatgagaaaaaggtgagtggggtggggaaaggaggccagcctctcagacaccgtattctccctccgaacccagaacagcagagctgcttggaggccgcaagaagaggctggttctgtccaggctctgtcttccctcaagtctgtactgaagggtggtgttttttctttgcttttctttttgacctgtgtagtgtatgttataatacaggctaagctgccacaataaaagagcttaaatactgtg

SEQ ID NO: 125558 - DNA, 3278 bp, Homo sapiens
  Payload ID: 4612
  Gene Symbol: DFNB31
  Gene Name: deafness, autosomal recessive 31
  ENST ID: ENST00000374059
  CDS Start-End: 935-2605
catgacctgggcacatccctctcctctcttggcctcagtttccccatggaaagctgaaatacaccatccaactgtctcattctttatttgtccccaaattacttaactcattctatagaccttagttgcttcatccaaaaagtggggaccataaccctgccctcatcccagatctgtgcagatgaaagagagggagggagagggaaagagagagatgctttggggtgtatttggccagaggccaccaggctggatcccatgaagaaatctgggtgagagggtcttaaagtcataaactgagatccagttgccaggtggctgcatagttgccaacagtgtaatgtgtcaccttttgatcttcatcagaaatctcaggctggtggccacctggccaaatacactgcagagcatgtctgtctgtctgtctgtctgtgtctctctgtgtgtgtgtgtgtgtgtgtgtgtgtgtgtgtgtgtgtgtgtgtctcccccttcccttcctttcacctgcatagtattaaacattttcaaagttacttgccaacatctagaaagataccaggttttctataaaaaaaaaaactggatttctggatgcttcttaaaaatcaggaagtctggcagcctgagcccacatcggctggagctgagccgcacctgcgagttgcatctgggatctccagttcaccggcccctaagctcctgagggttggcctgaccctgaggttgcctgtcaatcaccatttcttccctccactccttgtgttacctgcctggtcctgcggggttggcaacaactcaggagcccacctcgggtggttttggaggtgccgtgcacactgctgattgggaggctggacgctgccagtctgtccggagtttcctttacccctgagtagcccccagactgaactggcagcgagtggaggccacgatgcatggttctcttgaagctttgctcttcctgccccaagtcaccctgtcccttgcccacgcccatttgatctgctcaaatgcacaactggagatgtgtgtctttccccacaggtttcttggcgatctcacaacagaaggaataaacaagccaggattttacaagggcccagccggctcccaggtgaccctgagcagcctggggaaccagacacgagtgctgctggaggagcaggctcggcacctgctgaacgagcaggaacacgccaccatggcctactacctggatgagtaccgtggtggcagcgtctctgtggaggccctcgtcatggccctgttcaagctgctcaacacccacgccaagttctcactcctctctgaggtgagaggcaccatttccccgcaagacctagaacgcttcgaccacctggtgctgaggcgtgagattgagtccatgaaggcgcggcagcccccaggccccggggctggggacacctactccatggtctcctacagtgacacgggttcatccacaggcagccacggcacctccaccaccgtcagctcggccaggaacactctggacctggaggaaactggcgaggctgtccagggcaatatcaacgccctcccagatgtgtccgtggatgatgtcagatccacctcccaggggctgtcaagcttcaagccactgcctcgcccaccacctctggcccaaggcaacgacctcccactaggccagccaaggaagctggggagagaggacctccagccaccttcctccatgccttcctgctcgggcactgtcttctcggctccacagaaccgcagcccgccagcgggcaccgcacccaccccagggacctcctctgcacaggacttgccctcttcccccatctatgcctccgtctcccctgccaaccccagctccaagaggccgctggacgcccatctggccctggtcaaccaacaccccatcggccccttcccacgggtccagtcacccccgcacctgaaaagcccctctgcagaggccacagtggctgggggctgccttctgcccccatcaccctctggccacccagaccagacaggcacaaaccagcactttgtcatggtggaggtccaccgccccgacagcgagccagacgtcaatgaagtgagggcgctgccccagacgcgcacagcctctacgctctcccagctctcggacagcgggcagactctaagcgaggacagtggtgtggatgctggcgaggcagaggccagcgccccaggccgaggaaggcagtcggtgtccaccaagagcaggagtagcaaggagctgcctcggaacgagaggcccacagatggggccaacaaaccgcctggacttctggagcccacgtccactctggtccgtgtgaagaaaagtgcggccaccctgggcatcgccatcgagggtggcgccaacacccgccagcccctgcctaggattgtcactattcagagaggcggctcagctcacaactgtgggcagctcaaggtgggccacgtgattctggaagtgaatgggctgacgcttcggggcaaggagcaccgggaggccgcccgcattatcgccgaggccttcaagactaaggaccgtgactacattgactttctggtcactgagttcaatgtgatgctctagaggccaaggcctgagggcctcccaccactgcccagcccctggtcccagtccctttccaccgttggcttcatcaagctccttgcggggttggggctgcatggccagggtggcaggaagacatcccccctccatcccagcccactggaccagaactgggagaggaagagagcaggacaaggcagacagaaggtcaggtcaggaactggtgctgtactgggtacacagtaggcgcccaggacaagtgggttgcaagacaggaagaaaggaaaaggaagggcagagtgctggtttctccaggttgggttgggggcactgctgtcccccctccagctaggacccagcccatccccagatgcctgagcctttgtccaaagtgaggtcactcgagaattcatggacacggcccccagtcagggggcatcttgcaagacctttagtgccacaaataagcatcgagcacctccccattcacacccccattcctcctggctccttatcccccatggtgtttattatttatttccctccccatgcccctggggaccccaaggccccagcttccctctgcacccccagcctatcccagaggccttgcaggtgaccagcagtgtcattgtatttatatacagagcttatgactttaatttttcaataaagaaatctgaacaaggtt

SEQ ID NO: 125559 - DNA, 1202 bp, Homo sapiens
  Payload ID: 4613
  Gene Symbol: DFNB59
  Gene Name: deafness, autosomal recessive 59
  Uniprot ID: Q0ZLH3
  ENST ID: ENST00000375129
  CDS Start-End: 144-1202
aaactacttggtgaaaccatgctttgtatttttaagatgtataattatatttaaaaacaagcaatgcttaattttgtgcctgattttcctctttaaaaatggatttatctgggggttgcagttgatgacgttttgattttaatatgtttgctgctgctaccaagagctttgtcaagcaagttggagatggagggagattagttcctgttccaagcctcagtgaagctgacaaatatcaacctctaagtctggtggtaaaaaagaagcgatgctttctgtttcctagatataaatttacttcaacaccttttacactgaaagatattctcctaggagacagagaaatttcagctggtatttcatcttatcaattactgaattatgaagatgaatcagatgtttcactctatggaaggcgaggtaaccatattgtaaatgacgttgggattaacgttgctggatcagattccattgcagtgaaagcttcatttggtatagtaaccaaacatgaagtggaagtatcaacattactcaaagaaattactacacgaaaaattaactttgaccacagcttgatacgtcagtcaaggagcagcagaaaggcagtattgtgtgtggtcatggagagcatccgaaccacacgacagtgctcactgtctgtgcatgctggaattcgaggggaagcaatgcggtttcactttatggatgaacagaatcccaagggaagggacaaagctattgttttcccagcacatacaaccatagctttcagtgtttttgaactcttcatatacctggatggtgcctttgacctttgtgtcacttcagtgtcaaaaggaggatttgaaagggaagaaacggcaacatttgcactgctgtacaggttgagaaatatcctatttgaaagaaatagaagagtgatggatgtcatttctcgttcacagctttacttggatgatcttttttctgactactatgacaaacctctcagcatgactgatatttcactcaaagaagggacccatatccgagttaacttacttaatcacaacattcccaaagggccttgcatactctgtggaatggggaacttcaaaagggagacagtttatgggtgctttcagtgttctgttgatggtcagaagtatgtgagacttcatgcagttccttgttttgatatttggcacaagaggatgaaataa

SEQ ID NO: 125560 - DNA, 1531 bp, Homo sapiens
  Payload ID: 4613
  Gene Symbol: DFNB59
  Gene Name: deafness, autosomal recessive 59
  Uniprot ID: Q0ZLH3
  ENST ID: ENST00000409117
  CDS Start-End: 357-1415
tttcttgccgggagagagggattagagggattgtccggcgtgggtctagggtcgttgaggcctaaagttaagcctttgtggggaggacggattgggggctgggtcactttaagaaaaagattctaaaattacgaaggcagaattccagggagtctcccgggcctggtcctgaagcttgagaccccggatatatacgctccagggggctgcggtgcgctcttcgggtccccgagccctgtgtttaggaacacgcggggacgtccaaacacccgctcctctcccgccgggcgggctcctttgtcttctgggctttcgtcgcgagatggaacgctggttgatgacgttttgattttaatatgtttgctgctgctaccaagagctttgtcaagcaagttggagatggagggagattagttcctgttccaagcctcagtgaagctgacaaatatcaacctctaagtctggtggtaaaaaagaagcgatgctttctgtttcctagatataaatttacttcaacaccttttacactgaaagatattctcctaggagacagagaaatttcagctggtatttcatcttatcaattactgaattatgaagatgaatcagatgtttcactctatggaaggcgaggtaaccatattgtaaatgacgttgggattaacgttgctggatcagattccattgcagtgaaagcttcatttggtatagtaaccaaacatgaagtggaagtatcaacattactcaaagaaattactacacgaaaaattaactttgaccacagcttgatacgtcagtcaaggagcagcagaaaggcagtattgtgtgtggtcatggagagcatccgaaccacacgacagtgctcactgtctgtgcatgctggaattcgaggggaagcaatgcggtttcactttatggatgaacagaatcccaagggaagggacaaagctattgttttcccagcacatacaaccatagctttcagtgtttttgaactcttcatatacctggatggtgcctttgacctttgtgtcacttcagtgtcaaaaggaggatttgaaagggaagaaacggcaacatttgcactgctgtacaggttgagaaatatcctatttgaaagaaatagaagagtgatggatgtcatttctcgttcacagctttacttggatgatcttttttctgactactatgacaaacctctcagcatgactgatatttcactcaaagaagggacccatatccgagttaacttacttaatcacaacattcccaaagggccttgcatactctgtggaatggggaacttcaaaagggagacagtttatgggtgctttcagtgttctgttgatggtcagaagtatgtgagacttcatgcagttccttgttttgatatttggcacaagaggatgaaataaaatgaaaaatgaatacaccgtgttggtgttttaggtgcagttgtgccacaaaccttccctaaattatctaggtttgctttgatgaattaaattaaaatgagaaaagcaaaaagaaa

SEQ ID NO: 125561 - DNA, 471 bp, Homo sapiens
  Payload ID: 4613
  Gene Symbol: DFNB59
  Gene Name: deafness, autosomal recessive 59
  ENST ID: ENST00000444615
  CDS Start-End: 1-317
ccaaacatgaagtggaagtatcaacattactcaaagaaattactacacgaaaaattaactttgaccacagcttgatacgtcagtcaaggagcagcagaaaggcagtattgtgtgtggtcatggagagcatccgaaccacacgacagtgctcactgtctgtgcatgctggaattcgaggggaagcaatgcggtttcactttatggatgaacagaatcccaagggaagggacaaagctattgttttcccagcacatacaaccatagctttcagtgtttttgaactcttcatatacctggatggtgcctttggtctttaaggtctgttggccaactggaacaagtccaggtgtagcccaagggatcaggaaaggcagcccctagccatgacctttgtgtcacttcagtgtcaaaaggaggatttgaaagggaagaaacggcaacatttgcactgctgtacaggttgagaaatat

SEQ ID NO: 125562 - DNA, 713 bp, Homo sapiens
  Payload ID: 4613
  Gene Symbol: DFNB59
  Gene Name: deafness, autosomal recessive 59
  ENST ID: ENST00000442710
  CDS Start-End: 1-469
aacaccttttacactgaaagatattctcctaggagacagagaaatttcagctggtatttcatcttatcaattactgaattatgaagatgaatcagatgtttcactctatggaaggcgaggtaaccatattgtaaatgacgttgggattaacgttgctggatcagattccattgcagtgaaagcttcatttggtatagtaaccaaacatgaagtggaagtatcaacattactcaaagaaattactacacgaaaaattaactttgaccacagcttgatacgtcagtcaaggagcagcagaaaggcagtattgtgtgtggtcatggagagcatccgaaccacacgacagtgctcactgtctgtgcatgctggaattcgaggggaagcaatgcggacctttgtgtcacttcagtgtcaaaaggaggatttgaaagggaagaaacggcaacatttgcactgctgtacaggttgagaaatatcctatttgaaagaaatagaagagtgatggatgtcatttctcgttcacagctttacttggatgatcttttttctgactactatgacaaacctctcagcatgactgatatttcactcaaagaagggacccatatccgagttaacttacttaatcacaacattcccaaagggccttgcatactctgtggaatggggaacttcaaaagggagacagtttatgggtgctttcagtgttctgt

SEQ ID NO: 125563 - DNA, 455 bp, Homo sapiens
  Payload ID: 4614
  Gene Symbol: DHX57
  Gene Name: DEAH (Asp-Glu-Ala-Asp/His) box polypeptide 57
  ENST ID: ENST00000442331
  CDS Start-End: 1-156
aaaaagctggaatttgcattcgcaaacagtgattatctggcccttctacaagcgtataagggatggcagctaagtacaaaagaaggcgtgcgtgcaagttataattactgcagacaaaacttcttgtctggaagagttctgcaggaaaagagatgagccagcaagaccataatgaaggagaaagaggaaacattctgctgagttccactgagagcacgaaccactctaggcctgagtaaggaactgagaggacaggagcaaaaatgcaagtaggaaaagctaggtagtagacagtgccgcagcacttggagttggaattccagtcaaaacaaacagcattttttgctgtcctaagaatttcgtggaaaatcaggcctacccaaaatccaatgagagtgtttaaaattgtaatctagagttaaataaatgatccttggatttattgaatttttgca

SEQ ID NO: 125564 - DNA, 2559 bp, Homo sapiens
  Payload ID: 4614
  Gene Symbol: DHX57
  Gene Name: DEAH (Asp-Glu-Ala-Asp/His) box polypeptide 57
  ENST ID: ENST00000452978
  CDS Start-End: 1-1996
tgacttcttgctgctagttttgaaggacattgtatcgcagaggccaggtcttcaagttattttaatgagtgcaactctaaacgctgagcttttttcagactattttaattcctgccccgttattactataccaggtcgtacatttcctgttgatcaattttttttggaagatgcaattgctgtgacaaggtatgtattacaggatgggagcccatatatgcggtccatgaaacagatttcaaaggaaaagcttaaagcaaggcggaacagaactgcatttgaagaagtggaagaagacctaaggctctcccttcacctccaggatcaggattctgtcaaagatgcagtgccagatcaacagttagattttaagcagctcctggcccgctataaaggggttagcaagtcagtcatcaaaacaatgtccatcatggattttgaaaaggtgaatcttgaattaatagaggccttattagagtggattgtggatggaaagcactcctaccctccaggtgctatacttgtatttttaccaggactagcagaaatcaaaatgctttatgaacagctacagtctaattctcttttcaacaacagacgtagtaatcgatgtgttattcacccacttcattcatctttatccagtgaagagcagcaggctgtgtttgtaaaacctcctgcaggagtaactaagattataatttccaccaacattgctgagacatccataaccatcgatgatgttgtctatgttatcgattctgggaaaatgaaagaaaagagatatgatgccagcaaagggatggaaagtctagaggacacctttgtatctcaagctaatgctctacaaaggaaaggccgagcaggccgtgttgcatctggggtctgcttccatttattcactagccatcactacaatcaccagcttttaaaacaacagctaccagaaatacaaagagtgccattggaacagctgtgtctaagaattaaaattttagagatgtttagtgctcataatctccagtctgtgttctctcggctcattgaacctccacacaccgattctcttcgtgcctcaaaaatacgattacgagacttaggagcattaactccagatgaaagattgacccctcttgggtatcatttggcctctctgcccgtggatgtgagaattggcaaactaatgttgtttgggtctatcttccgctgtttggatcctgctctcaccattgctgccagtttggcttttaagtctccgtttgtatctccctgggataaaaaagaagaagctaaccagaaaaagctggaatttgcattcgcaaacagtgattatctggcccttctacaagcgtataagggatggcagctaagtacaaaagaaggcgtgcgtgcaagttataattactgcagacaaaacttcttgtctggaagagttctgcaggaaatggccagcctcaaacgacaattcacggaactgttatcggatatagggtttgcaagggaagggctcagagcaagggaaattgagaaaagggcccaaggaggagatggtgtcttagatgccacaggagaagaggcaaactcaaatgctgagaaccccaagctgatatcagcaatgctgtgtgctgctttgtatccaaatgtagtgcaggtgagacactttgacagcccctacctgttgtaccacgagaagataaaaactagtcgagtattcatccgagactgcagcatggtgtctgtgtacccgctggtcttgtttggaggaggccaagtgaatgtgcagcttcaaagaggagagttcgttgtctccctggatgatggttggatccgttttgtagctgcttcccatcaggtggctgaactggtaaaggagcttcgttgcgaacttgatcagcttctccaggataaaattaaaaacccaagcattgatctgtgtacgtgtcctcgaggatcccggatcatcagcacaattgtgaaacttgtcaccacacaataaaaagcagtcttagagagtgcttgctactcacctgcttctagctcacctgggaaataacagcagaacctctacctcgaactaaagacctattggggctggccctggtggaggagcccagggcatgaagcccaaggcagctgaggcagtgtatatacccttagggccatttctaacaaagccttggccactcccagcacaatttggagtgtcaagggtgagagcctaaaacccagcttgcctgtctttgtctctgtgattgttctggagtgaattaagttcacctgataactcaaaagtgaatgtataatacaattctgttttaatctgtgtattctttttctcctactttttactggggtgagaggggcatgaagagaaatacgccttttttttttttcttttcctgtcgccaaggctcgactgagagaagtcagaacagagaaggggaaaaaaaacccaaaattatgtgaacaagcaaaattaaaatttcattttaggctattggctactgagtaaacttgacttgtgaggggtttttatttttactcattaaaagtcaactt

SEQ ID NO: 125565 - DNA, 4859 bp, Homo sapiens
  Payload ID: 4614
  Gene Symbol: DHX57
  Gene Name: DEAH (Asp-Glu-Ala-Asp/His) box polypeptide 57
  Uniprot ID: Q6P158
  ENST ID: ENST00000457308
  CDS Start-End: 129-4289
agctgggccaccgcagggctgctccaagtgagaatcgtgagggtggccaagtccagtttggacctctgacccttgggcagcacctcccgacagccggctcgggacccaactctgcgagccaggtgaaaatgagttcttcagtaagaagaaaaggcaagccaggcaaaggaggtggaaaagggtcttctagaggaggaagaggaggcaggagtcacgccagtaaatctcatgggagtggtggcggtggcggtggtggtggtggtggaggtggcggcaacagaaaggcctccagtagaatatgggatgatggagatgacttttgtatcttcagtgaatcaaggcgcccttccagacctagcaacagtaacataagcaaaggagagtcacgcccaaaatggaaacccaaagccaaagtaccccttcagactctacatatgacttctgagaatcaagagaaagtgaaagctcttctccgagacctgcaagaacaagatgctgatgctggatctgaaagaggcctttctggggaggaggaagatgatgagcctgattgctgtaacgatgagcggtactggccagctggacaggaaccttccctcgttcccgacttggatcctttggaatatgctggcttagcctcagtggagccttatgttccagaatttacagtctccccatttgcagtgcaaaaactttccaggtatggtttcaatactgaacgctgtcaagcggtcctgaggatgtgtgatggagatgtgggagcatcactagagcatctccttacccagtgtttttcagagacatttggagagaggatgaagatctctgaggcagtcaaccagataagcttggatgagtgtatggaacagcgacaggaagaggcatttgctctcaagtccatctgtggagaaaaatttatagaaagaattcagaacagagtctggaccattgggttagaactggagtatctgacaagtagattccgcaaatccaagccaaaagaaagtaccaaaaatgtacaagagaattcacttgaaatctgtaaattttacctcaaaggaaattgtaaatttggatcaaaatgcagattcaaacatgaagtgcccccaaatcaaattgttggaagaatagaaagaagtgtagatgattctcatcttaatgctattgaagatgcatcttttttatatgaacttgaaattcgattttctaaagaccacaaatatccctaccaagctccgctcgtggcattttattccaccaatgagaacctacctctggcttgtcgtttacatatttctgagtttctttatgacaaggccttgacatttgcggaaacttcggaacctgtcgtatattctttgataacccttttagaggaagagtcggaaatagtcaagttactaacgaatacccaccacaagtatagtgaccctcctgtgaactttctgccagtaccctctaggaccagaataaataatcctgcctgtcataaaacagtgattccaaataattcttttgtttctaatcaaattccagaagttgaaaaagcatcagaatctgaggagtcagatgaggatgacggtcctgcacctgttatagtagagaatgaaagctatgtgaaccttaagaaaaagatttccaaaagatatgactggcaggcaaagtcagtacatgctgaaaatggtaaaatctgcaagcagttccgaatgaaacaggcttccagacagttccagtccattctgcaagagaggcaatcactccctgcttgggaagaaagagaaaccattcttaacttattgcgtaagcaccaggtggttgtcataagtggtatgactggatgtgggaaaaccacacaaattccgcagtttattctggatgattctctgaatggaccacctgagaaggtagccaacatcatctgtacccaaccccgacgaatctctgcaatctctgttgctgaacgcgttgctaaagaaagagcagagagggtgggtctgaccgtgggataccagattcggttagaaagtgtcaagtcctcagccaccagactgttatactgcaccacgggagtgctgctgagaaggctagaaggagatacagctctacaaggagtttcccatatcattgttgatgaagttcatgagaggacagaagaaagtgacttcttgctgctagttttgaaggacattgtatcgcagaggccaggtcttcaagttattttaatgagtgcaactctaaacgctgagcttttttcagactattttaattcctgccccgttattactataccaggtcgtacatttcctgttgatcaattttttttggaagatgcaattgctgtgacaaggtatgtattacaggatgggagcccatatatgcggtccatgaaacagatttcaaaggaaaagcttaaagcaaggcggaacagaactgcatttgaagaagtggaagaagacctaaggctctcccttcacctccaggatcaggattctgtcaaagatgcagtgccagatcaacagttagattttaagcagctcctggcccgctataaaggggttagcaagtcagtcatcaaaacaatgtccatcatggattttgaaaaggtgaatcttgaattaatagaggccttattagagtggattgtggatggaaagcactcctaccctccaggtgctatacttgtatttttaccaggactagcagaaatcaaaatgctttatgaacagctacagtctaattctcttttcaacaacagacgtagtaatcgatgtgttattcacccacttcattcatctttatccagtgaagagcagcaggctgtgtttgtaaaacctcctgcaggagtaactaagattataatttccaccaacattgctgagacatccataaccatcgatgatgttgtctatgttatcgattctgggaaaatgaaagaaaagagatatgatgccagcaaagggatggaaagtctagaggacacctttgtatctcaagctaatgctctacaaaggaaaggccgagcaggccgtgttgcatctggggtctgcttccatttattcactagccatcactacaatcaccagcttttaaaacaacagctaccagaaatacaaagagtgccattggaacagctgtgtctaagaattaaaattttagagatgtttagtgctcataatctccagtctgtgttctctcggctcattgaacctccacacaccgattctcttcgtgcctcaaaaatacgattacgagacttaggagcattaactccagatgaaagattgacccctcttgggtatcatttggcctctctgcccgtggatgtgagaattggcaaactaatgttgtttgggtctatcttccgctgtttggatcctgctctcaccattgctgccagtttggcttttaagtctccgtttgtatctccctgggataaaaaagaagaagctaaccagaaaaagctggaatttgcattcgcaaacagtgattatctggcccttctacaagcgtataagggatggcagctaagtacaaaagaaggcgtgcgtgcaagttataattactgcagacaaaacttcttgtctggaagagttctgcaggaaatggccagcctcaaacgacaattcacggaactgttatcggatatagggtttgcaagggaagggctcagagcaagggaaattgagaaaagggcccaaggaggagatggtgtcttagatgccacaggagaagaggcaaactcaaatgctgagaaccccaagctgatatcagcaatgctgtgtgctgctttgtatccaaatgtagtgcaggtgaaaagcccagaaggaaaatttcagaagaccagtactggagctgtcagaatgcaaccaaaatcagctgagttgaagtttgtcaccaagaacgatggatatgtacacattcacccttcatcagtgaactatcaggtgagacactttgacagcccctacctgttgtaccacgagaagataaaaactagtcgagtattcatccgagactgcagcatggtgtctgtgtacccgctggtcttgtttggaggaggccaagtgaatgtgcagcttcaaagaggagagttcgttgtctccctggatgatggttggatccgttttgtagctgcttcccatcaggtggctgaactggtaaaggagcttcgttgcgaacttgatcagcttctccaggataaaattaaaaacccaagcattgatctgtgtacgtgtcctcgaggatcccggatcatcagcacaattgtgaaacttgtcaccacacaataaaaagcagtcttagagagtgcttgctactcacctgcttctagctcacctgggaaataacagcagaacctctacctcgaactaaagacctattggggctggccctggtggaggagcccagggcatgaagcccaaggcagctgaggcagtgtatatacccttagggccatttctaacaaagccttggccactcccagcacaatttggagtgtcaagggtgagagcctaaaacccagcttgcctgtctttgtctctgtgattgttctggagtgaattaagttcacctgataactcaaaagtgaatgtataatacaattctgttttaatctgtgtattctttttctcctactttttactggggtgagaggggcatgaagagaaatacgccttttttttttttcttttcctgtcgccaaggctcgactgagagaagtcagaacagagaaggggaaaaaaaacccaaaattatgtgaacaagcaaaattaaaatttcattttaggctattggctactgagtaaacttgacttgtgaggggtttttatttttactcattaaaagtcaacttaaaaaaa

SEQ ID NO: 125566 - DNA, 548 bp, Homo sapiens
  Payload ID: 4614
  Gene Symbol: DHX57
  Gene Name: DEAH (Asp-Glu-Ala-Asp/His) box polypeptide 57
  ENST ID: ENST00000619207
  CDS Start-End: 231-548
agaaggcgccgggactgtgccgctgcagctgggccaccgcagggctgctccaagtgagaatcgtgagggtggccaagtccagtttggacctctgacccttgggcagcacctcccgacagccggctcgggacccaactctgcgagccagacctagcaacagtaacataagcaaaggagagtcacgcccaaaatggaaacccaaagccaaagtaccccttcagactctacatatgacttctgagaatcaagagaaagtgaaagctcttctccgagacctgcaagaacaagatgctgatgctggatctgaaagaggcctttctggggaggaggaagatgatgagcctgattgctgtaacgatgagcggtactggccagctggacaggaaccttccctcgttcccgacttggatcctttggaatatgctggcttagcctcagtggagccttatgttccagaatttacagtctccccatttgcagtgcaaaaactttccaggtatggtttcaatactgaacgctgtcaagcggtcctgaggatgtgtgatgga

SEQ ID NO: 125567 - DNA, 4109 bp, Homo sapiens
  Payload ID: 4614
  Gene Symbol: DHX57
  Gene Name: DEAH (Asp-Glu-Ala-Asp/His) box polypeptide 57
  ENST ID: ENST00000620517
  CDS Start-End: 213-1631
gtacttacacaaccccagatggtacaacctacaacacacctaggctgtatgatgtagccaattgctcctagactacaaatctatacagcatgttgctgtactgaatactctaagcaattataacacaatgacctagcaacagtaacataagcaaaggagagtcacgcccaaaatggaaacccaaagccaaagtaccccttcagactctacatatgacttctgagaatcaagagaaagtgaaagctcttctccgagacctgcaagaacaagatgctgatgctggatctgaaagaggcctttctggggaggaggaagatgatgagcctgattgctgtaacgatgagcggtactggccagctggacaggaaccttccctcgttcccgacttggatcctttggaatatgctggcttagcctcagtggagccttatgttccagaatttacagtctccccatttgcagtgcaaaaactttccaggtatggtttcaatactgaacgctgtcaagcggtcctgaggatgtgtgatggagatgtgggagcatcactagagcatctccttacccagtgtttttcagagacatttggagagaggatgaagatctctgaggcagtcaaccagataagcttggatgagtgtatggaacagcgacaggaagaggcatttgctctcaagtccatctgtggagaaaaatttatagaaagaattcagaacagagtctggaccattgggttagaactggagtatctgacaagtagattccgcaaatccaagccaaaagaaagtaccaaaaatgtacaagagaattcacttgaaatctgtaaattttacctcaaaggaaattgtaaatttggatcaaaatgcagattcaaacatgaagtgcccccaaatcaaattgttggaagaatagaaagaagtgtagatgattctcatcttaatgctattgaagatgcatcttttttatatgaacttgaaattcgattttctaaagaccacaaatatccctaccaagctccgctcgtggcattttattccaccaatgagaacctacctctggcttgtcgtttacatatttctgagtttctttatgacaaggccttgacatttgcggaaacttcggaacctgtcgtatattctttgataacccttttagaggaagagtcggaaatagtcaagttactaacgaatacccaccacaagtatagtgaccctcctgtgaactttctgccagtaccctctaggaccagaataaataatcctgcctgtcataaaacagtgattccaaataattcttttgtttctaatcaaattccagaagttgaaaaagcatcagaatctgaggagtcagatgaggatgacggtcctgcacctgttatagtagagaatgaaagctatgtgaaccttaagaaaaagatttccaaaagatatgactggcaggcaaagtcagtacatgctgaaaatggtaaaatctgcaagcagttccgaatgaaacaggcttccagacagttccagtccattctgcaagagaggcaatcactccctgcttgggaagaaagagaaaccattcttaacttattgcgtaagcaccaggtggttgtcataagtggtatgactgggacttatttgttttaatgtacagatgtgggaaaaccacacaaattccgcagtttattctggatgattctctgaatggaccacctgagaaggtagccaacatcatctgtacccaaccccgacgaatctctgcaatctctgttgctgaacgcgttgctaaagaaagagcagagagggtgggtctgaccgtgggataccagattcggttagaaagtgtcaagtcctcagccaccagactgttatactgcaccacgggagtgctgctgagaaggctagaaggagatacagctctacaaggagtttcccatatcattgttgatgaagttcatgagaggacagaagaaagtgacttcttgctgctagttttgaaggacattgtatcgcagaggccaggtcttcaagttattttaatgagtgcaactctaaacgctgagcttttttcagactattttaattcctgccccgttattactataccaggtcgtacatttcctgttgatcaattttttttggaagatgcaattgctgtgacaaggtatgtattacaggatgggagcccatatatgcggtccatgaaacagatttcaaaggaaaagcttaaagcaaggcggaacagaactgcatttgaagaagtggaagaagacctaaggctctcccttcacctccaggatcaggattctgtcaaagatgcagtgccagatcaacagttagattttaagcagctcctggcccgctataaaggggttagcaagtcagtcatcaaaacaatgtccatcatggattttgaaaaggtgaatcttgaattaatagaggccttattagagtggattgtggatggaaagcactcctaccctccaggtgctatacttgtatttttaccaggactagcagaaatcaaaatgctttatgaacagctacagtctaattctcttttcaacaacagacgtagtaatcgatgtgttattcacccacttcattcatctttatccagtgaagagcagcaggctgtgtttgtaaaacctcctgcaggagtaactaagattataatttccaccaacattgctgagacatccataaccatcgatgatgttgtctatgttatcgattctgggaaaatgaaagaaaagagatatgatgccagcaaagggatggaaagtctagaggacacctttgtatctcaagctaatgctctacaaaggaaaggccgagcaggccgtgttgcatctggggtctgcttccatttattcactagccatcactacaatcaccagcttttaaaacaacagctaccagaaatacaaagagtgccattggaacagctgtgtctaagaattaaaattttagagatgtttagtgctcataatctccagtctgtgttctctcggctcattgaacctccacacaccgattctcttcgtgcctcaaaaatacgattacgagacttaggagcattaactccagatgaaagattgacccctcttgggtatcatttggcctctctgcccgtggatgtgagaattggcaaactaatgttgtttgggtctatcttccgctgtttggatcctgctctcaccattgctgccagtttggcttttaagtctccgtttgtatctccctgggataaaaaagaagaagctaaccagaaaaagctggaatttgcattcgcaaacagtgattatctggcccttctacaagcgtataagggatggcagctaagtacaaaagaaggcgtgcgtgcaagttataattactgcagacaaaacttcttgtctggaagagttctgcaggaaatggccagcctcaaacgacaattcacggaactgttatcggatatagggtttgcaagggaagggctcagagcaagggaaattgagaaaagggcccaaggaggagatggtgtcttagatgccacaggagaagaggcaaactcaaatgctgagaaccccaagctgatatcagcaatgctgtgtgctgctttgtatccaaatgtagtgcaggtgaaaagcccagaaggaaaatttcagaagaccagtactggagctgtcagaatgcaaccaaaatcagctgagttgaagtttgtcaccaagaacgatggatatgtacacattcacccttcatcagtgaactatcaggtgagacactttgacagcccctacctgttgtaccacgagaagataaaaactagtcgagtattcatccgagactgcagcatggtgtctgtgtacccgctggtcttgtttggaggaggccaagtgaatgtgcagcttcaaagaggagagttcgttgtctccctggatgatggttggatccgttttgtagctgcttcccatcaggtggctgaactggtaaaggagcttcgttgcgaacttgatcagcttctccaggataaaattaaaaacccaagcattgatctgtgtacgtgtcctcgaggatcccggatcatcagcacaattgtgaaacttgtcaccacacaataaaaagcagtcttagagagtg

SEQ ID NO: 125568 - DNA, 2994 bp, Homo sapiens
  Payload ID: 4615
  Gene Symbol: DHX15
  Gene Name: DEAH (Asp-Glu-Ala-His) box helicase 15
  Uniprot ID: O43143
  ENST ID: ENST00000336812
  CDS Start-End: 158-2545
tcgccgccgccattttagctgttggttccggccgcaccgtgtgggctgtagtagcgggaggggtgggggtcctccagagttaagtggctgtcctcgactgtgcccatacagcagccagctttcttccttaataactgcccgttcgaagagtgcgaggatgtccaagcggcaccggttggacctaggggaggattacccctctggcaagaagcgtgcggggaccgatgggaaggatcgagatcgagaccgggatcgtgaagatcggtctaaagatcgagaccgagaacgtgatagaggagatagagagcgagagagggagaaagaaaaggagaaggagttgcgagcttcaacaaatgctatgcttatcagtgctggattaccacctttgaaagcttcccattcagctcactcaacccactcagcacattcaacgcattcaacacattctgctcattcaacgcatgccggacatgcaggtcacacgtcacttccacagtgcattaatccgttcaccaacttaccccatactcctcgatactatgatattctaaagaaacgtcttcagctccctgtttgggaatacaaggataggtttacagatattctggttagacatcagtcctttgtactggttggtgagactgggtctggtaaaacaacacagattccacagtggtgtgtggagtacatgcgatcattaccaggacccaagagaggagttgcctgtacccaacccaggagagtggctgcaatgagtgtggctcagagagttgctgatgagatggatgtgatgttgggccaggaagttggttactccattcgatttgaagactgcagtagtgcaaaaaccattcttaagtatatgactgatgggatgttacttcgtgaagctatgaatgatcccctcctggagcgttatggtgtaataattcttgatgaggctcatgagaggacactggctacagatattctaatgggtgttctgaaggaagttgtaagacagagatcagatttaaaggttatagttatgagcgctactctagatgcaggaaaattccagatttactttgataactgtcctctcctaactattcctgggcgtacacatcctgttgagatcttctatactccagaaccagagagagattatcttgaagcagcaattcgaacagttatccagattcatatgtgtgaagaggaagagggagatcttcttcttttcttaactggtcaagaggaaattgatgaagcctgtaagagaataaagcgtgaagttgatgatttgggccctgaagttggtgacattaaaatcattccattgtattctacacttccacctcagcagcagcaacgcatttttgagcctccacctcccaaaaaacagaatggagcaattggaagaaaggtagttgtgtcaactaacatagcagagacgtctttgacaatagatggtgtggtgtttgtgattgatcctggatttgcgaaacagaaggtctacaatcctcgaatcagagttgagtcccttttggtgacagctattagtaaagcttcagctcagcaaagggctggtcgagctggacgtaccagacctggaaaatgcttcagactttacacagagaaagcttataaaacagaaatgcaggataacacctatcctgagattttgcgttctaatttaggatcagttgtgttacaattgaagaaacttggtattgatgacttggtacattttgattttatggatccaccagctcctgaaactctgatgagagccctggaacttttgaattacctggctgctttaaatgatgatggagatctgactgaattgggatccatgatggcagagtttcctctagatccacagctcgcaaaaatggttattgcaagttgtgactacaactgttctaatgaggtcctatctattactgctatgttgtcagtcccacagtgttttgttcgccccacggaggccaagaaagccgcagatgaggccaagatgagatttgcccacatagatggagatcatctgacactgctgaacgtctaccatgcttttaaacaaaatcatgaatcggttcagtggtgttatgacaacttcattaactacaggtccctgatgtccgcagacaatgtacgccagcagctatctcgaattatggacagatttaatttgcctcgtcgaagtactgactttacaagcagggactattatattaatataagaaaagctttggttactgggtattttatgcaggtggcacatttagaacgaacagggcattacttaactgtgaaagataaccaggtggttcagttgcatccctctactgttcttgaccacaaacctgaatgggtgctttataatgagtttgttctaacaacaaagaattacatccggacatgtacagatatcaagccagaatggttggtgaaaattgcccctcaatattatgacatgagcaatttcccacagtgtgaagcaaagagacagttggaccgcatcattgccaaacttcaatccaaggaatattcacagtactgaattcagtgcttagaactgaagttattgagaggacagctttaaaagatgaatgaactcaaaagttcgagttgtgctcttcacgttggttcgataatggcctttatttgaaagctttttaatttttctttacagtaaatattccattctgatttcataaattaaacatttatgcctcccttttgtgttgacactgtagctcatactggaaaagtcgatcaatgttttgcagtttattgaaagtagttctatatataacaatgttataagcatttctttagaaatggttgaaaatgcttctaaaatgtgattatcgaccatggtatgcatgatcgttgtaattgttgacattccttttagaagttgtgaaatgttacaacttgtgcttatgtagacacaatcttctgtctcagtacagaggcactgacttcaataaagtctatttatactaa

SEQ ID NO: 125569 - DNA, 3994 bp, Homo sapiens
  Payload ID: 4616
  Gene Symbol: DHX30
  Gene Name: DEAH (Asp-Glu-Ala-His) box helicase 30
  ENST ID: ENST00000348968
  CDS Start-End: 421-3921
cggctcatgcgcggtgcacagaggcttgtttcacatctgtaacaacaggaggaggcccagcctcgtgatgaggaatagcaaggagagaattcagctccagttcaaaagcctacaaaatctgagactgtcattgcttttataaggattccagctttccctcctggccagaaatgttcagcctggactcattcagaaaagcatccctggatgtgaatgaggaccctccttaaacaggaatggagaggttgagctggtcatttccaaccttagcttcaaggcagaactggaattagtttcaaaataaaccttgatcctaggcatttagttctagaagatcctacaagcacgtctgctgtaactctatatcgggcccagcacaggcagcgtcagtgcaaacttcccccaccccgccttccacccatgtgtgtcaaccctaccccaggagggaccatctctcgagcttctagggacctattaaaagagttcccacagcccaaaaatcttctcaacagtgtgattggaagagccctcggcatctcacatgcaaaagacaaactagtctacgtgcacacaaatggaccgaagaaaaagaaagtcacactgcacataaaatggcccaagagcgtggaggtagaaggctatggcagcaagaagatcgatgctgagcggcaggctgcagctgcagcctgccagctgttcaagggttggggtctgctaggtccccggaatgagttgtttgacgcagccaaataccgagtgctagctgatcgctttggctcccctgccgacagctggtggcgtccggaacccaccatgccccctacttcctggcggcagctgaatccagagagtattcgaccagggggacctgggggcctatcccgctctttaggccgggaagaagaggaggacgaggaggaagagctagaagaagggaccatagatgttaccgacttcttgtccatgacccagcaggattcccacgctccactcagggactcaagggggagttcctttgagatgacagatgacgacagtgccattagggctctgacccagtttccacttcccaagaaccttctggccaaggtgattcagattgcaacgtcatcctccacagctaagaacctcatgcagttccatactgtgggcaccaagaccaagctgtctacactcaccctgctctggccctgccccatgacctttgttgccaaagggcgccgcaaagcagaggctgagaataaggcggcagccttggcctgcaagaaactgaagagcctgggcctggtggacaggaacaacgaaccgcttacacacgccatgtataacctggcctctttgcgtgagctgggtgagacccagcgccgaccatgcaccatccaggtgcccgagcccatcctccgcaagatagagaccttcctgaaccattaccctgtggagagttcatggatcgccccagaactccggctgcagagtgatgacatcttgcccttgggcaaggactcagggcctctgagtgaccctatcacaggcaagccctatgtgcccctgttggaagcagaggaggtacgtctcagccagagtctgctagaactgtggcggcggcgagggccggtctggcaggaggccccccagctacctgtggacccacatcgggacaccatcctcaacgccattgagcagcacccggtggtggtcatctctggggacacgggctgtgggaagaccacgcgcatcccccagctgttgctggagcgctatgtgaccgagggccgaggtgcccgctgcaatgttatcatcacccaacctcgccgcatctctgctgtgtctgtggcacagcgggtcagccacgaactgggcccctccctgcgccggaatgtgggcttccaggtgcggttggaaagtaagcccccatcccgaggcggggccctgctcttctgcactgtgggtatcctgctgcgtaagctgcagagcaaccccagcctggagggcgtgagccacgtcatcgtggatgaggtgcatgagcgggacgtgaacacagactttctgctgatcctgctcaagggcctgcagcggctcaacccggccctgcggctggtgctcatgagtgccacaggggacaatgagcgcttctcccgatactttggtggctgccccgtcatcaaggtgcctggcttcatgtacccagtcaaggagcactacctagaggacatcctggccaagttgggcaagcaccagtacctgcaccggcaccggcaccatgagtctgaggatgaatgcgcactcgatttggaccttgtgactgatctggttctgcacatcgatgctcgcggggaaccaggtgggatcctgtgcttcctgcctgggtggcaggagatcaaaggagtgcagcagcgcctccaggaggccctgggcatgcacgagagcaagtacctcatcctgccagtgcactccaacatccccatgatggatcagaaggccatattccagcagcctccagttggggtgcgcaagattgtcttggccaccaacattgctgagacttccatcacaatcaatgacatcgtgcatgtggtggacagtgggctgcacaaggaagaacgctatgacctgaagaccaaggtgtcctgcctggagacagtgtgggtatcaagagccaatgtgatccagcgccggggccgggcgggccgctgccagtccggctttgcctaccacttgttccctcgaagccggctggagaaaatggtccctttccaagtgccagagatcctgcgcacacctcttgagaacctggtgctgcaagcgaaaatccacatgcctgagaagacggcggtggagttcctgtccaaggctgtggacagtccaaacatcaaggcagtggacgaggctgtgatcttgctccaggagatcggggtgctggaccagcgggagtacctgactaccctggggcagcgcctggctcacatctccaccgacccccggttggccaaggccattgtgttggctgccatcttccgttgcctgcacccactactggtggtcgtttcctgcctcacccgggaccccttcagcagcagcctacagaaccgggcagaggtggacaaggtgaaagcactgttgagccatgacagcggcagtgaccacctggcctttgtgcgggctgtcgccggctgggaggaggtgctgcgttggcaggaccgcagctcccgggagaattacctggaggaaaacctgctgtacgcacccagcctgcgcttcatccacggactcatcaagcagttctcagagaacatttatgaggccttcctggtggggaagccctcggactgcaccctggcctccgcccagtgcaacgagtacagtgaggaggaggagctggtgaagggcgtgctgatggccggcctctaccccaacctcatccaggtgaggcagggcaaggtcacccggcaggggaagttcaagcccaacagcgtcacatataggaccaaatcaggcaacatcctgctgcacaagtcgaccattaacagggaggccacacggttacggagccgatggctgacgtatttcatggcagtcaagtccaatggcagcgtcttcgtccgggactcctctcaggtgcacccgctagctgtgctgctgctgaccgacggggacgtgcacatccgtgatgacgggcgccgggccaccatctcactgagcgacagtgacctgctgcggctggagggtgactcgcgtaccgtgcggctgctgaaggagctgcggcgggccctgggccgcatggtggagcggagcctgcgcagcgagctggctgcacttccccccagcgtacaggaggagcacgggcagctgcttgcgctactggcagagctgctgcgaggaccctgtggcagctttgatgtgcgcaagacagctgacgactgagccctgcttctgctggggctgtgtacagagtgcaaatgtttatttaaaataaagttctatttatcccttgtga

SEQ ID NO: 125570 - DNA, 3887 bp, Homo sapiens
  Payload ID: 4616
  Gene Symbol: DHX30
  Gene Name: DEAH (Asp-Glu-Ala-His) box helicase 30
  ENST ID: ENST00000395745
  CDS Start-End: 202-330
agttgtagtccggccgtggttgggggagccgcggctcatgcgcggtgcacagaggcttgtttcacatctgtaacaacaggaggaggcccagcctcgtgatgaggaatagcaaggagagaattcagctccagttcaaaagcctacaaaatctgagactgtcattgcttttataaggattccagctttccctcctggccagaaatgttcagcctggactcattcagaaaagatcgggcccagcacaggcagcgtcagtgcaaacttcccccaccccgccttccacccatgtgtgtcaaccctaccccaggagggaccatctctcgaggctgaacgttaacatttccaacatggcagcttctagggacctattaaaagagttcccacagcccaaaaatcttctcaacagtgtgattggaagagccctcggcatctcacatgcaaaagacaaactagtctacgtgcacacaaatggaccgaagaaaaagaaagtcacactgcacataaaatggcccaagagcgtggaggtagaaggctatggcagcaagaagatcgatgctgagcggcaggctgcagctgcagcctgccagctgttcaagggttggggtctgctaggtccccggaatgagttgtttgacgcagccaaataccgagtgctagctgatcgctttggctcccctgccgacagctggtggcgtccggaacccaccatgccccctacttcctggcggcagctgaatccagagagtattcgaccagggggacctgggggcctatcccgctctttaggccgggaagaagaggaggacgaggaggaagagctagaagaagggaccatagatgttaccgacttcttgtccatgacccagcaggattcccacgctccactcagggactcaagggggagttcctttgagatgacagatgacgacagtgccattagggctctgacccagtttccacttcccaagaaccttctggccaaggtgattcagattgcaacgtcatcctccacagctaagaacctcatgcagttccatactgtgggcaccaagaccaagctgtctacactcaccctgctctggccctgccccatgacctttgttgccaaagggcgccgcaaagcagaggctgagaataaggcggcagccttggcctgcaagaaactgaagagcctgggcctggtggacaggaacaacgaaccgcttacacacgccatgtataacctggcctctttgcgtgagctgggtgagacccagcgccgaccatgcaccatccaggtgcccgagcccatcctccgcaagatagagaccttcctgaaccattaccctgtggagagttcatggatcgccccagaactccggctgcagagtgatgacatcttgcccttgggcaaggactcagggcctctgagtgaccctatcacaggcaagccctatgtgcccctgttggaagcagaggaggtacgtctcagccagagtctgctagaactgtggcggcggcgagggccggtctggcaggaggccccccagctacctgtggacccacatcgggacaccatcctcaacgccattgagcagcacccggtggtggtcatctctggggacacgggctgtgggaagaccacgcgcatcccccagctgttgctggagcgctatgtgaccgagggccgaggtgcccgctgcaatgttatcatcacccaacctcgccgcatctctgctgtgtctgtggcacagcgggtcagccacgaactgggcccctccctgcgccggaatgtgggcttccaggtgcggttggaaagtaagcccccatcccgaggcggggccctgctcttctgcactgtgggtatcctgctgcgtaagctgcagagcaaccccagcctggagggcgtgagccacgtcatcgtggatgaggtgcatgagcgggacgtgaacacagactttctgctgatcctgctcaagggcctgcagcggctcaacccggccctgcggctggtgctcatgagtgccacaggggacaatgagcgcttctcccgatactttggtggctgccccgtcatcaaggtgcctggcttcatgtacccagtcaaggagcactacctagaggacatcctggccaagttgggcaagcaccagtacctgcaccggcaccggcaccatgagtctgaggatgaatgcgcactcgatttggaccttgtgactgatctggttctgcacatcgatgctcgcggggaaccaggtgggatcctgtgcttcctgcctgggtggcaggagatcaaaggagtgcagcagcgcctccaggaggccctgggcatgcacgagagcaagtacctcatcctgccagtgcactccaacatccccatgatggatcagaaggccatattccagcagcctccagttggggtgcgcaagattgtcttggccaccaacattgctgagacttccatcacaatcaatgacatcgtgcatgtggtggacagtgggctgcacaaggaagaacgctatgacctgaagaccaaggtgtcctgcctggagacagtgtgggtatcaagagccaatgtgatccagcgccggggccgggcgggccgctgccagtccggctttgcctaccacttgttccctcgaagccggctggagaaaatggtccctttccaagtgccagagatcctgcgcacacctcttgagaacctggtgctgcaagcgaaaatccacatgcctgagaagacggcggtggagttcctgtccaaggctgtggacagtccaaacatcaaggcagtggacgaggctgtgatcttgctccaggagatcggggtgctggaccagcgggagtacctgactaccctggggcagcgcctggctcacatctccaccgacccccggttggccaaggccattgtgttggctgccatcttccgttgcctgcacccactactggtggtcgtttcctgcctcacccgggaccccttcagcagcagcctacagaaccgggcagaggtggacaaggtgaaagcactgttgagccatgacagcggcagtgaccacctggcctttgtgcgggctgtcgccggctgggaggaggtgctgcgttggcaggaccgcagctcccgggagaattacctggaggaaaacctgctgtacgcacccagcctgcgcttcatccacggactcatcaagcagttctcagagaacatttatgaggccttcctggtggggaagccctcggactgcaccctggcctccgcccagtgcaacgagtacagtgaggaggaggagctggtgaagggcgtgctgatggccggcctctaccccaacctcatccaggtgaggcagggcaaggtcacccggcaggggaagttcaagcccaacagcgtcacatataggaccaaatcaggcaacatcctgctgcacaagtcgaccattaacagggaggccacacggttacggagccgatggctgacgtatttcatggcagtcaagtccaatggcagcgtcttcgtccgggactcctctcaggtgcacccgctagctgtgctgctgctgaccgacggggacgtgcacatccgtgatgacgggcgccgggccaccatctcactgagcgacagtgacctgctgcggctggagggtgactcgcgtaccgtgcggctgctgaaggagctgcggcgggccctgggccgcatggtggagcggagcctgcgcagcgagctggctgcacttccccccagcgtacaggaggagcacgggcagctgcttgcgctactggcagagctgctgcgaggaccctgtggcagctttgatgtgcgcaagacagctgacgactgagccctgcttctgctggggctgtgtacagagtgcaaatgtttatttaaaataaagttctatttatcccttgtg

SEQ ID NO: 125571 - DNA, 3660 bp, Homo sapiens
  Payload ID: 4616
  Gene Symbol: DHX30
  Gene Name: DEAH (Asp-Glu-Ala-His) box helicase 30
  Uniprot ID: Q7L2E3
  ENST ID: ENST00000446256
  CDS Start-End: 1-3585
atgttcagcctggactcattcagaaaagatcgggcccagcacaggcagcgtcagtgcaaacttcccccaccccgccttccacccatgtgtgtcaaccctaccccaggagggaccatctctcgagcttctagggacctattaaaagagttcccacagcccaaaaatcttctcaacagtgtgattggaagagccctcggcatctcacatgcaaaagacaaactagtctacgtgcacacaaatggaccgaagaaaaagaaagtcacactgcacataaaatggcccaagagcgtggaggtagaaggctatggcagcaagaagatcgatgctgagcggcaggctgcagctgcagcctgccagctgttcaagggttggggtctgctaggtccccggaatgagttgtttgacgcagccaaataccgagtgctagctgatcgctttggctcccctgccgacagctggtggcgtccggaacccaccatgccccctacttcctggcggcagctgaatccagagagtattcgaccagggggacctgggggcctatcccgctctttaggccgggaagaagaggaggacgaggaggaagagctagaagaagggaccatagatgttaccgacttcttgtccatgacccagcaggattcccacgctccactcagggactcaagggggagttcctttgagatgacagatgacgacagtgccattagggctctgacccagtttccacttcccaagaaccttctggccaaggtgattcagattgcaacgtcatcctccacagctaagaacctcatgcagttccatactgtgggcaccaagaccaagctgtctacactcaccctgctctggccctgccccatgacctttgttgccaaagggcgccgcaaagcagaggctgagaataaggcggcagccttggcctgcaagaaactgaagagcctgggcctggtggacaggaacaacgaaccgcttacacacgccatgtataacctggcctctttgcgtgagctgggtgagacccagcgccgaccatgcaccatccaggtgcccgagcccatcctccgcaagatagagaccttcctgaaccattaccctgtggagagttcatggatcgccccagaactccggctgcagagtgatgacatcttgcccttgggcaaggactcagggcctctgagtgaccctatcacaggcaagccctatgtgcccctgttggaagcagaggaggtacgtctcagccagagtctgctagaactgtggcggcggcgagggccggtctggcaggaggccccccagctacctgtggacccacatcgggacaccatcctcaacgccattgagcagcacccggtggtggtcatctctggggacacgggctgtgggaagaccacgcgcatcccccagctgttgctggagcgctatgtgaccgagggccgaggtgcccgctgcaatgttatcatcacccaacctcgccgcatctctgctgtgtctgtggcacagcgggtcagccacgaactgggcccctccctgcgccggaatgtgggcttccaggtgcggttggaaagtaagcccccatcccgaggcggggccctgctcttctgcactgtgggtatcctgctgcgtaagctgcagagcaaccccagcctggagggcgtgagccacgtcatcgtggatgaggtgcatgagcgggacgtgaacacagactttctgctgatcctgctcaagggcctgcagcggctcaacccggccctgcggctggtgctcatgagtgccacaggggacaatgagcgcttctcccgatactttggtggctgccccgtcatcaaggtgcctggcttcatgtacccagtcaaggagcactacctagaggacatcctggccaagttgggcaagcaccagtacctgcaccggcaccggcaccatgagtctgaggatgaatgcgcactcgatttggaccttgtgactgatctggttctgcacatcgatgctcgcggggaaccaggtgggatcctgtgcttcctgcctgggtggcaggagatcaaaggagtgcagcagcgcctccaggaggccctgggcatgcacgagagcaagtacctcatcctgccagtgcactccaacatccccatgatggatcagaaggccatattccagcagcctccagttggggtgcgcaagattgtcttggccaccaacattgctgagacttccatcacaatcaatgacatcgtgcatgtggtggacagtgggctgcacaaggaagaacgctatgacctgaagaccaaggtgtcctgcctggagacagtgtgggtatcaagagccaatgtgatccagcgccggggccgggcgggccgctgccagtccggctttgcctaccacttgttccctcgaagccggctggagaaaatggtccctttccaagtgccagagatcctgcgcacacctcttgagaacctggtgctgcaagcgaaaatccacatgcctgagaagacggcggtggagttcctgtccaaggctgtggacagtccaaacatcaaggcagtggacgaggctgtgatcttgctccaggagatcggggtgctggaccagcgggagtacctgactaccctggggcagcgcctggctcacatctccaccgacccccggttggccaaggccattgtgttggctgccatcttccgttgcctgcacccactactggtggtcgtttcctgcctcacccgggaccccttcagcagcagcctacagaaccgggcagaggtggacaaggtgaaagcactgttgagccatgacagcggcagtgaccacctggcctttgtgcgggctgtcgccggctgggaggaggtgctgcgttggcaggaccgcagctcccgggagaattacctggaggaaaacctgctgtacgcacccagcctgcgcttcatccacggactcatcaagcagttctcagagaacatttatgaggccttcctggtggggaagccctcggactgcaccctggcctccgcccagtgcaacgagtacagtgaggaggaggagctggtgaagggcgtgctgatggccggcctctaccccaacctcatccaggtgaggcagggcaaggtcacccggcaggggaagttcaagcccaacagcgtcacatataggaccaaatcaggcaacatcctgctgcacaagtcgaccattaacagggaggccacacggttacggagccgatggctgacgtatttcatggcagtcaagtccaatggcagcgtcttcgtccgggactcctctcaggtgcacccgctagctgtgctgctgctgaccgacggggacgtgcacatccgtgatgacgggcgccgggccaccatctcactgagcgacagtgacctgctgcggctggagggtgactcgcgtaccgtgcggctgctgaaggagctgcggcgggccctgggccgcatggtggagcggagcctgcgcagcgagctggctgcacttccccccagcgtacaggaggagcacgggcagctgcttgcgctactggcagagctgctgcgaggaccctgtggcagctttgatgtgcgcaagacagctgacgactgagccctgcttctgctggggctgtgtacagagtgcaaatgtttatttaaaataaagttctatttatcccttgtgacc

SEQ ID NO: 125572 - DNA, 3748 bp, Homo sapiens
  Payload ID: 4616
  Gene Symbol: DHX30
  Gene Name: DEAH (Asp-Glu-Ala-His) box helicase 30
  Uniprot ID: Q7L2E3
  ENST ID: ENST00000457607
  CDS Start-End: 13-3681
ggcgggagcacgatggcggccgctaggagactcatggcgctggccgccggcatctctccgcgcctgcagccgctgggtccccgcgctgctgggcgacagggtcgctcgcgcggcttctcttcaagctgcgcccaccccgaccacaccaaggaagccgccgaggccgagtcagggatggcccccggcgggcctggggaaggcgacggaagcttggtgaacgcttctagggacctattaaaagagttcccacagcccaaaaatcttctcaacagtgtgattggaagagccctcggcatctcacatgcaaaagacaaactagtctacgtgcacacaaatggaccgaagaaaaagaaagtcacactgcacataaaatggcccaagagcgtggaggtagaaggctatggcagcaagaagatcgatgctgagcggcaggctgcagctgcagcctgccagctgttcaagggttggggtctgctaggtccccggaatgagttgtttgacgcagccaaataccgagtgctagctgatcgctttggctcccctgccgacagctggtggcgtccggaacccaccatgccccctacttcctggcggcagctgaatccagagagtattcgaccagggggacctgggggcctatcccgctctttaggccgggaagaagaggaggacgaggaggaagagctagaagaagggaccatagatgttaccgacttcttgtccatgacccagcaggattcccacgctccactcagggactcaagggggagttcctttgagatgacagatgacgacagtgccattagggctctgacccagtttccacttcccaagaaccttctggccaaggtgattcagattgcaacgtcatcctccacagctaagaacctcatgcagttccatactgtgggcaccaagaccaagctgtctacactcaccctgctctggccctgccccatgacctttgttgccaaagggcgccgcaaagcagaggctgagaataaggcggcagccttggcctgcaagaaactgaagagcctgggcctggtggacaggaacaacgaaccgcttacacacgccatgtataacctggcctctttgcgtgagctgggtgagacccagcgccgaccatgcaccatccaggtgcccgagcccatcctccgcaagatagagaccttcctgaaccattaccctgtggagagttcatggatcgccccagaactccggctgcagagtgatgacatcttgcccttgggcaaggactcagggcctctgagtgaccctatcacaggcaagccctatgtgcccctgttggaagcagaggaggtacgtctcagccagagtctgctagaactgtggcggcggcgagggccggtctggcaggaggccccccagctacctgtggacccacatcgggacaccatcctcaacgccattgagcagcacccggtggtggtcatctctggggacacgggctgtgggaagaccacgcgcatcccccagctgttgctggagcgctatgtgaccgagggccgaggtgcccgctgcaatgttatcatcacccaacctcgccgcatctctgctgtgtctgtggcacagcgggtcagccacgaactgggcccctccctgcgccggaatgtgggcttccaggtgcggttggaaagtaagcccccatcccgaggcggggccctgctcttctgcactgtgggtatcctgctgcgtaagctgcagagcaaccccagcctggagggcgtgagccacgtcatcgtggatgaggtgcatgagcgggacgtgaacacagactttctgctgatcctgctcaagggcctgcagcggctcaacccggccctgcggctggtgctcatgagtgccacaggggacaatgagcgcttctcccgatactttggtggctgccccgtcatcaaggtgcctggcttcatgtacccagtcaaggagcactacctagaggacatcctggccaagttgggcaagcaccagtacctgcaccggcaccggcaccatgagtctgaggatgaatgcgcactcgatttggaccttgtgactgatctggttctgcacatcgatgctcgcggggaaccaggtgggatcctgtgcttcctgcctgggtggcaggagatcaaaggagtgcagcagcgcctccaggaggccctgggcatgcacgagagcaagtacctcatcctgccagtgcactccaacatccccatgatggatcagaaggccatattccagcagcctccagttggggtgcgcaagattgtcttggccaccaacattgctgagacttccatcacaatcaatgacatcgtgcatgtggtggacagtgggctgcacaaggaagaacgctatgacctgaagaccaaggtgtcctgcctggagacagtgtgggtatcaagagccaatgtgatccagcgccggggccgggcgggccgctgccagtccggctttgcctaccacttgttccctcgaagccggctggagaaaatggtccctttccaagtgccagagatcctgcgcacacctcttgagaacctggtgctgcaagcgaaaatccacatgcctgagaagacggcggtggagttcctgtccaaggctgtggacagtccaaacatcaaggcagtggacgaggctgtgatcttgctccaggagatcggggtgctggaccagcgggagtacctgactaccctggggcagcgcctggctcacatctccaccgacccccggttggccaaggccattgtgttggctgccatcttccgttgcctgcacccactactggtggtcgtttcctgcctcacccgggaccccttcagcagcagcctacagaaccgggcagaggtggacaaggtgaaagcactgttgagccatgacagcggcagtgaccacctggcctttgtgcgggctgtcgccggctgggaggaggtgctgcgttggcaggaccgcagctcccgggagaattacctggaggaaaacctgctgtacgcacccagcctgcgcttcatccacggactcatcaagcagttctcagagaacatttatgaggccttcctggtggggaagccctcggactgcaccctggcctccgcccagtgcaacgagtacagtgaggaggaggagctggtgaagggcgtgctgatggccggcctctaccccaacctcatccaggtgaggcagggcaaggtcacccggcaggggaagttcaagcccaacagcgtcacatataggaccaaatcaggcaacatcctgctgcacaagtcgaccattaacagggaggccacacggttacggagccgatggctgacgtatttcatggcagtcaagtccaatggcagcgtcttcgtccgggactcctctcaggtgcacccgctagctgtgctgctgctgaccgacggggacgtgcacatccgtgatgacgggcgccgggccaccatctcactgagcgacagtgacctgctgcggctggagggtgactcgcgtaccgtgcggctgctgaaggagctgcggcgggccctgggccgcatggtggagcggagcctgcgcagcgagctggctgcacttccccccagcgtacaggaggagcacgggcagctgcttgcgctactggcagagctgctgcgaggaccctgtggcagctttgatgtgcgcaagacagctgacgactgagccctgcttctgctggggctgtgtacagagtgcaaatgtttatttaaaataaagttctatttatccc

SEQ ID NO: 125573 - DNA, 613 bp, Homo sapiens
  Payload ID: 4616
  Gene Symbol: DHX30
  Gene Name: DEAH (Asp-Glu-Ala-His) box helicase 30
  ENST ID: ENST00000415400
  CDS Start-End: 229-357
ggaaggggccgcgccgccgctgctgggagttgtagtccggccgtggttgggggagccgcggctcatgcgcggtgcacagaggcttgtttcacatctgtaacaacaggaggaggcccagcctcgtgatgaggaatagcaaggagagaattcagctccagttcaaaagcctacaaaatctgagactgtcattgcttttataaggattccagctttccctcctggccagaaatgttcagcctggactcattcagaaaagatcgggcccagcacaggcagcgtcagtgcaaacttcccccaccccgccttccacccatgtgtgtcaaccctaccccaggagggaccatctctcgaggctgaacgttaacatttccaacatggcaggcaggggtctggatttggtctgcaggctgtagttttccaactcctgctctagaccagtgaggagaagaacacagaagcagaagagttccaagagctgctgtaaagagttgcccttatcttacaagagtcattgagcctcattccatcttcctgccttccatccacacgactgctggtttagatttgctggagagtgagctctgcagggtcctagccctgggcagcgccgagc

SEQ ID NO: 125574 - DNA, 4065 bp, Homo sapiens
  Payload ID: 4616
  Gene Symbol: DHX30
  Gene Name: DEAH (Asp-Glu-Ala-His) box helicase 30
  Uniprot ID: Q7L2E3
  ENST ID: ENST00000445061
  CDS Start-End: 408-3992
gccccattgggccgggtgctggggcatcccgggcgctgggtgccccgagcggctacgacgagtcccaggtggggccgggctccaggcccgcgggggagcggagccgtgcgccgcaggcgggctccgtgacgccgggtggggaacgccgggccggtggcgggacttccgccacgggactcggaaggggccgcgccgccgctgctgggagttgtagtccggccgtggttgggggagccgcggctcatgcgcggtgcacagaggcttgtttcacatctgtaacaacaggaggaggcccagcctcgtgatgaggaatagcaaggagagaattcagctccagttcaaaagcctacaaaatctgagactgtcattgcttttataaggattccagctttccctcctggccagaaatgttcagcctggactcattcagaaaagatcgggcccagcacaggcagcgtcagtgcaaacttcccccaccccgccttccacccatgtgtgtcaaccctaccccaggagggaccatctctcgagcttctagggacctattaaaagagttcccacagcccaaaaatcttctcaacagtgtgattggaagagccctcggcatctcacatgcaaaagacaaactagtctacgtgcacacaaatggaccgaagaaaaagaaagtcacactgcacataaaatggcccaagagcgtggaggtagaaggctatggcagcaagaagatcgatgctgagcggcaggctgcagctgcagcctgccagctgttcaagggttggggtctgctaggtccccggaatgagttgtttgacgcagccaaataccgagtgctagctgatcgctttggctcccctgccgacagctggtggcgtccggaacccaccatgccccctacttcctggcggcagctgaatccagagagtattcgaccagggggacctgggggcctatcccgctctttaggccgggaagaagaggaggacgaggaggaagagctagaagaagggaccatagatgttaccgacttcttgtccatgacccagcaggattcccacgctccactcagggactcaagggggagttcctttgagatgacagatgacgacagtgccattagggctctgacccagtttccacttcccaagaaccttctggccaaggtgattcagattgcaacgtcatcctccacagctaagaacctcatgcagttccatactgtgggcaccaagaccaagctgtctacactcaccctgctctggccctgccccatgacctttgttgccaaagggcgccgcaaagcagaggctgagaataaggcggcagccttggcctgcaagaaactgaagagcctgggcctggtggacaggaacaacgaaccgcttacacacgccatgtataacctggcctctttgcgtgagctgggtgagacccagcgccgaccatgcaccatccaggtgcccgagcccatcctccgcaagatagagaccttcctgaaccattaccctgtggagagttcatggatcgccccagaactccggctgcagagtgatgacatcttgcccttgggcaaggactcagggcctctgagtgaccctatcacaggcaagccctatgtgcccctgttggaagcagaggaggtacgtctcagccagagtctgctagaactgtggcggcggcgagggccggtctggcaggaggccccccagctacctgtggacccacatcgggacaccatcctcaacgccattgagcagcacccggtggtggtcatctctggggacacgggctgtgggaagaccacgcgcatcccccagctgttgctggagcgctatgtgaccgagggccgaggtgcccgctgcaatgttatcatcacccaacctcgccgcatctctgctgtgtctgtggcacagcgggtcagccacgaactgggcccctccctgcgccggaatgtgggcttccaggtgcggttggaaagtaagcccccatcccgaggcggggccctgctcttctgcactgtgggtatcctgctgcgtaagctgcagagcaaccccagcctggagggcgtgagccacgtcatcgtggatgaggtgcatgagcgggacgtgaacacagactttctgctgatcctgctcaagggcctgcagcggctcaacccggccctgcggctggtgctcatgagtgccacaggggacaatgagcgcttctcccgatactttggtggctgccccgtcatcaaggtgcctggcttcatgtacccagtcaaggagcactacctagaggacatcctggccaagttgggcaagcaccagtacctgcaccggcaccggcaccatgagtctgaggatgaatgcgcactcgatttggaccttgtgactgatctggttctgcacatcgatgctcgcggggaaccaggtgggatcctgtgcttcctgcctgggtggcaggagatcaaaggagtgcagcagcgcctccaggaggccctgggcatgcacgagagcaagtacctcatcctgccagtgcactccaacatccccatgatggatcagaaggccatattccagcagcctccagttggggtgcgcaagattgtcttggccaccaacattgctgagacttccatcacaatcaatgacatcgtgcatgtggtggacagtgggctgcacaaggaagaacgctatgacctgaagaccaaggtgtcctgcctggagacagtgtgggtatcaagagccaatgtgatccagcgccggggccgggcgggccgctgccagtccggctttgcctaccacttgttccctcgaagccggctggagaaaatggtccctttccaagtgccagagatcctgcgcacacctcttgagaacctggtgctgcaagcgaaaatccacatgcctgagaagacggcggtggagttcctgtccaaggctgtggacagtccaaacatcaaggcagtggacgaggctgtgatcttgctccaggagatcggggtgctggaccagcgggagtacctgactaccctggggcagcgcctggctcacatctccaccgacccccggttggccaaggccattgtgttggctgccatcttccgttgcctgcacccactactggtggtcgtttcctgcctcacccgggaccccttcagcagcagcctacagaaccgggcagaggtggacaaggtgaaagcactgttgagccatgacagcggcagtgaccacctggcctttgtgcgggctgtcgccggctgggaggaggtgctgcgttggcaggaccgcagctcccgggagaattacctggaggaaaacctgctgtacgcacccagcctgcgcttcatccacggactcatcaagcagttctcagagaacatttatgaggccttcctggtggggaagccctcggactgcaccctggcctccgcccagtgcaacgagtacagtgaggaggaggagctggtgaagggcgtgctgatggccggcctctaccccaacctcatccaggtgaggcagggcaaggtcacccggcaggggaagttcaagcccaacagcgtcacatataggaccaaatcaggcaacatcctgctgcacaagtcgaccattaacagggaggccacacggttacggagccgatggctgacgtatttcatggcagtcaagtccaatggcagcgtcttcgtccgggactcctctcaggtgcacccgctagctgtgctgctgctgaccgacggggacgtgcacatccgtgatgacgggcgccgggccaccatctcactgagcgacagtgacctgctgcggctggagggtgactcgcgtaccgtgcggctgctgaaggagctgcggcgggccctgggccgcatggtggagcggagcctgcgcagcgagctggctgcacttccccccagcgtacaggaggagcacgggcagctgcttgcgctactggcagagctgctgcgaggaccctgtggcagctttgatgtgcgcaagacagctgacgactgagccctgcttctgctggggctgtgtacagagtgcaaatgtttatttaaaataaagttctatttatcccttgtga

SEQ ID NO: 125575 - DNA, 1957 bp, Homo sapiens
  Payload ID: 4616
  Gene Symbol: DHX30
  Gene Name: DEAH (Asp-Glu-Ala-His) box helicase 30
  ENST ID: ENST00000441384
  CDS Start-End: 198-326
gtagtccggccgtggttgggggagccgcggctcatgcgcggtgcacagaggcttgtttcacatctgtaacaacaggaggaggcccagcctcgtgatgaggaatagcaaggagagaattcagctccagttcaaaagcctacaaaatctgagactgtcattgcttttataaggattccagctttccctcctggccagaaatgttcagcctggactcattcagaaaagatcgggcccagcacaggcagcgtcagtgcaaacttcccccaccccgccttccacccatgtgtgtcaaccctaccccaggagggaccatctctcgaggctgaacgttaacatttccaacatggcagcttctagggacctattaaaagagttcccacagcccaaaaatcttctcaacagtgtgattggaagagccctcggcatctcacatgcaaaagacaaactagtctacgtgcacacaaatggaccgaagaaaaagaaagtcacactgcacataaaatggcccaagagcgtggaggtagaaggctatggcagcaagaagatcgatgctgagcggcaggctgcagctgcagcctgccagctgttcaagggttggggtctgctaggtccccggaatgagttgtttgacgcagccaaataccgagtgctagctgatcgctttggctcccctgccgacagctggtggcgtccggaacccaccatgccccctacttcctggcggcagctgaatccagagagtattcgaccagggggacctgggggcctatcccgctctttaggccgggaagaagaggaggacgaggaggaagagctagaagaagggaccatagatgttaccgacttcttgtccatgacccagcaggattcccacgctccactcagggactcaagggggagttcctttgagatgacagatgacgacagtgccattagggctctgacccagtttccacttcccaagaaccttctggccaaggtgattcagattgcaacgtcatcctccacagctaaggtgagttgggtctcctagaagtttgtgtgggggccgtttacttggtcatgtctggtgttccctaaaggcaggtttagagagggctgagggggtgtgttcctccagcccaaacctaggccaggtggaggaactcctgcttgggaggaaaagcagcaggtgtgatggaatggaggtcaagcctcagcagcacagggagtgggcttgggggccgcaagagcagaagacccatacctcttctgggcggtggattgtcagtggggaagggttagaggtgtgggtcttggtgaggtatgaatttctctcttgctgccaggcgaaggggctttggtcatgaaatgcctaaccttgtttttactttaactcgttgctttgaattttgtcctgcttgtctctttaatcacctagccttgcttctcatgtaaaataagactctctctagctaagaaagccgtacaaaccccaattgaccccttaatttacaagacactaagggctcctcacccaaccccctttcgtaaggagttggcctgggtaaacagatcctcagcatttcaaaggagcctaattaactgataaggtacgaacaccaacaatatatgaagttcccaggaattttctccaagagataacaacataaaaccttgagttcgtgtctggcgtagaccctatatctaattataatgaaagatttagaatcttgcacctggtactgttgctcttcttgtaaccatttgtcttttaagttgtttatcactctgtaaccattttgattcttttgattcttgcatgtttttacttctgtagaattattacatttaagtccccctccccttcctaaacctaagtataaaagttaatcgagccccttcctcgtggccgaaagaattttgagcattagctgtctctttggccgccggcttaataaaggactcttaattcgtc

SEQ ID NO: 125576 - DNA, 3574 bp, Homo sapiens
  Payload ID: 4616
  Gene Symbol: DHX30
  Gene Name: DEAH (Asp-Glu-Ala-His) box helicase 30
  Uniprot ID: Q7L2E3
  ENST ID: ENST00000619982
  CDS Start-End: 32-3499
ctcgaaaaggctgaacgttaacatttccaacatggcagcttctagggacctattaaaagagttcccacagcccaaaaatcttctcaacagtgtgattggaagagccctcggcatctcacatgcaaaagacaaactagtctacgtgcacacaaatggaccgaagaaaaagaaagtcacactgcacataaaatggcccaagagcgtggaggtagaaggctatggcagcaagaagatcgatgctgagcggcaggctgcagctgcagcctgccagctgttcaagggttggggtctgctaggtccccggaatgagttgtttgacgcagccaaataccgagtgctagctgatcgctttggctcccctgccgacagctggtggcgtccggaacccaccatgccccctacttcctggcggcagctgaatccagagagtattcgaccagggggacctgggggcctatcccgctctttaggccgggaagaagaggaggacgaggaggaagagctagaagaagggaccatagatgttaccgacttcttgtccatgacccagcaggattcccacgctccactcagggactcaagggggagttcctttgagatgacagatgacgacagtgccattagggctctgacccagtttccacttcccaagaaccttctggccaaggtgattcagattgcaacgtcatcctccacagctaagaacctcatgcagttccatactgtgggcaccaagaccaagctgtctacactcaccctgctctggccctgccccatgacctttgttgccaaagggcgccgcaaagcagaggctgagaataaggcggcagccttggcctgcaagaaactgaagagcctgggcctggtggacaggaacaacgaaccgcttacacacgccatgtataacctggcctctttgcgtgagctgggtgagacccagcgccgaccatgcaccatccaggtgcccgagcccatcctccgcaagatagagaccttcctgaaccattaccctgtggagagttcatggatcgccccagaactccggctgcagagtgatgacatcttgcccttgggcaaggactcagggcctctgagtgaccctatcacaggcaagccctatgtgcccctgttggaagcagaggaggtacgtctcagccagagtctgctagaactgtggcggcggcgagggccggtctggcaggaggccccccagctacctgtggacccacatcgggacaccatcctcaacgccattgagcagcacccggtggtggtcatctctggggacacgggctgtgggaagaccacgcgcatcccccagctgttgctggagcgctatgtgaccgagggccgaggtgcccgctgcaatgttatcatcacccaacctcgccgcatctctgctgtgtctgtggcacagcgggtcagccacgaactgggcccctccctgcgccggaatgtgggcttccaggtgcggttggaaagtaagcccccatcccgaggcggggccctgctcttctgcactgtgggtatcctgctgcgtaagctgcagagcaaccccagcctggagggcgtgagccacgtcatcgtggatgaggtgcatgagcgggacgtgaacacagactttctgctgatcctgctcaagggcctgcagcggctcaacccggccctgcggctggtgctcatgagtgccacaggggacaatgagcgcttctcccgatactttggtggctgccccgtcatcaaggtgcctggcttcatgtacccagtcaaggagcactacctagaggacatcctggccaagttgggcaagcaccagtacctgcaccggcaccggcaccatgagtctgaggatgaatgcgcactcgatttggaccttgtgactgatctggttctgcacatcgatgctcgcggggaaccaggtgggatcctgtgcttcctgcctgggtggcaggagatcaaaggagtgcagcagcgcctccaggaggccctgggcatgcacgagagcaagtacctcatcctgccagtgcactccaacatccccatgatggatcagaaggccatattccagcagcctccagttggggtgcgcaagattgtcttggccaccaacattgctgagacttccatcacaatcaatgacatcgtgcatgtggtggacagtgggctgcacaaggaagaacgctatgacctgaagaccaaggtgtcctgcctggagacagtgtgggtatcaagagccaatgtgatccagcgccggggccgggcgggccgctgccagtccggctttgcctaccacttgttccctcgaagccggctggagaaaatggtccctttccaagtgccagagatcctgcgcacacctcttgagaacctggtgctgcaagcgaaaatccacatgcctgagaagacggcggtggagttcctgtccaaggctgtggacagtccaaacatcaaggcagtggacgaggctgtgatcttgctccaggagatcggggtgctggaccagcgggagtacctgactaccctggggcagcgcctggctcacatctccaccgacccccggttggccaaggccattgtgttggctgccatcttccgttgcctgcacccactactggtggtcgtttcctgcctcacccgggaccccttcagcagcagcctacagaaccgggcagaggtggacaaggtgaaagcactgttgagccatgacagcggcagtgaccacctggcctttgtgcgggctgtcgccggctgggaggaggtgctgcgttggcaggaccgcagctcccgggagaattacctggaggaaaacctgctgtacgcacccagcctgcgcttcatccacggactcatcaagcagttctcagagaacatttatgaggccttcctggtggggaagccctcggactgcaccctggcctccgcccagtgcaacgagtacagtgaggaggaggagctggtgaagggcgtgctgatggccggcctctaccccaacctcatccaggtgaggcagggcaaggtcacccggcaggggaagttcaagcccaacagcgtcacatataggaccaaatcaggcaacatcctgctgcacaagtcgaccattaacagggaggccacacggttacggagccgatggctgacgtatttcatggcagtcaagtccaatggcagcgtcttcgtccgggactcctctcaggtgcacccgctagctgtgctgctgctgaccgacggggacgtgcacatccgtgatgacgggcgccgggccaccatctcactgagcgacagtgacctgctgcggctggagggtgactcgcgtaccgtgcggctgctgaaggagctgcggcgggccctgggccgcatggtggagcggagcctgcgcagcgagctggctgcacttccccccagcgtacaggaggagcacgggcagctgcttgcgctactggcagagctgctgcgaggaccctgtggcagctttgatgtgcgcaagacagctgacgactgagccctgcttctgctggggctgtgtacagagtgcaaatgtttatttaaaataaagttctatttatcccttgtgacc

SEQ ID NO: 125577 - DNA, 4240 bp, Homo sapiens
  Payload ID: 4617
  Gene Symbol: DHX9
  Gene Name: DEAH (Asp-Glu-Ala-His) box helicase 9
  Uniprot ID: Q08211
  ENST ID: ENST00000367549
  CDS Start-End: 111-3923
gcgagttgctgtgcgtttctctgttgtctcggtagaaggccagagtcacacacggtcctaagagctgggcaccaggaagcgaaggctgatctgaagaagacacttgaatcatgggtgacgttaaaaattttctgtatgcctggtgtggcaaaaggaagatgaccccatcctatgaaattagagcagtggggaacaaaaacaggcagaaattcatgtgtgaggttcaggtggaaggttataattacactggcatgggaaattccaccaataaaaaagatgcacaaagcaatgctgccagagactttgttaactatttggttcgaataaatgaaataaagagtgaagaagttccagcttttggggtagcatctccgcccccacttactgatactcctgacactacagcaaatgctgaaggagatttaccaacaaccatgggaggacctcttcctccacatctggctctcaaagcagaaaataattctgaggtaggggcctctggctatggtgttcctgggcccacctgggaccgaggagccaacttgaaggattactactcaagaaaggaagaacaagaagtgcaagcgactctagaatcagaagaagtggatttaaatgctgggcttcatggaaactggaccttggaaaatgctaaagctcgtctaaaccaatattttcagaaagaaaagatccaaggagaatataagtacacccaagtgggtcctgatcacaacaggagctttattgcagaaatgaccatttatatcaagcagctgggcagaaggatttttgcacgagaacatggatcaaataagaaattggcagcacagtcctgtgccctgtcacttgtcagacaactgtaccatcttggagtggttgaagcttactccggacttacaaagaagaaggaaggagagacagtggagccttacaaagtaaacctctctcaagatttagagcatcagctgcaaaacatcattcaagagctaaatcttgagattttgcccccgcctgaagatccttctgtgccagttgcactcaacattggcaaattggctcagttcgaaccatctcagcgacaaaaccaagtgggtgtggttccttggtcacctccacaatccaactggaatccttggactagtagcaacattgatgaggggcctctggcttttgctactccagagcaaataagcatggacctcaagaatgaattgatgtaccagttggaacaggatcatgatttgcaagcaatcttgcaggagagagagttactgcctgtgaagaaatttgaaagtgagattctggaagcaatcagccaaaattcagttgtcattattagaggggctactggatgtgggaaaaccacacaggttccccagttcattctagatgactttatccagaatgaccgagcagcagagtgtaacatcgtagtaactcagcccagaagaatcagtgcggtttctgtggcagagcgagttgcatttgaaagaggagaagagcctggaaaaagctgtggctacagcgttcgatttgagtctatacttcctcgtcctcatgccagtataatgttttgtactgtaggtgtgctcctgagaaaattagaagcaggcattcgaggaatcagtcatgtaattgtagatgaaatacatgaaagagatattaatactgacttccttttggtagtactgcgtgatgttgttcaggcttatcctgaagttcgcattgttcttatgtctgctactattgataccagcatgttttgtgaatatttcttcaattgccccatcattgaagtttatgggaggacttacccagttcaagaatattttctggaagactgcattcagatgacccactttgttcctccaccaaaagacaaaaagaagaaggataaggatgatgatggtggtgaggatgatgatgcaaattgcaacttgatctgtggtgatgaatatggtccagaaacaaggttgagcatgtctcaattgaacgaaaaggaaactccttttgaactcatcgaggctctacttaagtacattgaaacccttaatgttcctggagctgtgttggtttttttgcctggctggaatctgatttatactatgcagaagcatttggaaatgaatccacattttggaagccatcggtatcagattctacccctgcattctcagattcctcgagaggaacagcgcaaagtgtttgatccagtaccagttggagtaaccaaggttattttgtccacaaatattgctgaaacaagcattaccataaacgatgttgtttatgtcattgactcctgcaagcagaaagtgaaactcttcactgctcacaacaatatgaccaactatgctaccgtatgggcatcaaaaacaaaccttgagcaacggaaagggcgagctggccgagtacggcctggattctgctttcacctgtgcagccgagctcgttttgagagacttgaaacccacatgacaccagagatgttccgaacaccattgcatgaaattgctcttagcataaaacttctgcgtctaggaggaattggccaatttctggccaaagcaattgaacctccccctttggatgctgtgattgaagcagaacacactcttagagagcttgatgcattagatgccaatgatgagttgactcctttgggacgaatcctggctaaactccccattgagcctcgttttggcaaaatgatgataatggggtgtattttctacgtgggagatgctatctgtaccattgctgctgctacctgctttccagagcctttcatcaatgaaggaaagcggctgggctatatccatcgaaattttgctggaaacagattttctgatcacgtagcccttttatcagtattccaagcctgggatgatgctagaatgggtggagaagaagcagagatacgtttttgtgagcacaaaagacttaatatggctacactaagaatgacttgggaagccaaagttcagctcaaagagattttgattaattctgggtttccagaagattgtttgttgacacaagtgtttactaacactggaccagataataatttggatgttgttatctccctcctggcctttggtgtgtaccccaatgtatgctatcataaggaaaagaggaagattctcaccactgaagggcgtaatgcacttatccacaaatcatctgttaattgtccttttagtagccaagacatgaagtacccatctcccttctttgtatttggtgaaaagattcgaactcgagccatctctgctaaaggcatgactttagtcacccccctgcagttgcttctctttgcctccaagaaagtccaatctgatgggcagattgtgcttgtagatgactggattaaactgcaaatatctcatgaagctgctgcctgtatcactggtctccgggcagccatggaggctttggttgttgaagtaaccaaacaacctgctatcatcagccagttggaccccgtaaatgaacgtatgctgaacatgatccgtcagatctctagaccctcagctgctggtatcaaccttatgattggcagtacacggtatggagatggtccacgtcctcccaagatggcccgatacgacaatggaagcggatatagaaggggaggttctagttacagtggtggaggctatggcggtggctatagcagtggaggctatggtagcggaggctatggtggcagcgccaactcctttcgggcaggatatggtgcaggtgttggtggaggctatagaggagtttcccgaggtggctttagaggcaactctggaggagactacagagggcctagtggaggctacagaggatctgggggattccagcgaggaggtggtaggggggcctatggaactggctactttggacagggaagaggaggtggcggctattaaaacttggttatgtcagttcctgtgtgtagacagtaaggaaaaaaaggcatgctatgtgttacgtgttttttccagtatgtttatttgccaccaaaaagtaaatgcattttcacccattctgtggttcattgtagtttaaggaaaccaagcatatagatgcattagtgattttgtttatattatgtaaaatataacgatctcttaaaaataccacagtttgtattttttctttaaggagtaaagatttgcctttaaataacttggtattttcctggctttcgtttaatacaatagaaaataaagtattacaccgaata

SEQ ID NO: 125578 - DNA, 1933 bp, Homo sapiens
  Payload ID: 4618
  Gene Symbol: DHX16
  Gene Name: DEAH (Asp-Glu-Ala-His) box polypeptide 16
  ENST ID: ENST00000376437
  CDS Start-End: 128-1810
ctgaacaatatgtgcctttttgactcttcagaggctgtgaatttctggtcttggaagatcacagtggagcaattggacagataggattttatccttcatatcccttgcaaaagatctctaagaacccatggagagccagccagcgcaagagtgtctgatgcagatgtttttgcccatcgagccagcctgctttgtggaatggctggggacttcaccatcacagttaggcgtggtgatggtggatgaggcacacgaaaggaccctacacacagacattctctttggattgatcaaggatgttgctcgcttccgacctgagctcaaggtcctggtggcttcagccacaatggacactgcccgtttttccaccttctttgatgacgcccctgtgtttcgaatccccggacgcaggtttcctgtggacatcttctacaccaaggctccagaggctgactacttggaagcttgtgtagtatctgtgttgcagatccatgtgacccagccccctggggatatcctggtgttcctgacaggacaggaggagattgaggctgcctgtgagatgctccaggatcgctgccgccgcctgggctccaaaatccgggagctcctggtgctgcccatttatgccaatctgccctctgacatgcaggcccgtatcttccagcccacaccacctggggcacgaaaggtggttgtggcaacgaacattgctgagacatcactcaccattgagggcatcatttatgtgctggatccagggttctgtaagcagaagagctacaacccccgcacaggcatggaatcgctcactgtcacaccctgcagcaaggcctcagccaatcagcgagctggcagggcaggtcgggtggctgcagggaagtgcttccgcctgtataccgcctgggcctatcagcacgagcttgaggaaaccacagtgcctgagatccagaggaccagcttgggcaatgtcgtgttgctgctcaagagcttagggatccatgacctaatgcactttgatttcctggaccctccaccatatgagacactgctgctggctttggagcagctgtatgctctgggagccctcaaccaccttggggagctcaccacgtctggtcgaaagatggcagagctgccggtggaccccatgctgtccaaaatgatcttagcctctgagaagtacagctgttcagaggagatcctgacagtggctgccatgctctctgtcaacaactccatcttctaccgaccaaaggacaaggtcgtccatgctgacaatgcccgtgtcaacttctttctccctggcggtgaccacctggttctgctaaatgtttacacacagtgggctgagagtggttactcttcccagtggtgctatgagaactttgtacagttcagatcgatgcgccgagcccgggatgtgcgggaacagctggaagggctcttggaacgtgtggaagttggtctcagttcctgccagggggactatatccgtgtacgcaaggccatcactgctggttacttttaccacacggcacggttgactcggagtggctaccgcacagtgaaacagcagcagacagtcttcattcatcccaactcctccctctttgagcaacagccacgctggctgctctaccacgaacttgtcttgaccaccaaagagttcatgagacaggtactggagattgagagcagttggcttctggaggtggctccccattattataaggccaaggagctagaagatccccatgctaagaaaatgcccaaaaaaataggcaaaacacgagaagagctagggtaagagaaggacgtaaacagaacctgacaccagctccttttccttctatacattatttaatacctattaaataaaattatttttggaataaagcttgtgggaacatttgggatctagagaaagtga

SEQ ID NO: 125579 - DNA, 3445 bp, Homo sapiens
  Payload ID: 4618
  Gene Symbol: DHX16
  Gene Name: DEAH (Asp-Glu-Ala-His) box polypeptide 16
  Uniprot ID: O60231
  ENST ID: ENST00000376442
  CDS Start-End: 197-3322
ggccgaaaaagtacagccccttccgggctccgcggtacgggaagacagctttgggatgtcggaagatcctagaggtcccaaggtagctgacttgcgaagctgaggctccagccgagggctccaggcctctgaccggcccagcagtgagcgcggctgcccgacgcttcagggccgggagcagggagcgtgagtcgccatggcgacgccggcgggtctggagcgctgggttcaggacgagctgcactcggtgttggggctgagcgagcggcacgtcgcccagtttctgatcggtaccgcacagcgctgcacctctgccgaggagttcgtgcagcgcctacgagacactgataccttggatctcagtgggccggcccgggacttcgccctgagactctggaacaaggtaccacgaaaggcagtggtagaaaagccagctcgggcagcagagcgagaggcccgggccctgctggagaagaaccgatcttataggttactggaagacagtgaagagagcagtgaggagactgtgagtagggctggaagcagcctccagaagaaacgtaaaaagcggaaacacctcaggaagaagcgtgaggaagaagaggaggaagaggcttctgagaaagggaagaagaaaacaggggggagtaaacagcagacagagaagccagagtcggaagatgagtgggaacggacagagcgtgaacgccttcaggacctggaggagcgtgatgcctttgctgagcgggttcgacagcgggacaaggatcggactcgaaatgtcctggaacggtcagacaagaaggcttatgaagaggctcagaagcgcctcaagatggccgaggaagaccggaaggccatggtccctgagctgcggaagaaatctcgccgagagtacctggctaagcgggagcgagagaagcttgaggacctggaggcggagctggctgatgaggagttcctttttggggacgtggagctgagccggcacgagcggcaggagctcaaatataagcggcgagtgcgggatctcgcccgggagtaccgggcagctggggagcaggagaagctggaggccaccaatcgctaccacatgcccaaggaaacccgaggacagccagcccgagctgtggatctagtggaggaggaatcaggagcccctggggaggagcagcggcgctgggaggaggcgcggcttggggcagcgtccctgaagtttggggcccgagatgctgcctctcaggagcccaagtatcaactggtgctggaggaggaggagaccattgagtttgtccgggccactcagctccagggtgatgaggagccgtcagctccacccacttcaactcaggcccagcagaaagagtccatccaggccgtccgccgcagcctcccggtgttcccatttcgagaggagctcctggctgctattgcaaatcaccaagtcctcatcattgaaggcgagacaggctcagggaagaccacccagatcccgcagtatctctttgaggagggttatacaaacaagggtatgaagattgcctgcacccaaccccggagagtggctgccatgagtgtggccgcccgagtggcccgggagatgggtgtgaagcttgggaatgaggttggctacagcatccgctttgaggactgcacatcagagcgaactgtcctccgctacatgacagatgggatgcttctccgggagttcctctctgagcctgacctggcgagttacagcgtggtgatggtggatgaggcacacgaaaggaccctacacacagacattctctttggattgatcaaggatgttgctcgcttccgacctgagctcaaggtcctggtggcttcagccacaatggacactgcccgtttttccaccttctttgatgacgcccctgtgtttcgaatccccggacgcaggtttcctgtggacatcttctacaccaaggctccagaggctgactacttggaagcttgtgtagtatctgtgttgcagatccatgtgacccagccccctggggatatcctggtgttcctgacaggacaggaggagattgaggctgcctgtgagatgctccaggatcgctgccgccgcctgggctccaaaatccgggagctcctggtgctgcccatttatgccaatctgccctctgacatgcaggcccgtatcttccagcccacaccacctggggcacgaaaggtggttgtggcaacgaacattgctgagacatcactcaccattgagggcatcatttatgtgctggatccagggttctgtaagcagaagagctacaacccccgcacaggcatggaatcgctcactgtcacaccctgcagcaaggcctcagccaatcagcgagctggcagggcaggtcgggtggctgcagggaagtgcttccgcctgtataccgcctgggcctatcagcacgagcttgaggaaaccacagtgcctgagatccagaggaccagcttgggcaatgtcgtgttgctgctcaagagcttagggatccatgacctaatgcactttgatttcctggaccctccaccatatgagacactgctgctggctttggagcagctgtatgctctgggagccctcaaccaccttggggagctcaccacgtctggtcgaaagatggcagagctgccggtggaccccatgctgtccaaaatgatcttagcctctgagaagtacagctgttcagaggagatcctgacagtggctgccatgctctctgtcaacaactccatcttctaccgaccaaaggacaaggtcgtccatgctgacaatgcccgtgtcaacttctttctccctggcggtgaccacctggttctgctaaatgtttacacacagtgggctgagagtggttactcttcccagtggtgctatgagaactttgtacagttcagatcgatgcgccgagcccgggatgtgcgggaacagctggaagggctcttggaacgtgtggaagttggtctcagttcctgccagggggactatatccgtgtacgcaaggccatcactgctggttacttttaccacacggcacggttgactcggagtggctaccgcacagtgaaacagcagcagacagtcttcattcatcccaactcctccctctttgagcaacagccacgctggctgctctaccacgaacttgtcttgaccaccaaagagttcatgagacaggtactggagattgagagcagttggcttctggaggtggctccccattattataaggccaaggagctagaagatccccatgctaagaaaatgcccaaaaaaataggcaaaacacgagaagagctagggtaagagaaggacgtaaacagaacctgacaccagctccttttccttctatacattatttaatacctattaaataaaattatttttggaataaagcttgtgggaacatttgggatctagagaaagtga

SEQ ID NO: 125580 - DNA, 1933 bp, Homo sapiens
  Payload ID: 4618
  Gene Symbol: DHX16
  Gene Name: DEAH (Asp-Glu-Ala-His) box polypeptide 16
  ENST ID: ENST00000383576
  CDS Start-End: 128-1810
ctgaacaatatgtgcctttttgactcttcagaggctgtgaatttctggtcttggaagatcacagtggagcaattggacagataggattttatccttcatatcccttgcaaaagatctctaagaacccatggagagccagccagcgcaagagtgtctgatgcagatgtttttgcccatcgagccagcctgctttgtggaatggctggggacttcaccatcacagttaggcgtggtgatggtggatgaggcacacgaaaggaccctacacacagacattctctttggattgatcaaggatgttgctcgcttccgacctgagctcaaggtcctggtggcttcagccacaatggacactgcccgtttttccaccttctttgatggcgcccctgtgtttcgaatccccggacgcaggtttcctgtggacatcttctacaccaaggctccagaggctgactacttggaagcttgtgtagtatctgtgttgcagatccatgtgacccagccccctggggatatcctggtgttcctgacaggacaggaggagattgaggctgcctgtgagatgctccaggatcgctgccgccgcctgggctccaaaatccgggagctcctggtgctgcccatttatgccaatctgccctctgacatgcaggcccgtatcttccagcccacaccacctggggcacgaaaggtggttgtggcaacgaacattgctgagacatcactcaccattgagggcatcatttatgtgctggatccagggttctgtaagcagaagagctacaacccccgcacaggcatggaatcgctcactgtcacaccctgcagcaaggcctcagccaatcagcgagctggcagggcaggtcgggtggctgcagggaagtgcttccgcctgtataccgcctgggcctatcagcacgagcttgaggaaaccacagtgcctgagatccagaggaccagcttgggcaatgtcgtgttgctgctcaagagcttagggatccatgacctaatgcactttgatttcctggaccctccaccatatgagacactgctgctggctttggagcagctgtatgctctgggagccctcaaccaccttggggagctcaccacgtctggtcgaaagatggcagagctgccggtggaccccatgctgtccaaaatgatcttagcctctgagaagtacagctgttcagaggagatcctgacagtggctgccatgctctctgtcaacaactccatcttctaccgaccaaaggacaaggtcgtccatgctgacaatgcccgtgtcaacttctttctccctggcggtgaccacctggttctgctaaatgtttacacacagtgggctgagagtggttactcttcccagtggtgctatgagaactttgtacagttcagatcgatgcgccgagcccgggatgtgcgggaacagctggaagggctcttggaacgtgtggaagttggtctcagttcctgccagggggactatatccgtgtacgcaaggccatcactgctggttacttttaccacacggcacggttgactcggagtggctaccgcacagtgaaacagcagcagacagtcttcattcatcccaactcctccctctttgagcaacagccacgctggctgctctaccacgaacttgtcttgaccaccaaagagttcatgagacaggtactggagattgagagcagttggcttctggaggtggctccccattattataaggccaaggagctagaagatccccatgctaagaaaatgcccaaaaaaataggcaaaacacgagaagagctagggtaagagaaggacgtaaacagaacctgacaccagctccttttccttctatacattatttaatacctattaaataaaattatttttggaataaagcttgtgggaacatttgggatctagagaaagtga

SEQ ID NO: 125581 - DNA, 3445 bp, Homo sapiens
  Payload ID: 4618
  Gene Symbol: DHX16
  Gene Name: DEAH (Asp-Glu-Ala-His) box polypeptide 16
  Uniprot ID: O60231
  ENST ID: ENST00000383577
  CDS Start-End: 197-3322
ggccgaaaaagtacagccccttccgggctccgcggtacgggaagacagctttgggatgtcggaagatcctagaggtcccaaggtagctgacttgcgaagctgaggctccagccgagggctccaggcctctgaccggcccagcagtgagcgcggctgcccgacgcttcagggccgggagcagggagcgtgagtcgccatggcgacgccggcgggtctggagcgctgggttcaggacgagctgcactcggtgttggggctgagcgagcggcacgtcgcccagtttctgatcggtaccgcacagcgctgcacctctgccgaggagttcgtgcagcgcctacgagacactgataccttggatctcagtgggccggcccgggacttcgccctgagactctggaacaaggtaccacgaaaggcagtggtagaaaagccagctcgggcagcagagcgagaggcccgggccctgctggagaagaaccgatcttataggttactggaagacagtgaagagagcagtgaggagactgtgagtagggctggaagcagcctccagaagaaacgtaaaaagcggaaacacctcaggaagaagcgtgaggaagaagaggaggaagaggcttctgagaaagggaagaagaaaacaggggggagtaaacagcagacagagaagccagagtcggaagatgagtgggaacggacagagcgtgaacgccttcaggacctggaggagcgtgatgcctttgctgagcgggttcgacagcgggacaaggatcggactcgaaatgtcctggaacggtcagacaagaaggcttatgaagaggctcagaagcgcctcaagatggccgaggaagaccggaaggccatggtccctgagctgcggaagaaatctcgccgagagtacctggctaagcgggagcgagagaagcttgaggacctggaggcggagctggctgatgaggagttcctttttggggacgtggagctgagccggcacgagcggcaggagctcaaatataagcggcgagtgcgggatctcgcccgggagtaccgggcagctggggagcaggagaagctggaggccaccaatcgctaccacatgcccaaggaaacccgaggacagccagcccgagctgtggatctagtggaggaggaatcaggagcccctggggaggagcagcggcgctgggaggaggcgcggcttggggcagcgtccctgaagtttggggcccgagatgctgcctctcaggagcccaagtatcaactggtgctggaggaggaggagaccattgagtttgtccgggccactcagctccagggtgatgaggagccgtcagctccacccacttcaactcaggcccagcagaaagagtccatccaggccgtccgccgcagcctcccggtgttcccatttcgagaggagctcctggctgctattgcaaatcaccaagtcctcatcattgaaggcgagacaggctcagggaagaccacccagatcccgcagtatctctttgaggagggttatacaaacaagggtatgaagattgcctgcacccaaccccggagagtggctgccatgagtgtggccgcccgagtggcccgggagatgggtgtgaagcttgggaatgaggttggctacagcatccgctttgaggactgcacatcagagcgaactgtcctccgctacatgacagatgggatgcttctccgggagttcctctctgagcctgacctggcgagttacagcgtggtgatggtggatgaggcacacgaaaggaccctacacacagacattctctttggattgatcaaggatgttgctcgcttccgacctgagctcaaggtcctggtggcttcagccacaatggacactgcccgtttttccaccttctttgatggcgcccctgtgtttcgaatccccggacgcaggtttcctgtggacatcttctacaccaaggctccagaggctgactacttggaagcttgtgtagtatctgtgttgcagatccatgtgacccagccccctggggatatcctggtgttcctgacaggacaggaggagattgaggctgcctgtgagatgctccaggatcgctgccgccgcctgggctccaaaatccgggagctcctggtgctgcccatttatgccaatctgccctctgacatgcaggcccgtatcttccagcccacaccacctggggcacgaaaggtggttgtggcaacgaacattgctgagacatcactcaccattgagggcatcatttatgtgctggatccagggttctgtaagcagaagagctacaacccccgcacaggcatggaatcgctcactgtcacaccctgcagcaaggcctcagccaatcagcgagctggcagggcaggtcgggtggctgcagggaagtgcttccgcctgtataccgcctgggcctatcagcacgagcttgaggaaaccacagtgcctgagatccagaggaccagcttgggcaatgtcgtgttgctgctcaagagcttagggatccatgacctaatgcactttgatttcctggaccctccaccatatgagacactgctgctggctttggagcagctgtatgctctgggagccctcaaccaccttggggagctcaccacgtctggtcgaaagatggcagagctgccggtggaccccatgctgtccaaaatgatcttagcctctgagaagtacagctgttcagaggagatcctgacagtggctgccatgctctctgtcaacaactccatcttctaccgaccaaaggacaaggtcgtccatgctgacaatgcccgtgtcaacttctttctccctggcggtgaccacctggttctgctaaatgtttacacacagtgggctgagagtggttactcttcccagtggtgctatgagaactttgtacagttcagatcgatgcgccgagcccgggatgtgcgggaacagctggaagggctcttggaacgtgtggaagttggtctcagttcctgccagggggactatatccgtgtacgcaaggccatcactgctggttacttttaccacacggcacggttgactcggagtggctaccgcacagtgaaacagcagcagacagtcttcattcatcccaactcctccctctttgagcaacagccacgctggctgctctaccacgaacttgtcttgaccaccaaagagttcatgagacaggtactggagattgagagcagttggcttctggaggtggctccccattattataaggccaaggagctagaagatccccatgctaagaaaatgcccaaaaaaataggcaaaacacgagaagagctagggtaagagaaggacgtaaacagaacctgacaccagctccttttccttctatacattatttaatacctattaaataaaattatttttggaataaagcttgtgggaacatttgggatctagagaaagtga

SEQ ID NO: 125582 - DNA, 3445 bp, Homo sapiens; identical to SEQ ID NO: 125579
  Payload ID: 4618
  Gene Symbol: DHX16
  Gene Name: DEAH (Asp-Glu-Ala-His) box polypeptide 16
  Uniprot ID: O60231
  ENST ID: ENST00000424672
  CDS Start-End: 197-3322

SEQ ID NO: 125583 - DNA, 892 bp, Homo sapiens
  Payload ID: 4618
  Gene Symbol: DHX16
  Gene Name: DEAH (Asp-Glu-Ala-His) box polypeptide 16
  ENST ID: ENST00000447945
  CDS Start-End: 7-892
tttgggatgtcggaagatcctagaggtcccaaggtaccacgaaaggcagtggtagaaaagccagctcgggcagcagagcgagaggcccgggccctgctggagaagaaccgatcttataggttactggaagacagtgaagagagcagtgaggagactgtgagtagggctggaagcagcctccagaagaaacgtaaaaagcggaaacacctcaggaagaagcgtgaggaagaagaggaggaagaggcttctgagaaagggaagaagaaaacaggggggagtaaacagcagacagagaagccagagtcggaagatgagtgggaacggacagagcgtgaacgccttcaggacctggaggagcgtgatgcctttgctgagcgggttcgacagcgggacaaggatcggactcgaaatgtcctggaacggtcagacaagaaggcttatgaagaggctcagaagcgcctcaagatggccgaggaagaccggaaggccatggtccctgagctgcggaagaaatctcgccgagagtacctggctaagcgggagcgagagaagcttgaggacctggaggcggagctggctgatgaggagttcctttttggggacgtggagctgagccggcacgagcggcaggagctcaaatataagcggcgagtgcgggatctcgcccgggagtaccgggcagctggggagcaggagaagctggaggccaccaatcgctaccacatgcccaaggaaacccgaggacagccagcccgagctgtggatctagtggaggaggaatcaggagcccctggggaggagcagcggcgctgggaggaggcgcggcttggggcagcgtccctgaagtttggggcccgagatgctgcctctcaggagcccaagtatcaactgg

SEQ ID NO: 125584 - DNA, 3445 bp, Homo sapiens; identical to SEQ ID NO: 125579
  Payload ID: 4618
  Gene Symbol: DHX16
  Gene Name: DEAH (Asp-Glu-Ala-His) box polypeptide 16
  Uniprot ID: O60231
  ENST ID: ENST00000417308
  CDS Start-End: 197-3322

SEQ ID NO: 125585 - DNA, 2203 bp, Homo sapiens
  Payload ID: 4618
  Gene Symbol: DHX16
  Gene Name: DEAH (Asp-Glu-Ala-His) box polypeptide 16
  ENST ID: ENST00000450902
  CDS Start-End: 197-2203
ggccgaaaaagtacagccccttccgggctccgcggtacgggaagacagctttgggatgtcggaagatcctagaggtcccaaggtagctgacttgcgaagctgaggctccagccgagggctccaggcctctgaccggcccagcagtgagcgcggctgcccgacgcttcagggccgggagcagggagcgtgagtcgccatggcgacgccggcgggtctggagcgctgggttcaggacgagctgcactcggtgttggggctgagcgagcggcacgtcgcccagtttctgatcggtaccgcacagcgctgcacctctgccgaggagttcgtgcagcgcctacgagacactgataccttggatctcagtgggccggcccgggacttcgccctgagactctggaacaaggtaccacgaaaggcagtggtagaaaagccagctcgggcagcagagcgagaggcccgggccctgctggagaagaaccgatcttataggttactggaagacagtgaagagagcagtgaggagactgtgagtagggctggaagcagcctccagaagaaacgtaaaaagcggaaacacctcaggaagaagcgtgaggaagaagaggaggaagaggcttctgagaaagggaagaagaaaacaggggggagtaaacagcagacagagaagccagagtcggaagatgagtgggaacggacagagcgtgaacgccttcaggacctggaggagcgtgatgcctttgctgagcgggttcgacagcgggacaaggatcggactcgaaatgtcctggaacggtcagacaagaaggcttatgaagaggctcagaagcgcctcaagatggccgaggaagaccggaaggccatggtccctgagctgcggaagaaatctcgccgagagtacctggctaagcgggagcgagagaagcttgaggacctggaggcggagctggctgatgaggagttcctttttggggacgtggagctgagccggcacgagcggcaggagctcaaatataagcggcgagtgcgggatctcgcccgggagtaccgggcagctggggagcaggagaagctggaggccaccaatcgctaccacatgcccaaggaaacccgaggacagccagcccgagctgtggatctagtggaggaggaatcaggagcccctggggaggagcagcggcgctgggaggaggcgcggcttggggcagcgtccctgaagtttggggcccgagatgctgcctctcaggagcccaagtatcaactggtgctggaggaggaggagaccattgagtttgtccgggccactcagctccagggtgatgaggagccgtcagctccacccacttcaactcaggcccagcagaaagagtccatccaggccgtccgccgcagcctcccggtgttcccatttcgagaggagctcctggctgctattgcaaatcaccaagtcctcatcattgaaggcgagacaggctcagggaagaccacccagatcccgcagtatctctttgaggagggttatacaaacaagggtatgaagattgcctgcacccaaccccggagagtggctgccatgagtgtggccgcccgagtggcccgggagatgggtgtgaagcttgggaatgaggttggctacagcatccgctttgaggactgcacatcagagcgaactgtcctccgctacatgacagatgggatgcttctccgggagttcctctctgagcctgacctggcgagttacagcgtggtgatggtggatgaggcacacgaaaggaccctacacacagacattctctttggattgatcaaggatgttgctcgcttccgacctgagctcaaggtcctggtggcttcagccacaatggacactgcccgtttttccaccttctttgatgacgcccctgtgtttcgaatccccggacgcaggtttcctgtggacatcttctacaccaaggctccagaggctgactacttggaagcttgtgtagtatctgtgttgcagatccatgtgacccagccccctggggatatcctggtgttcctgacaggacaggaggagattgaggctgcctgtgagatgctccaggatcgctgccgccgcctgggctccaaaatccgggagctcctggtgctgcccatttatgccaatctgccctctgacatgcaggcccgtatcttccagcccacaccacctggggcacgaaag

SEQ ID NO: 125586 - DNA, 892 bp, Homo sapiens; identical to SEQ ID NO: 125583
  Payload ID: 4618
  Gene Symbol: DHX16
  Gene Name: DEAH (Asp-Glu-Ala-His) box polypeptide 16
  ENST ID: ENST00000450691
  CDS Start-End: 7-892

SEQ ID NO: 125587 - DNA, 3445 bp, Homo sapiens; identical to SEQ ID NO: 125579
  Payload ID: 4618
  Gene Symbol: DHX16
  Gene Name: DEAH (Asp-Glu-Ala-His) box polypeptide 16
  Uniprot ID: O60231
  ENST ID: ENST00000458094
  CDS Start-End: 197-3322

SEQ ID NO: 125588 - DNA, 3445 bp, Homo sapiens; identical to SEQ ID NO: 125579
  Payload ID: 4618
  Gene Symbol: DHX16
  Gene Name: DEAH (Asp-Glu-Ala-His) box polypeptide 16
  Uniprot ID: O60231
  ENST ID: ENST00000421095
  CDS Start-End: 197-3322

SEQ ID NO: 125589 - DNA, 892 bp, Homo sapiens; identical to SEQ ID NO: 125583
  Payload ID: 4618
  Gene Symbol: DHX16
  Gene Name: DEAH (Asp-Glu-Ala-His) box polypeptide 16
  ENST ID: ENST00000415603
  CDS Start-End: 7-892

SEQ ID NO: 125590 - DNA, 892 bp, Homo sapiens; identical to SEQ ID NO: 125583
  Payload ID: 4618
  Gene Symbol: DHX16
  Gene Name: DEAH (Asp-Glu-Ala-His) box polypeptide 16
  ENST ID: ENST00000448766
  CDS Start-End: 7-892

SEQ ID NO: 125591 - DNA, 1933 bp, Homo sapiens; identical to SEQ ID NO: 125578
  Payload ID: 4618
  Gene Symbol: DHX16
  Gene Name: DEAH (Asp-Glu-Ala-His) box polypeptide 16
  ENST ID: ENST00000453879
  CDS Start-End: 128-1810

SEQ ID NO: 125592 - DNA, 1933 bp, Homo sapiens; identical to SEQ ID NO: 125578
  Payload ID: 4618
  Gene Symbol: DHX16
  Gene Name: DEAH (Asp-Glu-Ala-His) box polypeptide 16
  ENST ID: ENST00000414052
  CDS Start-End: 128-1810

SEQ ID NO: 125593 - DNA, 3445 bp, Homo sapiens; identical to SEQ ID NO: 125579
  Payload ID: 4618
  Gene Symbol: DHX16
  Gene Name: DEAH (Asp-Glu-Ala-His) box polypeptide 16
  Uniprot ID: O60231
  ENST ID: ENST00000451456
  CDS Start-End: 197-3322

SEQ ID NO: 125594 - DNA, 1933 bp, Homo sapiens; identical to SEQ ID NO: 125578
  Payload ID: 4618
  Gene Symbol: DHX16
  Gene Name: DEAH (Asp-Glu-Ala-His) box polypeptide 16
  ENST ID: ENST00000445379
  CDS Start-End: 128-1810

SEQ ID NO: 125595 - DNA, 1933 bp, Homo sapiens; identical to SEQ ID NO: 125578
  Payload ID: 4618
  Gene Symbol: DHX16
  Gene Name: DEAH (Asp-Glu-Ala-His) box polypeptide 16
  ENST ID: ENST00000451748
  CDS Start-End: 128-1810

SEQ ID NO: 125596 - DNA, 1933 bp, Homo sapiens; identical to SEQ ID NO: 125578
  Payload ID: 4618
  Gene Symbol: DHX16
  Gene Name: DEAH (Asp-Glu-Ala-His) box polypeptide 16
  ENST ID: ENST00000449861
  CDS Start-End: 128-1810

SEQ ID NO: 125597 - DNA, 892 bp, Homo sapiens; identical to SEQ ID NO: 125583
  Payload ID: 4618
  Gene Symbol: DHX16
  Gene Name: DEAH (Asp-Glu-Ala-His) box polypeptide 16
  ENST ID: ENST00000449252
  CDS Start-End: 7-892

SEQ ID NO: 125598 - DNA, 892 bp, Homo sapiens; identical to SEQ ID NO: 125583
  Payload ID: 4618
  Gene Symbol: DHX16
  Gene Name: DEAH (Asp-Glu-Ala-His) box polypeptide 16
  ENST ID: ENST00000427297
  CDS Start-End: 7-892

SEQ ID NO: 125599 - DNA, 691 bp, Homo sapiens
  Payload ID: 4618
  Gene Symbol: DHX16
  Gene Name: DEAH (Asp-Glu-Ala-His) box polypeptide 16
  ENST ID: ENST00000456005
  CDS Start-End: 128-691
ctgaacaatatgtgcctttttgactcttcagaggctgtgaatttctggtcttggaagatcacagtggagcaattggacagataggattttatccttcatatcccttgcaaaagatctctaagaacccatggagagccagccagcgcaagagtgtctgatgcagatgtttttgcccatcgagccagcctgctttgtggaatggctggggacttcaccatcacagttaggcgtggtgatggtggatgaggcacacgaaaggaccctacacacagacattctctttggattgatcaaggatgttgctcgcttccgacctgagctcaaggtcctggtggcttcagccacaatggacactgcccgtttttccaccttctttgatgacgcccctgtgtttcgaatccccggacgcaggtttcctgtggacatcttctacaccaaggctccagaggctgactacttggaagcttgtgtagtatctgtgttgcagatccatgtgacccagccccctggggatatcctggtgttcctgacaggacaggaggagattgaggctgcctgtgagatgctccaggatcgctgccgccgcctgggctccaaaatccgggagctcctggtgctgcccatttatgccaatctgccctctgacatgcaggcccgtatcttccagcccacaccacctggggcacgaaag

SEQ ID NO: 125600 - DNA, 892 bp, Homo sapiens; identical to SEQ ID NO: 125583
  Payload ID: 4618
  Gene Symbol: DHX16
  Gene Name: DEAH (Asp-Glu-Ala-His) box polypeptide 16
  ENST ID: ENST00000436662
  CDS Start-End: 7-892

SEQ ID NO: 125601 - DNA, 892 bp, Homo sapiens; identical to SEQ ID NO: 125583
  Payload ID: 4618
  Gene Symbol: DHX16
  Gene Name: DEAH (Asp-Glu-Ala-His) box polypeptide 16
  ENST ID: ENST00000446074
  CDS Start-End: 7-892

SEQ ID NO: 125602 - DNA, 4502 bp, Homo sapiens
  Payload ID: 4619
  Gene Symbol: DHX29
  Gene Name: DEAH (Asp-Glu-Ala-His) box polypeptide 29
  Uniprot ID: Q7Z478
  ENST ID: ENST00000251636
  CDS Start-End: 150-4259
aattgcgaggcagcggtcgccccggcccgagaagcccggatcgaagcgcagggtggcagccccggagccggggaatgtgaagagctctcggctgtgcagtggtaccgtcggggcctgggccgcgaaggatcttctgccacagctgcaacatgggcggcaagaacaagaaacacaaggctccagcggccgcggtggtccgggccgccgtgtctgcttccagagccaaatctgccgaggctggaattgccggggaggcccaaagcaagaagccagtgtccaggccggccaccgctgccgctgccgctgccggctccagggagccccgtgtcaagcaaggtccaaaaatttatagttttaattctacaaatgattctagtggtcctgcaaatctggataaatctattttgaaagtggtaattaataacaaactagagcaaagaattattggagtgatcaatgagcataaaaagcaaaataatgacaaaggaatgatttctggaagacttactgccaaaaaattgcaggatttatacatggctttacaagcattttcatttaagacaaaggacattgaagatgccatgaccaatacactcttatatggaggtgaccttcattctgccttggattggctctgtttaaacctttcagatgatgcacttcctgaaggattcagtcaggaatttgaagagcagcaacctaaaagtaggcctaaatttcagtctcctcaaatacaagccactatttcacctccattgcaacctaaaacaaaaacatatgaagaggaccctaagagtaagccaaaaaaggaagaaaaaaatatggaagtaaatatgaaagagtggattttacgatatgctgaacaacaaaatgaagaagaaaagaatgagaattctaaaagtttagaagaggaggaaaaatttgaccctaatgaaaggtacttacatcttgcagcaaaactgctggatgcaaaagaacaagcagctacctttaaactagaaaaaaacaagcaaggccaaaaagaggctcaggaaaaaataaggaaatttcaaagagaaatggaaactttagaagaccatccagtatttaacccagccatgaagatttcacatcaacaaaatgaaaggaaaaagcctcctgtagccacagaaggagaaagtgcattgaattttaatttatttgaaaaatctgcagctgctactgaagaagagaaagataaaaagaaagaacctcatgatgtaagaaattttgactatactgctcgaagttggactggaaaatctcccaaacaatttctgattgattgggtcaggaagaatcttcccaagagtccaaatccttcctttgaaaaagttccagtaggtagatactggaaatgtagggttagggtaatcaagtctgaagatgatgtcctggtagtatgccctacaatcttaacagaagatggcatgcaagctcagcacctgggagctactttagccctttaccgtttagttaaagggcagtcagttcatcagttacttcctcccacttaccgagatgtttggctggagtggagtgatgcagaaaagaaaagggaagaattaaataaaatggaaaccaataaaccacgtgatctttttattgccaaacttctgaataaactgaaacagcagcaacagcagcaacaacagcattctgaaaataagagagaaaactctgaagatcccgaggaatcttgggaaaatttagtttcggatgaggatttttctgcactgtccttggaatcagcaaatgtggaagatttggaacctgttagaaacctctttagaaagttgcaaagcacacctaagtatcagaaacttctaaaggaaagacaacagctacctgtatttaaacatcgggactcaattgttgaaactcttaaaaggcatcgggtagtggttgtggcaggtgaaacagggagtggtaaaagtactcaggtaccacattttctattggaagatttgcttctaaatgagtgggaagcaagtaaatgtaacattgtctgtacccaaccccgaagaatctcagcagttagtttagccaacagagtatgtgatgaattgggctgtgaaaatggacctggaggaaggaattccttgtgtggatatcagatccggatggaatctcgagcttgtgaatctaccaggttactctattgtacaacaggggttttgctaaggaaacttcaagaagatggtcttctaagtaatgtgtctcatgttattgtagatgaggttcatgaaagaagtgtccagtcagacttcctactaattatcttgaaggaaattttacagaaacgttctgatctacacttgattctaatgagtgccactgtggacagcgaaaaattttctacatatttcacacactgccccattctcagaatttcaggaagaagttatcctgttgaggtttttcatcttgaagatataatagaagaaacaggctttgtactggaaaaagactcagaatattgtcagaaatttctggaagaggaagaagaagtaaccattaatgttacaagcaaagcagggggaataaaaaaatatcaggaatacatcccagttcagactggagcacatgctgatttaaatccattttaccaaaagtacagcagccgcactcagcatgctattctatacatgaatcctcataaaatcaacctggatctcattttggaacttcttgcatacttagataaaagtccccaattcagaaatattgaaggagcagtattgatctttttaccaggacttgctcatattcagcagttgtatgatcttctatcaaatgatagaagattttattctgaacgatataaagtgatagctctgcattctattctttcaacccaagatcaagctgcagcattcacacttccccctccaggagtcaggaagattgttttagcaaccaatattgcagagacgggtatcactattcctgatgttgtatttgtaattgatactggaagaacaaaagaaaataagtaccatgaaagcagtcagatgagttctttggtggagacgtttgtcagtaaagccagtgctttgcagcgccagggaagagctgggcgggtcagagatggcttctgtttccgaatgtacacaagagaaagatttgaaggctttatggattattctgttcctgaaatcttacgtgtacctttggaggaattatgccttcatattatgaaatgtaatcttggttctcctgaagatttcctctccaaagccttagatcctcctcagctccaagtgatcagcaatgcaatgaatttgctccgaaaaattggagcttgtgaattaaatgagcctaaactgactccgttgggccaacaccttgcagctttacctgtgaatgtcaagattggcaagatgcttatttttggtgccatatttggctgccttgacccagtggcaacactagctgcagttatgacagagaagtctccttttaccacaccaattggtcgaaaagatgaagcagatcttgcaaaatcagctttggccatggcggattcagaccacctgacgatctacaatgcatatctaggatggaagaaagcacgacaagaaggaggttatcgttctgaaatcacatactgccggaggaactttcttaatagaacatcactgttaaccctagaggatgtaaagcaggagttaataaagttggttaaggcagcaggattttcatcttccacaacttctaccagctgggaaggaaacagagcctcacagaccctctcattccaagaaattgcccttcttaaagctgtactggtggctggactgtatgacaatgtggggaagataatctatacaaagtcagtggatgttacagaaaaattggcttgcattgtggagacggcccaaggcaaagcacaagtacacccatcctcagtaaatcgagatttgcaaactcatggatggctcttataccaggagaagataaggtatgccagagtgtatttgagagaaactaccctaataaccccttttccagttttactttttggtggtgatatagaagttcagcaccgagaacgtcttctttctattgatggctggatctattttcaggcccctgtaaagatagctgtcattttcaagcagctgagagttctcattgattcagttttaagaaaaaagcttgaaaatccaaagatgtcccttgaaaatgacaagattctgcagatcattacggaattgataaaaacagagaataactgaaactgaaattcatggtcaactgctttaaaaattaagatgaagatacagtcatgaaattatctgaaaatgggtcatcacattaagtatttcattacttaaaatgttggtactagccattaacttaaaggtggtgggaaaaaagcacatactttaaacatgtataattttctagttcctttttaatgatgattattctgaatgtatttgccactacatttacaataaattctttggtattatgca

SEQ ID NO: 125603 - DNA, 479 bp, Homo sapiens
  Payload ID: 4619
  Gene Symbol: DHX29
  Gene Name: DEAH (Asp-Glu-Ala-His) box polypeptide 29
  ENST ID: ENST00000508346
  CDS Start-End: 1-479
gcggccgcggtggtccgggccgccgtgtctgcttccagagccaaatctgccgaggctggaattgccggggaggcccaaagcaagaagccagtgtccaggccggccaccgctgccgctgccgctgccggctccagggagccccgtgtcaagcaaggtggtaattaataacaaactagagcaaagaattattggagtgatcaatgagcataaaaagcaaaataatgacaaaggaatgatttctggaagacttactgccaaaaaattgcaggatttatacatggctttacaagcattttcatttaagacaaaggacattgaagatgccatgaccaatacactcttatatggaggtgaccttcattctgccttggattggctctgtttaaacctttcagatgatgcacttcctgaaggattcagtcaggaatttgaagagcagcaacctaaaagtaggcctaaatttcagtctcctcaaatac

SEQ ID NO: 125604 - DNA, 4450 bp, Homo sapiens
  Payload ID: 4619
  Gene Symbol: DHX29
  Gene Name: DEAH (Asp-Glu-Ala-His) box polypeptide 29
  ENST ID: ENST00000621106
  CDS Start-End: 102-4214
cagggtggcagccccggagccggggaatgtgaagagctctcggctgtgcagtggtaccgtcggggcctgggccgcgaaggatcttctgccacagctgcaacatgggcggcaagaacaagaaacacaaggctccagcggccgcggtggtccgggccgccgtgtctgcttccagagccaaatctgccgaggctggaattgccggggaggcccaaagcaagaagccagtgtccaggccggccaccgctgccgctgccgctgccggctccagggagccccgtgtcaagcaaggtccaaaaatttatagttttaattctacaaatgattctagtggtcctgcaaatctggataaatctattttgaaagtggtaattaataacaaactagagcaaagaattattggagtgatcaatgagcataaaaagcaaaataatgacaaaggaatgatttctggaagacttactgccaaaaaattgcaggatttatacatggctttacaagcattttcatttaagacaaaggacattgaagatgccatgaccaatacactcttatatggaggtgaccttcattctgccttggattggctctgtttaaacctttcagatgatgcacttcctgaaggattcagtcaggaatttgaagagcagcaacctaaaagtaggcctaaatttcagtctcctcaaatacaagccactatttcacctccattgcaacctaaaacaaaaacatatgaagaggaccctaagagtaagccaaaaaaggaagaaaaaaatatggaagtaaatatgaaagagtggattttacgatatgctgaacaacaaaatgaagaagaaaagaatgagaattctaaaagtttagaagaggaggaaaaatttgaccctaatgaaaggtacttacatcttgcagcaaaactgctggatgcaaaagaacaagcagctacctttaaactagaaaaaaacaagcaaggccaaaaagaggctcaggaaaaaataaggaaatttcaaagagaaatggaaactttagaagaccatccagtatttaacccagccatgaagatttcacatcaacaaaatgaaaggaaaaagcctcctgtagccacagaaggagaaagtgcattgaattttaatttatttgaaaaatctgcagctgctactgaagaagagaaaggtaaaaagaaagaacctcatgatgtaagaaattttgactatactgctcgaagttggactggaaaatctcccaaacaatttctgattgattgggtcaggaagaatcttcccaagagtccaaatccttcctttgaaaaagttccagtaggtagatactggaaatgtagggttagggtaatcaagtctgaagatgatgtcctggtagtatgccctacaatcttaacagaagatggcatgcaagctcagcacctgggagctactttagccctttaccgtttagttaaagggcagtcagttcatcagttacttcctcccacttaccgagatgtttggctggagtggagtgatgcagaaaagaaaagggaagaattaaataaaatggaaaccaataaaccacgtgatctttttattgccaaacttctgaataaactgaaacagcagcaacagcagcaacaacagcattctgaaaataagagagaaaactctgaagatcccgaggaatcttgggaaaatttagtttcggatgaggatttttctgcactgtccttggaatcagcaaatgtggaagatttggaacctgttagaaacctctttagaaagttgcaaagcacacctaagtatcagaaacttctaaaggaaagacaacagctacctgtatttaaacatcgggactcaattgttgaaactcttaaaaggcatcgggtagtggttgtggcaggtgaaacagggagtggtaaaagtactcaggtaccacattttctattggaagatttgcttctaaatgagtgggaagcaagtaaatgtaacattgtctgtacccaaccccgaagaatctcagcagttagtttagccaacagagtatgtgatgaattgggctgtgaaaatggacctggaggaaggaattccttgtgtggatatcagatccggatggaatctcgagcttgtgaatctaccaggttactctattgtacaacaggggttttgctaaggaaacttcaagaagatggtcttctaagtaatgtgtctcatgttattgtagatgaggttcatgaaagaagtgtccagtcagacttcctactaattatcttgaaggaaattttacagaaacgttctgatctacacttgattctaatgagtgccactgtggacagcgaaaaattttctacatatttcacacactgccccattctcagaatttcaggaagaagttatcctgttgaggtttttcatcttgaagatataatagaagaaacaggctttgtactggaaaaagactcagaatattgtcagaaatttctggaagaggaagaagaagtaaccattaatgttacaagcaaagcagggggaataaaaaaatatcaggaatacatcccagttcagactggagcacatgctgatttaaatccattttaccaaaagtacagcagccgcactcagcatgctattctatacatgaatcctcataaaatcaacctggatctcattttggaacttcttgcatacttagataaaagtccccaattcagaaatattgaaggagcagtattgatctttttaccaggacttgctcatattcagcagttgtatgatcttctatcaaatgatagaagattttattctgaacgatataaagtgatagctctgcattctattctttcaacccaagatcaagctgcagcattcacacttccccctccaggagtcaggaagattgttttagcaaccaatattgcagagacgggtatcactattcctgatgttgtatttgtaattgatactggaagaacaaaagaaaataagtaccatgaaagcagtcagatgagttctttggtggagacgtttgtcagtaaagccagtgctttgcagcgccagggaagagctgggcgggtcagagatggcttctgtttccgaatgtacacaagagaaagatttgaaggctttatggattattctgttcctgaaatcttacgtgtacctttggaggaattatgccttcatattatgaaatgtaatcttggttctcctgaagatttcctctccaaagccttagatcctcctcagctccaagtgatcagcaatgcaatgaatttgctccgaaaaattggagcttgtgaattaaatgagcctaaactgactccgttgggccaacaccttgcagctttacctgtgaatgtcaagattggcaagatgcttatttttggtgccatatttggctgccttgacccagtggcaacactagctgcagttatgacagagaagtctccttttaccacaccaattggtcgaaaagatgaagcagatcttgcaaaatcagctttggccatggcggattcagaccacctgacgatctacaatgcatatctaggatggaagaaagcacgacaagaaggaggttatcgttctgaaatcacatactgccggaggaactttcttaatagaacatcactgttaaccctagaggatgtaaagcaggagttaataaagttggttaaggcagcaggattttcatcttccacaacttctaccagctgggaaggaaacagagcctcacagaccctctcattccaagaaattgcccttcttaaagctgtactggtggctggactgtatgacaatgtggggaagataatctatacaaagtcagtggatgttacagaaaaattggcttgcattgtggagacggcccaaggcaaagcacaagtacacccatcctcagtaaatcgagatttgcaaactcatggatggctcttataccaggagaagataaggtatgccagagtgtatttgagagaaactaccctaataaccccttttccagttttactttttggtggtgatatagaagttcagcaccgagaacgtcttctttctattgatggctggatctattttcaggcccctgtaaagatagctgtcattttcaagcagctgagagttctcattgattcagttttaagaaaaaagcttgaaaatccaaagatgtcccttgaaaatgacaagattctgcagatcattacggaattgataaaaacagagaataacaactgaaattcatggtcaactgctttaaaaattaagatgaagatacagtcatgaaattatctgaaaatgggtcatcacattaagtatttcattacttaaaatgttggtactagccattaacttaaaggtggtgggaaaaaagcacatactttaaacatgtataattttctagttcctttttaatgatgattattctgaatgtatttgccactacatttacaataaattctttggtattatgc

SEQ ID NO: 125605 - DNA, 3070 bp, Homo sapiens
  Payload ID: 4620
  Gene Symbol: DHX32
  Gene Name: DEAH (Asp-Glu-Ala-His) box polypeptide 32
  Uniprot ID: Q7L7V1
  ENST ID: ENST00000284690
  CDS Start-End: 492-2723
aggcagagagcacgaggcccagtgcagaatcattttctgaaccagccaggaaataccggaacccaccaaactttaaacaccagcctaaattattcctgttcttttaagcaggcagcagaaatgacagaaacccgttaacagaaaaaaaaaaaataatgcttttcatttgaactcctgtgcattttctttttaacttatatgtgttcctaattttccttactctttttgtttgtttgtttcttagtgtggtttattgacaatcatttacaatgccgaagagtgctgtagtgagccagcacagtgggtaacacagcaacggagaacagatgcaggtttgaggaatttaacttgctaaaaccttgaactgaagtcttagagattggaacatacgggtttgtataaataggcttttaagccctgtttgcaatgggttactgataggagaaacttgcttgtggaatgtcagctgcgtgagctcactgtcagacaagatggaagaagaagggctggagtgtccaaactcttcctctgaaaaacgctattttcctgaatccctggattccagcgatggggatgaggaagaggttttggcctgtgaggatttggaacttaacccctttgatggattgccatattcatcacgttattataaacttctgaaagaaagagaagatcttcctatatggaaagaaaaatactcctttatggagaacctgcttcaaaatcaaatcgtgattgtttcaggagatgctaaatgtggtaagagcgctcaggttcctcagtggtgtgctgaatattgtctttccatccactaccagcacgggggcgtgatatgcacacaggtccacaagcagactgtggtccagctcgccctgcgggtggcggatgaaatggatgttaacattggtcatgaggttggctacgtgatccctttcgagaactgctgtaccaacgaaacaatcctgaggtattgtactgatgatatgctgcaaagagaaatgatgtccaatccttttttgggtagctatggggtcatcatcttagatgatattcatgaaagaagcattgcaactgatgtgttacttggacttcttaaagatgttttactagcaagaccagaactgaagctcataattaactcctcacctcacctgatcagcaaactcaattcttattatggaaacgtgcctgtcatagaagtgaaaaataaacaccctgtggaggttgtgtaccttagtgaggctcaaaaggattcttttgagtctattttacgccttatctttgaaattcaccactcgggtgagaaaggtgacattgtagtctttctggcctgtgaacaagatattgagaaagtctgtgaaactgtctatcaaggatctaacctaaacccagatcttggagaactggtggttgttcctttgtatccaaaagagaaatgttcattgttcaagccactcgatgaaacagaaaaaagatgccaagtttatcaaagaagagtggtgttaactactagctctggagagtttttgatctggagcaactcagtcagatttgttatcgatgtgggtgtggaaagaagaaaggtgtacaacccgagaataagagcaaactcgctcgtcatgcagcccatcagccagagccaggcagagatacgcaagcagattcttggctcatcttcttcaggaaaatttttctgcctgtacactgaagaatttgcctccaaagacatgacgccactgaagccagcagaaatgcaggaagccaacctaacaagcatggtgctttttatgaagaggatagacattgcgggcctaggccactgtgacttcatgaacagaccagcaccagaaagtttgatgcaggcattggaagacttagattatctggcagcactggataatgatggaaatctttctgaatttggaatcatcatgtcagagtttcctcttgatccacaactctcgaagtctatcttagcgtcctgtgaatttgactgtgtagatgaagtgctaacaatcgcagccatggtaacagctccaaattgcttttcacatgtgccacatggagctgaagaggctgccttgacttgttggaagacatttttacatcccgaaggagatcactttaccctcatcagcatttacaaggcttaccaagacacaactctgaattctagcagtgagtactgtgtggaaaagtggtgtcgtgattacttcctcaactgttcagcactcagaatggcagatgttattcgagctgaactcttagaaattatcaagcgaatcgagcttccctatgcagaacctgcttttggctccaaggaaaacactctaaacataaagaaagctcttctgtccggttactttatgcagattgctcgggatgttgatggatcaggtaactacttaatgctgacacataagcaggttgctcagctgcatcccctgtctggttactcaatcaccaagaagatgccagagtgggtcctcttccataaattcagcatttctgagaacaactacatcaggattacctcagaaatctctcctgaactatttatgcagctggtaccacaatactatttcagtaatctgcctcctagtgaaagtaaggacattctacagcaagtagtggatcacctatcccctgtgtcaacaatgaataaggaacagcaaatgtgtgagacgtgccctgaaactgaacagagatgcactctccagtgactccccagcaaacacaaggtgcagcagggtcccaaaggtagctggatggctgaactgctggatatgggagatacatgacgcgaagacggatttcacatccacaggacggtcttgaagaaaataacactgtgtatattattttaaaataaaaaatagaagtttttattgagttctttaaattactactccatgcttttcttcttcttggaaaagtttttaaatcaaccactcataatttgaccaaaattttaaaaaactggtattttgtaaatgtgtcagagacacatgggacagaaccctactttttgtagaggaacttaatctgaataaagtctgagtttttcagt

SEQ ID NO: 125606 - DNA, 2389 bp, Homo sapiens
  Payload ID: 4620
  Gene Symbol: DHX32
  Gene Name: DEAH (Asp-Glu-Ala-His) box polypeptide 32
  ENST ID: ENST00000368721
  CDS Start-End: 936-2039
gttctcattattccaattggcaagttttcactcattaggatcaacagccatgctgtttgcttggtaaaaaatctgccccaagtaattcaattatatgtggaaaaaggaagtgcaagcaagggaccgtacctgtgtaccagctgatgtgggaccccctggagcggcctctgcccagcttcctgggagccacttagcagaccaggaaacgagcacagctcacctagttctcagtgacctgtgataccttgctatttttctagatggatctgtcttcctacaaaacccttgagttaattcaatcccattctacaaatggtatggaaaggaaagagacataagctagagacctagagaatggaattgagctgtaaaaactatggcagttgtgggaagtcatcttttttacttagatttttagtgaaatctaacaaaattaaatgggaaaacaatataaattatatttaacttccccaaagacgttttctcatttaggtgcatctttacttatttaaagatacatgtaggcagcaacacagggatttctttccctgtatctgttacgtagtattgcctaaaattttttgtaattcagacatttttttaatagtgatgttgtttgcattgtattttattttcatgggtttttttttctttaggatattgagaaagtctgtgaaactgtctatcaaggatctaacctaaacccagatcttggagaactggtggttgttcctttgtatccaaaagagaaatgttcattgttcaagccactcgatgaaacagaaaaaagatgccaagtttatcaaagaagagtggtgttaactactagctctggagagtttttgatctggagcaactcagtcagatttgttatcgatgtgggtgtggaaagaagaaaggtgtacaacccgagaataagagcaaactcgctcgtcatgcagcccatcagccagagccaggcagagatacgcaagcagattcttggctcatcttcttcaggaaaatttttctgcctgtacactgaagaatttgcctccaaagacatgacgccactgaagccagcagaaatgcaggaagccaacctaacaagcatggtgctttttatgaagaggatagacattgcgggcctaggccactgtgacttcatgaacagaccagcaccagaaagtttgatgcaggcattggaagacttagattatctggcagcactggataatgatggaaatctttctgaatttggaatcatcatgtcagagtttcctcttgatccacaactctcgaagtctatcttagcgtcctgtgaatttgactgtgtagatgaagtgctaacaatcgcagccatggtaacagctccaaattgcttttcacatgtgccacatggagctgaagaggctgccttgacttgttggaagacatttttacatcccgaaggagatcactttaccctcatcagcatttacaaggcttaccaagacacaactctgaattctagcagtgagtactgtgtggaaaagtggtgtcgtgattacttcctcaactgttcagcactcagaatggcagatgttattcgagctgaactcttagaaattatcaagcgaatcgagcttccctatgcagaacctgcttttggctccaaggaaaacactctaaacataaagaaagctcttctgtccggttactttatgcagattgctcgggatgttgatggatcaggtaactacttaatgctgacacataagcaggttgctcagctgcatcccctgtctggttactcaatcaccaagaagatgccagagtgggtcctcttccataaattcagcatttctgagaacaactacatcaggattacctcagaaatctctcctgaactatttatgcagctggtaccacaatactatttcagtaatctgcctcctagtgaaagtaaggacattctacagcaagtagtggatcacctatcccctgtgtcaacaatgaataaggaacagcaaatgtgtgagacgtgccctgaaactgaacagagatgcactctccagtgactccccagcaaacacaaggtgcagcagggtcccaaaggtagctggatggctgaactgctggatatgggagatacatgacgcgaagacggatttcacatccacaggacggtcttgaagaaaataacactgtgtatattattttaaaataaaaaatagaagtttttattgagttctttaaattactactccatgcttttcttcttcttggaaaagtttttaaatcaaccactcataatttgaccaaaattttaaaaaactggtattttgtaaatgtgtcagagacacatgggacagaaccctactttttgtagaggaacttaatctgaataaagtctgagtttttcagtaaa

SEQ ID NO: 125607 - DNA, 803 bp, Homo sapiens
  Payload ID: 4620
  Gene Symbol: DHX32
  Gene Name: DEAH (Asp-Glu-Ala-His) box polypeptide 32
  ENST ID: ENST00000415732
  CDS Start-End: 467-803
ggccaggtcaccggctgaggacactgctcctgaagcccggtcaggcggtcgcgccctccctggcggcccccgcggccccgcaggacctgtgccccgacgtcgccgacccgcggtccccgctgtcgccgacccgcggcgtccgtcgggcgagtgggcctgcccgcgggtaaggcgccggccctgggccgccctcccgggaatcgggagccgccgctgcagtgtggtttattgacaatcatttacaatgccgaagagtgctgtagtgagccagcacagtgggtaacacagcaacggagaacagatgcaggtttgaggaatttaacttgctaaaaccttgaactgaagtcttagagattggaacatacgggtttgtataaataggcttttaagccctgtttgcaatgggttactgataggagaaacttgcttgtggaatgtcagctgcgtgagctcactgtcagacaagatggaagaagaagggctggagtgtccaaactcttcctctgaaaaacgctattttcctgaatccctggattccagcgatggggatgaggaagaggttttggcctgtgaggatttggaacttaacccctttgatggattgccatattcatcacgttattataaacttctgaaagaaagagaagatcttcctatatggaaagaaaaatactcctttatggagaacctgcttcaaaatcaaatcgtgattgtttcaggagatgctaaatgtggtaagagcgctcaggttcctcagtggtgtgctgaatattgtctttccatccactaccagcacgggggcg

SEQ ID NO: 125608 - DNA, 5618 bp, Homo sapiens
  Payload ID: 4621
  Gene Symbol: DHX33
  Gene Name: DEAH (Asp-Glu-Ala-His) box polypeptide 33
  Uniprot ID: Q9H6R0
  ENST ID: ENST00000225296
  CDS Start-End: 202-2325
aaagccttcccaagcccccaaggcatgctgggagatgcagtccctttttctaaagactggggcggccgtgaggtcatcggtggtcgccgggagccgccagcacgtggcggcgaggaaggggcggtgtgctcctgttgtctgcacctgagagggggcaggagctctcggcgcttgcgcctcccgccgcggtgccctcccgacatgccggaggaggcgggcttcccgccggccaagagattccggccaggctctggacctccgagccgcgctgggtccttccctcccgggaggcaagtggtgatgctgctgactgcgggcagcggcggcagaggaggaggaggaggccggaggcagcagccgcccctggcccagccctcggccagtccctaccctgaagctgtggagctgcagcgccggagtctgcccatcttccaagcgcgggggcaactgttggcccagctccgaaacctggacaacgcggtcctcatcggggaaactggctctgggaagacaactcagatccctcagtacctgtatgaaggagggatcagccgccagggcatcattgctgtgacccagcctcgtcgagtagctgccatctctcttgctactagagtctcagatgagaagagaactgaacttgggaagctggttggctatacagtgcgctttgatgatgtcacctcagaagacaccaggatcaagtttctgacagatggcatgcttctgcgtgaagcaatttcagactctttgcttcggaaatacagctgtgtcattttggatgaagctcacgaacggactatccacacagatgtgctctttggagtggtgaaagctgcacagaagaggagaaaggaactcgggaaacttcctctgaaagtgattgtgatgtcagctacgatggatgtggacctgttctctcagtatttcaatggcgcccccgtcctctacctagagggtcggcagcatccgatccaggtgttttacaccaaacagcctcagaatgattacctgcacgccgcgcttgtctccgtcttccagatccaccaggaagccccttcttcacaggacatcctggtgttcctcactgggcaggaggagatcgaagccatgagcaagacgtgccgagacattgcaaagcacctcccagacggctgccctgcgatgctggtccttcctctgtacgcctccctgccctatgcacagcagctccgagtcttccaaggggccccaaagggctatcgcaaagtgatcatttcaaccaacatcgctgaaacctccataaccattacaggaataaaatatgtagttgacacgggcatggttaaagcaaagaagtataaccctgacagtggtcttgaggtgttagcagtgcagcgggtatcgaagacgcaggcttggcagcgcacagggagggctggcagagaggacagtggcatctgctaccggctctacacggaggacgagtttgagaagtttgataagatgaccgtgccagagatccagaggtgtaacctggccagtgtgatgcttcagcttctagcaatgaaagtcccaaatgtgctcacctttgacttcatgtcgaagccatctccagatcacattcaggcggccattgcccaactggacctgttaggtgctcttgaacataaggatgaccagcttaccctgactccaatgggaagaaagatggcagcatttcctttagaacccaaatttgccaaaaccatcctcatgtcccccaaattccactgtacagaggagatcctgaccattgtctccctgctgtctgtggacagcgtcctccacaaccctccttcccggcgagaggaagtgcaaggggtccgcaagaagttcatatccagcgagggggatcacatgaccctgctcaatatctatcggaccttcaaaaacctaggcggaaataaggattggtgcaaagagaattttgtcaacagcaagaatatgacgctggtagcagaagtcagagcacagctgagggacatctgcttaaagatgtcaatgccaatcgcatcatcccgaggagacgtggagagtgtccgccgctgcctggctcacagcctcttcatgagcaccgccgagcttcagccagatggcacctatgccaccacggacacccaccagccagtggccatccacccgtcgtctgtcctcttccactgcaagccggcctgcgtcgtgtacactgagctgctctacaccaacaagtgctacatgcgggacctctgcgtcatagatgcacagtggctgtacgaggctgcccctgagtactttaggaggaagctgagaaccgccagaaactgagccgccccaggatgccgccagaatcactggtccctgggagcttggactacagttgtccttacagcaggcttccaggttggcgcttagagaagccttggaatcagctgaaggtgcctgacttccaggagcgtgaaagcatctttgctcaactcctgggactgaaccatatagacatggacatatcatttgtacctggaaacctcaaaattatgcttttggttcttactgggtgactttgacttaatttaacacctgagcctcagttttctcatctgccaaatgggagtaataataataatccttataaaattgggttcataaagtttagagaaaaggaatggaaagtacccagaactatgcctggagcacgcacgacacacgtacagtgagttgggagccgttaggctgaatgttactgcttgccatatgatgtgaagtacagcaatatcccaagttcttgtgactgagggagattttctggaagggccacaggaggttgcggagcttggatgttgcccttagttcttgtttaatgtctctctgaatgcagttttaaaatagaaaacaaaactgacttctgtagaagtttccagagggaggtgctgttatctcgtacctcctgggatggcgatccctactgaacgcttgtgtctcagggtggaccactctgtgtctgtctccaagcagagaccagtaaaggagcctcctggtcctcagtgcgtgaccctgtcagtgctttcaggagacatgtaagcttcctgggtgaaggttgatttgtaccttctgaatcctgtcacgtgtagacatgggaaactgacctatcagtgttttgtgtgtgtaggtgactcccacatacacagttgccatttttctctctaactgggcaccagtgaacatgcgggcatgaggagtgactgtgtaccatttcagctgtttcttttcgggcagtcccctggtcagagggggtgggggtgggggaggggagaggggtacctagaacccagagaacattggcttatgccagataccacaccacatctgggcttacattcttgtatcttttttggtgtgtgggcggggggggtggggggcagttcagtgaagtctagaagacctgctggacaaattctaaaagagctagagctgtaacacttattcttgcatcttattaattttctatgatattttttccttcttcgtagggacttgggacaatctggctttgctgctttctaactgctaggcacctctctctaaccctcattgtcagagggaattggaggatatccacagtctgttcctgttctgatattctgagcagagaaaaggcactaacggttcctcttagctatttaattatcagaagcaagtaatctttccccagataatattttgccctagaagaagccgtgatttagctcttttattgtgcttacttggtccaaatacatctgtggggtgttttgtcatttcttaatgaatgaatcatagttataaccaggggccaagctgcccaagaggctcttcagagatcatggatgctctctttctggaagctgtggcctgatggagcagccccattccagggtcccatctgtccggagttgtgtatgtcaagtccggctcagtctttatttccaacactagccgtggtcctgtgcagtcaagctctcagctagtgtttagggctgtctgtcagaaatggttatacgtgggcaaaagaagatctgacagctcctatataccttatcttactgaattcttaaactttgaaccagttcttccacttactgacttgttaccactgctgactttctgaaaagttttccagtttttgttttttgttttttgttttccagtaggggattagaatgtttagtcctacttagtaagaaaaatattgtatttttaatcattcatagtgctggtaaaaaaaaaaaaaaaaaaaaaaaaattggggggtggccgggcgcagtggctcacacctgtaatcccagcactttgggaggccaaggcgggcggatcacctcatgcctgtaatcccagcattgggatgggaggctgaggtgggtggattgcttgagaagttcaagaccagcctggccaacatggcaaaaccccgtctctactaaaaatagaaaacttagctgggcatggtggcacacgcctgtaatcccagctaccggggaggctgaggcacaagaattgcttgaacttgggaggcagagtttgtagtgagccaagatcacgccactgcattccagcctggccgacagtgtgagacggtctcagaaaaaaaaagaaagaaagaaagaaaaagaaaaaacttggggtaatttatgtccagcttaagtacctgaacagtttccggaaatgtatattttttttctgagaggcaaaggatgtaaacagcttctaagtagctttaatgtttctgtacagaaataagtttatccctgtaacattgtggtagagttttaatacagtatttagttttttattgggcttttttaaaaagttaacttttaacatagctgctcagggattaaatcagattggaaaacccattctgactccacatactgctacaaagaaatacatcgttgtttatattgagctgcaggagatagtacactttaaacttaagaaagttaaatgtttcacaataacattgcaatataatcttcagctactctctttccattggtaaaatctctgatggtgtgataactctttgccaacctacgaaacccatatctggaagaatcaccagctcccgtgagcagcttcatgtaaatagatgcactccaagcagattgcatgcctcaggtgtttgtcttctagtaatcatggagtgtgcaacacccagagtaacactacaaggggcaggactgcaaacagcaggtcctggctaaaaacccttaatgctgcattgctgccagttgtaaagagatgcctgaatggaggcaagttctgccctgtgggtgaaactgatgatgtactgtactgtcatatataaatccactaaatccagctaccaggaactgcctggaactgtggccatgcatttttttttttctttaaagaccagtgtgatagtaggccatgcatctgagatacgatattccttggtaactagagggagaaaaaaaaatcaagtaggttcaggcttatgttgtattttgagagtctggttttatttgaacagaaataactctacagaaagctcttgtaaataatgctcaaatttgcacccgacgatcaaatccattaaaaatgaatcttgtatatga

SEQ ID NO: 125609 - DNA, 2225 bp, Homo sapiens
  Payload ID: 4621
  Gene Symbol: DHX33
  Gene Name: DEAH (Asp-Glu-Ala-His) box polypeptide 33
  ENST ID: ENST00000433302
  CDS Start-End: 58-1509
ctgagagggggcaggagctctcggcgcttgcgcctcccgccgcggtgccctcccgacatgccggaggaggcgggcttcccgccggccaagagattccggccaggctctggacctccgagccgcgctgggtccttccctcccgggaggcaagtggtgatgctgctgactgcgggcagcggcggcagaggaggaggaggaggccggaggcagcagccgcccctggcccagccctcggccagtccctaccctgaagctgtggagctgcagcgccggagtctgcccatcttccaagcgcgggggcaactgttggcccagctccgaaacctggacaacgcggtcctcatcggaagccccttcttcacaggacatcctggtgttcctcactgggcaggaggagatcgaagccatgagcaagacgtgccgagacattgcaaagcacctcccagacggctgccctgcgatgctggtccttcctctgtacgcctccctgccctatgcacagcagctccgagtcttccaaggggccccaaagacagtggtcttgaggtgttagcagtgcagcgggtatcgaagacgcaggcttggcagcgcacagggagggctggcagagaggacagtggcatctgctaccggctctacacggaggacgagtttgagaagtttgataagatgaccgtgccagagatccagaggtgtaacctggccagtgtgatgcttcagcttctagcaatgaaagtcccaaatgtgctcacctttgacttcatgtcgaagccatctccagatcacattcaggcggccattgcccaactggacctgttaggtgctcttgaacataaggatgaccagcttaccctgactccaatgggaagaaagatggcagcatttcctttagaacccaaatttgccaaaaccatcctcatgtcccccaaattccactgtacagaggagatcctgaccattgtctccctgctgtctgtggacagcgtcctccacaaccctccttcccggcgagaggaagtgcaaggggtccgcaagaagttcatatccagcgagggggatcacatgaccctgctcaatatctatcggaccttcaaaaacctaggcggaaataaggattggtgcaaagagaattttgtcaacagcaagaatatgacgctggtagcagaagtcagagcacagctgagggacatctgcttaaagatgtcaatgccaatcgcatcatcccgaggagacgtggagagtgtccgccgctgcctggctcacagcctcttcatgagcaccgccgagcttcagccagatggcacctatgccaccacggacacccaccagccagtggccatccacccgtcgtctgtcctcttccactgcaagccggcctgcgtcgtgtacactgagctgctctacaccaacaagtgctacatgcgggacctctgcgtcatagatgcacagtggctgtacgaggctgcccctgagtactttaggaggaagctgagaaccgccagaaactgagccgccccaggatgccgccagaatcactggtccctgggagcttggactacagttgtccttacagcaggcttccaggttggcgcttagagaagccttggaatcagctgaaggtgcctgacttccaggagcgtgaaagcatctttgctcaactcctgggactgaaccatatagacatggacatatcatttgtacctggaaacctcaaaattatgcttttggttcttactgggtgactttgacttaatttaacacctgagcctcagttttctcatctgccaaatgggagtaataataataatccttataaaattgggttcataaagtttagagaaaaggaatggaaagtacccagaactatgcctggagcacgcacgacacacgtacagtgagttgggagccgttaggctgaatgttactgcttgccatatgatgtgaagtacagcaatatcccaagttcttgtgactgagggagattttctggaagggccacaggaggttgcggagcttggatgttgcccttagttcttgtttaatgtctctctgaatgcagttttaaaatagaaaacaaaactgacttctgtagaagtttccagagggaggtgctgttatctcgtacctcctgggatggcgatccctactgaacgcttgtgtctcagggtggaccactctgtgtctgtctccaagcagagaccagtaaaggagcctcctggtcctca

SEQ ID NO: 125610 - DNA, 2040 bp, Homo sapiens
  Payload ID: 4621
  Gene Symbol: DHX33
  Gene Name: DEAH (Asp-Glu-Ala-His) box polypeptide 33
  ENST ID: ENST00000574023
  CDS Start-End: 1-282
aagagattccggccaggctctggacctccgagccgcgctgggtccttccctcccgggaggcaagtggtgatgctgctgactgcgggcagcggcggcagaggaggaggaggaggccggaggcagcagccgcccctggcccagccctcggccagtccctaccctgaagctgtggagctgcagcgccggagtctgcccatcttccaagcgcgggggcaactgttggcccagctccgaaacctggacaacgcggtcctcatcggttggctatacagtgcgctttgatgatgtcacctcagaagacaccaggatcaagtttctgacagatggcatgcttctgcgtgaagcaatttcagactctttgcttcggaaatacagctgtgtcattttggatgaagctcacgaacggactatccacacagatgtgctctttggagtggtgaaagctgcacagaagaggagaaaggaactcgggaaacttcctctgaaagtgattgtgatgtcagctacgatggatgtggacctgttctctcagtatttcaatggcgcccccgtcctctacctagagggtcggcagcatccgatccaggtgttttacaccaaacagcctcagaatgattacctgcacgccgcgcttgtctccgtcttccagatccaccaggaagccccttcttcacaggacatcctggtgttcctcactgggcaggaggagatcgaagccatgagcaagacgtgccgagacattgcaaagcacctcccagacggctgccctgcgatgctggtccttcctctgtacgcctccctgccctatgcacagcagctccgagtcttccaaggggccccaaagggctatcgcaaagtgatcatttcaaccaacatcgctgaaacctccataaccattacaggaataaaatatgtagttgacacgggcatggttaaagcaaagaagtataaccctgacagtggtcttgaggtgttagcagtgcagcgggtatcgaagacgcaggcttggcagcgcacagggagggctggcagagaggacagtggcatctgctaccggctctacacggaggacgagtttgagaagtttgataagatgaccgtgccagagatccagaggtgtaacctggccagtgtgatgcttcagcttctagcaatgaaagtcccaaatgtgctcacctttgacttcatgtcgaagccatctccagatcacattcaggcggccattgcccaactggacctgttaggtgctcttgaacataaggatgaccagcttaccctgactccaatgggaagaaagatggcagcatttcctttagaacccaaatttgccaaaaccatcctcatgtcccccaaattccactgtacagaggagatcctgaccattgtctccctgctgtctgtggacagcgtcctccacaaccctccttcccggcgagaggaagtgcaaggggtccgcaagaagttcatatccagcgagggggatcacatgaccctgctcaatatctatcggaccttcaaaaacctaggcggaaataaggattggtgcaaagagaattttgtcaacagcaagaatatgacgctggtagcagaagtcagagcacagctgagggacatctgcttaaagatgtcaatgccaatcgcatcatcccgaggagacgtggagagtgtccgccgctgcctggctcacagcctcttcatgagcaccgccgagcttcagccagatggcacctatgccaccacggacacccaccagccagtggccatccacccgtcgtctgtcctcttccactgcaagccggcctgcgtcgtgtacactgagctgctctacaccaacaagtgctacatgcgggacctctgcgtcatagatgcacagtggctgtacgaggctgcccctgagtactttaggaggaagctgagaaccgccagaaactgagccgccccaggatgccgccagaatcactggtccctgggagcttggactacagttgtccttacagcaggcttccaggttggcgcttagagaagccttggaatcagctg

SEQ ID NO: 125611 - DNA, 2564 bp, Homo sapiens
  Payload ID: 4621
  Gene Symbol: DHX33
  Gene Name: DEAH (Asp-Glu-Ala-His) box polypeptide 33
  ENST ID: ENST00000572490
  CDS Start-End: 1-1852
gcgggcagcggcggcagaggaggaggaggaggccggaggcagcagccgcccctggcccagccctcggccagtccctaccctgaagctgtggagctgcagcgccggagtctgcccatcttccaagcgcgggggcaactgttggcccagctccgaaacctggacaacgcggtcctcatcggttggctatacagtgcgctttgatgatgtcacctcagaagacaccaggatcaagtttctgacagatggcatgcttctgcgtgaagcaatttcagactctttgcttcggaaatacagctgtgtcattttggatgaagctcacgaacggactatccacacagatgtgctctttggagtggtgaaagctgcacagaagaggagaaaggaactcgggaaacttcctctgaaagtgattgtgatgtcagctacgatggatgtggacctgttctctcagtatttcaatggcgcccccgtcctctacctagagggtcggcagcatccgatccaggtgttttacaccaaacagcctcagaatgattacctgcacgccgcgcttgtctccgtcttccagatccaccaggaagccccttcttcacaggacatcctggtgttcctcactgggcaggaggagatcgaagccatgagcaagacgtgccgagacattgcaaagcacctcccagacggctgccctgcgatgctggtccttcctctgtacgcctccctgccctatgcacagcagctccgagtcttccaaggggccccaaagggctatcgcaaagtgatcatttcaaccaacatcgctgaaacctccataaccattacaggaataaaatatgtagttgacacgggcatggttaaagcaaagaagtataaccctgacagtggtcttgaggtgttagcagtgcagcgggtatcgaagacgcaggcttggcagcgcacagggagggctggcagagaggacagtggcatctgctaccggctctacacggaggacgagtttgagaagtttgataagatgaccgtgccagagatccagaggtgtaacctggccagtgtgatgcttcagcttctagcaatgaaagtcccaaatgtgctcacctttgacttcatgtcgaagccatctccagatcacattcaggcggccattgcccaactggacctgttaggtgctcttgaacataaggatgaccagcttaccctgactccaatgggaagaaagatggcagcatttcctttagaacccaaatttgccaaaaccatcctcatgtcccccaaattccactgtacagaggagatcctgaccattgtctccctgctgtctgtggacagcgtcctccacaaccctccttcccggcgagaggaagtgcaaggggtccgcaagaagttcatatccagcgagggggatcacatgaccctgctcaatatctatcggaccttcaaaaacctaggcggaaataaggattggtgcaaagagaattttgtcaacagcaagaatatgacgctggtagcagaagtcagagcacagctgagggacatctgcttaaagatgtcaatgccaatcgcatcatcccgaggagacgtggagagtgtccgccgctgcctggctcacagcctcttcatgagcaccgccgagcttcagccagatggcacctatgccaccacggacacccaccagccagtggccatccacccgtcgtctgtcctcttccactgcaagccggcctgcgtcgtgtacactgagctgctctacaccaacaagtgctacatgcgggacctctgcgtcatagatgcacagtggctgtacgaggctgcccctgagtactttaggaggaagctgagaaccgccagaaactgagccgccccaggatgccgccagaatcactggtccctgggagcttggactacagttgtccttacagcaggcttccaggttggcgcttagagaagccttggaatcagctgaaggtgcctgacttccaggagcgtgaaagcatctttgctcaactcctgggactgaaccatatagacatggacatatcatttgtacctggaaacctcaaaattatgcttttggttcttactgggtgactttgacttaatttaacacctgagcctcagttttctcatctgccaaatgggagtaataataataatccttataaaattgggttcataaagtttagagaaaaggaatggaaagtacccagaactatgcctggagcacgcacgacacacgtacagtgagttgggagccgttaggctgaatgttactgcttgccatatgatgtgaagtacagcaatatcccaagttcttgtgactgagggagattttctggaagggccacaggaggttgcggagcttggatgttgcccttagttcttgtttaatgtctctctgaatgcagttttaaaatagaaaacaaaactgacttctgtagaagtttccagagggaggtgctgttatctcgtacctcctgggatggcgatccctactgaacgcttgtgtctcagggtggaccactctgtgtctgtctccaagcagagaccagtaaaggagcctcctggtc

SEQ ID NO: 125612 - DNA, 4372 bp, Homo sapiens
  Payload ID: 4622
  Gene Symbol: DHX34
  Gene Name: DEAH (Asp-Glu-Ala-His) box polypeptide 34
  Uniprot ID: Q14147
  ENST ID: ENST00000328771
  CDS Start-End: 350-3781
acgagatggctgtgtgcgcaggcgcaagactagcgctcttgggaccggaagttaaggcgttcgcggcgtgtgaatccagggcctgaaaacccagaatgaacttgtgtccatcccagagatcactgcagatgtcatgaggtaccctttgtgtcaccagctcaagcaggcctctggccactttatcatctgtggtggtcctgtgccgtgaccaggaggaaaaattagctctttgaagagaaagtagttctctattgcaggcactggcctcttaaattgttgcaggtggggaatggatgagaatatttgttttgggtgatcagaactgagactcctattgtggattagtaacatgcctcctcctagaacaagggagggcagggatcgccgagaccaccaccgggctcccagcgaggaagaggccttggagaaatgggactggaattgtccagagacgcgtcgcctcttggaagatgccttcttccgtgaagaggattacatccgtcagggttctgaggaatgtcagaagttttggaccttctttgaacgcctgcagagattccagaatctcaagacctccaggaaggaggagaaagaccctggacagcccaagcacagcatcccagcgctggccgacctacctcgcacttacgacccacgttaccgcatcaacctctctgttcttggccctgccacgcggggctctcagggactgggcaggcacttgcccgcggagagagtggctgagttccgccgagccctgttgcactacctggactttggccagaagcaggcatttgggcgtctggccaagctgcagcgtgagcgggcagccctccccatcgcccagtatgggaaccgcatcctgcagacgctgaaggagcaccaggtggtggtagtggccggtgacaccggctgtggcaagtccactcaggtgccccagtacctgctggctgctggcttcagtcatgtggcgtgcacccagccccggcggatcgcctgcatctcactggccaagcgtgtgggctttgagagcctcagtcagtatggctcacaggtcggctaccagatccgctttgagagcacacgttcggcggccaccaagattgtattcctgacagtggggctgctcctgcgacaaatccagcgggaacccagcctgccccagtatgaggtcctgattgtggatgaagtccatgagcggcatctccacaacgatttcctcctgggcgtcctccagcgcctgttgcccacgcggcctgacctcaaggtcatcctcatgtcggccaccatcaacatctcgctcttctccagctatttcagcaatgcccctgtggtacaggtgcctgggaggctgttccccatcacggttgtgtaccagccgcaggaggcggagccgaccacgtccaagtcagagaagctggacccgcggcctttcctgagggtgctggagtccattgaccacaagtacccgcctgaggagcggggtgacctcctcgtcttcctcagcggcatggcggagatcagcgccgtgctggaggctgcccagacctatgccagccacacccagcgctgggtggtactgccactgcacagcgccctgtctgtggccgaccaggacaaggtatttgatgtggcaccccctggagtccggaaatgcatcctctccaccaacattgctgagacctcagtcaccattgacgggatccgcttcgtagtagattccggaaaggtgaaggagatgagctacgatccgcaggccaagctgcaacggctgcaggagttctggattagtcaggccagcgcagagcagcggaagggccgggcgggccgcacgggccccggagtctgcttccgcctctatgccgaatcggactatgatgccttcgccccctaccccgtcccagaaattcggagggtggccctggactcgttggtgctgcagatgaagagcatgagtgtgggggacccccgaaccttccccttcatcgagcccccaccaccagccagcctggaaaccgccatcctctacctccgggaccagggggccctggacagctcagaggccctcacacccattgggtccctgctagcccagctgcctgtggacgttgtgattgggaagatgctgatcctgggctccatgttcagcctggtggagcctgtgctcaccatcgcagccgcacttagcgtccagtcgcccttcacccgcagcgcccagagcagcccagagtgcgcggcagcacggcggccgctggagagcgaccagggtgaccccttcacgctcttcaacgtcttcaacgcctgggtgcaggtgaaatctgaacggagcagaaactctcgcaagtggtgccgccgccggggcatagaggagcatcgactgtacgaaatggccaaccttcggcgccagttcaaggagctgttggaggaccacgggctgctggctggggcccaggccgcgcaggtaggggacagctacagtcggttgcagcagcgccgggagcgccgggccctgcaccagctgaaacgccagcacgaggagggcgcggggcgcaggcgcaaggtgctgcggctgcaggaggagcaggacggcggctccagtgacgaggacagggctggcccagcccccccaggggccagtgatggcgtggacatccaggatgtgaagttcaagcttcggcatgacctggcgcagctgcaggccgctgccagctcagcccaggacctgagccgcgagcagctggctctgctgaagctggtgctgggccggggcctgtacccacagctggccgtccccgacgccttcaacagcagccgaaaggactcagaccagattttccacacgcaggccaagcagggcgccgtgctgcaccccacctgcgtcttcgctggcagccccgaggtgctgcacgcacaggagctggaggccagcaactgcgacggaagccgagacgacaaggacaagatgagcagcaaacaccagctcctcagcttcgtgtccctgctggagaccaacaagccgtacctggtgaactgcgtccgcatccctgccctccagtccctcctgctttttagccggtctttggacaccaatggtgactgctcccgcctggtggccgatggctggctggagctgcagctagcagacagtgaaagtgccatccgactcctggcggcttccctgcggctccgtgcccgctgggaaagtgccctggaccggcagctggcgcaccaggcccagcagcagctggaggaggaggaggaggatacgccagtcagccccaaggaggtggccaccctgagcaaggaactcctgcaattcacggcatccaagattccttacagcctccggcggctcacagggctagaagtccagaacatgtatgtgggaccccagaccatcccagccaccccccatcttcctggcctctttggcagctccaccctgtccccccaccccacaaaggggggctacgcagtcactgacttcctcacctacaactgcctcacgaatgacacagacctgtacagcgactgtctccgaaccttctggacctgcccccactgtggcctgcatgcgcccctcacgcccctggagcgcatcgcccatgagaacacctgcccccaggccccacaggatgggcccccaggggctgaggaagctgccctcgaaaccctccagaagacatctgtcctgcagaggccctaccactgcgaggcctgcgggaaggacttcctctttacacccacagaggtgctgcgccaccggaagcagcacgtgtgagctgggccaggagccctgcccacctccgtgcagctgacctgccctccagcccaggactaggggcaggactcttgcctgaacccccagcctgggcttagccctgtggtcctgtcccagtgcagagggcctggagcacggattgtgaataaagcctcacatgctgatacacactgttaggcctgcacctgcccatccagaaagcagcagctgccttgttagtcctccccagggtctagctttccttcttcctgctgcagggtgctgcctgaggggtcctgggtaggaggggcgttagagccagcagggacctcccatgtctccagattccaggtgcaggttcttagcacctccgcagccgctctctcttgagtccatcctcagtctctcctaccccttgaagtagggggaccctgaatttgcccatccacctgggtcactttgagagttgtgcaggggggctgggagcactggtgttcacgtgggaccacaggctgcaccataagacccactcacaataaaaaaataaaaggccgagccgggcatggttgctcactcccgtaataaaaaaataaaagaacaggctgagccggg

SEQ ID NO: 125613 - DNA, 1838 bp, Homo sapiens
  Payload ID: 4622
  Gene Symbol: DHX34
  Gene Name: DEAH (Asp-Glu-Ala-His) box polypeptide 34
  ENST ID: ENST00000460681
  CDS Start-End: 1-817
tagcgtccagtcgcccttcacccgcagcgcccagagcagcccagagtgcgcggcagcacggcggccgctggagagcgaccagggtgaccccttcacgctcttcaacgtcttcaacgcctgggtgcaggtgaaatctgaacggagcagaaactctcgcaagtggtgccgccgccggggcatagaggagcatcgactgtacgaaatggccaaccttcggcgccagttcaaggagctgttggaggaccacgggctgctggctggggcccaggccgcgcaggtaggggacagctacagtcggttgcagcagcgccgggagcgccgggccctgcaccagctgaaacgccagcacgaggagggcgcggggcgcaggcgcaaggtgctgcggctgcaggaggagcaggacggcggctccagtgacgaggacagggctggcccagcccccccaggggccagtgatggcgtggacatccaggatgtgaagttcaagcttcggcatgacctggcgcagctgcaggccgctgccagctcagcccaggacctgagccgcgagcagctggctctgctgaagctggtgctgggccggggcctgtacccacagctggccgtccccgacgccttcaacagcagccgaaaggactcagaccagattttccacacgcaggccaagcagggcgccgtgctgcaccccacctgcgtcttcgctggcagccccgaggtgctgcacgcacaggagctggaggccagcaactgcgacggaagccgaggcatggctgcgtgctgggagtcacattcagatttggctgaccttcttgtctgagccaggccaccaaagccatgccacgacaaggacaagatgagcagcaaacaccagctcctcagcttcgtgtccctgctggagaccaacaagccgtacctggtgaactgcgtccgcatccctgccctccagtccctcctgctttttagccggtctttggacaccaatggtgactgctcccgcctggtggccgatggctggctggagctgcagctagcagacagtgaaagtgccatccgactcctggcggcttccctgcggctccgtgcccgctgggaaagtgccctggaccggcagctggcgcaccaggcccagcagcagctggaggaggaggaggaggatacgccagtcagccccaaggaggtggccaccctgagcaaggaactcctgcaattcacggcatccaagattccttacagcctccggcggctcacagggctagaagtccagaacatgtatgtgggaccccagaccatcccagccaccccccatcttcctggcctctttggcagctccaccctgtccccccaccccacaaaggggggctacgcagtcactgacttcctcacctacaactgcctcacgaatgacacagacctgtacagcgactgtctccgaaccttctggacctgcccccactgtggcctgcatgcgcccctcacgcccctggagcgcatcgcccatgagaacacctgcccccaggccccacaggatgggcccccaggggctgaggaagctgccctcgaaaccctccagaagacatctgtcctgcagaggccctaccactgcgaggcctgcgggaaggacttcctctttacacccacagaggtgctgcgccaccggaagcagcacgtgtgagctgggccaggagccctgcccacctccgtgcagctgacctgccctccagcccaggactaggggcaggactcttgcctgaacccccagcctgggcttagccctgtggtcctgtcccagtgcagagggcctggagcacggattgtgaataaagcctcacatgctgata

SEQ ID NO: 125614 - DNA, 3325 bp, Homo sapiens
  Payload ID: 4623
  Gene Symbol: DHX35
  Gene Name: DEAH (Asp-Glu-Ala-His) box polypeptide 35
  Uniprot ID: Q9H5Z1
  ENST ID: ENST00000252011
  CDS Start-End: 34-2145
ggtggagctagcctcgtgaccttttaccccaacatggctgcgcccgtgggaccggtgaagttctggcgacccggtacagaggggccaggtgtaagcatctctgaagagagacaaagtctggctgaaaactctgggacaacggttgtttacaacccttatgctgccctttccatagagcagcagaggcagaagctgccggtattcaagcttaggaatcatattttatacttgatagaaaattatcagacagtggtgattgttggtgaaacaggatgtgggaagagcacacagattcctcagtaccttgcagaagccggctggacagctgaaggaagagtggtaggagtgacccagcctcgaagagtggctgctgttacagttgcagggagagtagctgaagaaaggggtgcagtgctgggccacgaggtgggctactgcatccgctttgatgactgcaccgaccagctggccacgagaattaagtttcttactgatggaatgctggtcagggaaatgatggttgatccgttgttaacaaaatatagtgtcatcatgctggatgaagcccacgagaggaccttgtacactgacattgccattggcttgctaaaaaagattcagaaaaagcgaggggatcttcgattgattgtagcttcagccactctggatgcagacaaattccgggatttctttaatcaaaatgaaaccagtgatccagcaagggatacatgtgtgatccttacagtggaagggagaacatttccggtggatatcttttatctacaaagtcctgttccagattatatcaaatcaactgtcgaaactgtggtgaaaattcaccagacagagggagacggagacgttttagcatttcttactggccaggaagaggtagaaactgttgtgtcgatgctcatcgagcaggctcgagcactagctcgcactgggatgaagagacacctccgagttctccccatgtatgcaggactgccttcctttgagcaaatgaaagtgtttgaaagggtgtcacgcagtgtcagaaaggtgatagtggccaccaatgtggcagaaacctctatcacaatcagcggcattgtgtatgtgatcgactgtggctttgtgaaactccgagcctacaatcccaggacagctattgaatgcttggtggtggtgccagtctcccaggcatcagctaatcagcgagcaggacgtggtggtcgtagtcgctcgggaaaatgttatcgcctttatacagaggaagcctttgacaagttgcctcagtctacggttcctgagatgcagcgtagtaatttggcacctgtcatcctgcagctgaaagcactaggaattgacaatgtcctcaggttccacttcatgtcgccccctccagcacagtcgatggttcaagccttggagttactgtatgctctgggaggtctggacaaagactgtcgcctaactgaaccgcttggcatgagaattgcagagtttcctttgaatcccatgtttgccaaaatgctgcttgaatcaggaaacttcggctgttctcaggaaattctaagcatcgctgccatgatgcagatccagaatatctttgtggtccccccaaaccagaagtctcacgcaattcgagtgcaccgtaaatttgctgtggaggagggcgaccacctcactatgctcaatatatatgaagcatttatcaaacacaataaggactctaaatggtgtcaggaacatttcctgaattacaagggtcttgtcagagctgcgactgtaagagaacaattgaaaaagcttcttgtcaagtttcaagtgcccaggaagtctagtgaaggtgacccggatctggttctgaggtgcattgtctccggcttcttcgccaatgcagcgaggtttcattctactggagcttataggaccatccgtgatgaccatgagctgcacatacaccctgcgtcagtcctctatgcagagaagccgcctcgctgggtcatctataacgaagttatacagacctccaagtactacatgagagatgtgactgccattgaatcggcctggctgttggagctggctccacacttttatcaacaaggaacgcacctgtctctgaaagccaaaagggccaaggtccaggacccgtgagaggagcccacagctacagctgcagggactgctggcgtcctctcctccatgctgctgcccctggtcccaggtggggtgagctggcaccagctcctgtggaatgtttggttgctctgaagtgggctgcggcctgttcattagtcctttcttcccgctgcccacagcatttgcatccttgctgggatcctggaggactttgtgcatgggcaggcatccttctgtgctgcagcgggcagagtgggagttggctcactcagcacgctcactaacccagcatgccacttccagcaggcatgcagtcctggcccagctctatgggaaacaaggaggaaagttagccactgaaggccaaaacaccatgtggggtggacagagggtttgctgggctggctttgctttccctgctggggccacagctgtgttaaccaatgaggtctgctgccaggtgtgaacaagcatgtctctacgaatgaacgaaacattggggatctctgccgaaaccaccaaagggcatgtctgatgggcacagggtctcccaaacccagtggcttctgtctgtcctcagcccttgtccctgtttatctgcagccaggagacttgcaagggattggtgattgacagagaggactcgtgcgctgttttgtgttagcagaggatttgtgtttcacaggtaggcttagcgtcctctcagagtgtagtgccaggtcctggtgccacgctagctgagcactcaggagagttcatcagctcagatcccacagggcctcctctttagcaggaattcacaacagtttggatgccctaaacttctgtagctcaggaacatcactggtgtatttgtttttttgtttgtttgcttgggttcttgcaagagcgcgtggggacagttcttccagcaggcactggttttgttgccccagggctgctttgctgtgatgatgattgcatttcaacacatgccagatgcagattttttcccccttactgtttcaatgacctttattttaaaaacacatagcttgaaaatttatttttatactgatattagtttggatgtgccacttttggcaccaaacgtgtatgtcatttttatttccattttataaacatgtaaataatagtgataacttgttaataatagtaaacctttatacctaaagtaaatgtcttccctcccaca

SEQ ID NO: 125615 - DNA, 2347 bp, Homo sapiens
  Payload ID: 4623
  Gene Symbol: DHX35
  Gene Name: DEAH (Asp-Glu-Ala-His) box polypeptide 35
  Uniprot ID: Q9H5Z1
  ENST ID: ENST00000373323
  CDS Start-End: 25-2043
agcctcgtgaccttttaccccaacatggctgcgcccgtgggaccggtgaagttctggcgacccggtacagaggggccaggtgtaagcatctctgaagagagacaaagtctggctgaaaactctgggacaacggttgtttacaacccttatgctgccctttccatagagcagcagaggcagaagctgccggtattcaagtaccttgcagaagccggctggacagctgaaggaagagtggtaggagtgacccagcctcgaagagtggctgctgttacagttgcagggagagtagctgaagaaaggggtgcagtgctgggccacgaggtgggctactgcatccgctttgatgactgcaccgaccagctggccacgagaattaagtttcttactgatggaatgctggtcagggaaatgatggttgatccgttgttaacaaaatatagtgtcatcatgctggatgaagcccacgagaggaccttgtacactgacattgccattggcttgctaaaaaagattcagaaaaagcgaggggatcttcgattgattgtagcttcagccactctggatgcagacaaattccgggatttctttaatcaaaatgaaaccagtgatccagcaagggatacatgtgtgatccttacagtggaagggagaacatttccggtggatatcttttatctacaaagtcctgttccagattatatcaaatcaactgtcgaaactgtggtgaaaattcaccagacagagggagacggagacgttttagcatttcttactggccaggaagaggtagaaactgttgtgtcgatgctcatcgagcaggctcgagcactagctcgcactgggatgaagagacacctccgagttctccccatgtatgcaggactgccttcctttgagcaaatgaaagtgtttgaaagggtgtcacgcagtgtcagaaaggtgatagtggccaccaatgtggcagaaacctctatcacaatcagcggcattgtgtatgtgatcgactgtggctttgtgaaactccgagcctacaatcccaggacagctattgaatgcttggtggtggtgccagtctcccaggcatcagctaatcagcgagcaggacgtggtggtcgtagtcgctcgggaaaatgttatcgcctttatacagaggaagcctttgacaagttgcctcagtctacggttcctgagatgcagcgtagtaatttggcacctgtcatcctgcagctgaaagcactaggaattgacaatgtcctcaggttccacttcatgtcgccccctccagcacagtcgatggttcaagccttggagttactgtatgctctgggaggtctggacaaagactgtcgcctaactgaaccgcttggcatgagaattgcagagtttcctttgaatcccatgtttgccaaaatgctgcttgaatcaggaaacttcggctgttctcaggaaattctaagcatcgctgccatgatgcagatccagaatatctttgtggtccccccaaaccagaagtctcacgcaattcgagtgcaccgtaaatttgctgtggaggagggcgaccacctcactatgctcaatatatatgaagcatttatcaaacacaataaggactctaaatggtgtcaggaacatttcctgaattacaagggtcttgtcagagctgcgactgtaagagaacaattgaaaaagcttcttgtcaagtttcaagtgcccaggaagtctagtgaaggtgacccggatctggttctgaggtgcattgtctccggcttcttcgccaatgcagcgaggtttcattctactggagcttataggaccatccgtgatgaccatgagctgcacatacaccctgcgtcagtcctctatgcagagaagccgcctcgctgggtcatctataacgaagttatacagacctccaagtactacatgagagatgtgactgccattgaatcggcctggctgttggagctggctccacacttttatcaacaaggaacgcacctgtctctgaaagccaaaagggccaaggtccaggacccgtgagaggagcccacagctacagctgcagggactgctggcgtcctctcctccatgctgctgcccctggtcccaggtggggtgagctggcaccagctcctgtggaatgtttggttgctctgaagtgggctgcggcctgttcattagtcctttcttcccgctgcccacagcatttgcatccttgctgggatcctggaggactttgtgcatgggcaggcatccttctgtgctgcagcgggcagagtgggagttggctcactcagcacgctcactaacccagcatgccacttccagcaggcatgcagtcctg

SEQ ID NO: 125616 - DNA, 3287 bp, Homo sapiens
  Payload ID: 4623
  Gene Symbol: DHX35
  Gene Name: DEAH (Asp-Glu-Ala-His) box polypeptide 35
  ENST ID: ENST00000373325
  CDS Start-End: 70-2109
ccctccgggccctgggggcctagcgcgcgacggtggggtggagctagcctcgtgaccttttaccccaacatggctgcgcccgtgggaccggtgaagttctggcgacccggtacagaggggccaggtgtaagcatctctgaagagagacaaagtctggctgaaaactctgggacaacggttgtttacaacccttatgctgccctttccatagagcagcagaggcagaagctgccggtattcaagcttaggaatcatattttatacttgatagaaaattatcagacagtggtgattgttggtgaaacaggatgtgggaagagcacacagattcctcagtaccttgcagaagccggctggacagctgaaggaagagtggtaggagtgacccagcctcgaagagtggctgctgttacagttgcagggagagtagctgaagaaaggggtgcagtgctgggccacgaggtgggctactgcatccgctttgatgactgcaccgaccagctggccacgagaattaagtttcttactgatggaatgctggtcagggaaatgatggttgatccgttgttaacaaaatatagtgtcatcatgctggatgaagcccacgagaggaccttgtacactgacattgccattggcttgctaaaaaagattcagaaaaagcgaggggatcttcgattgattgtagcttcagccactctggatgcagacaaattccgggatttctttaatcaaaatgaaaccagtgatccagcaagggatacatgtgtgatccttacagtggaagggagaacatttccggtggatatcttttatctacaaagtcctgttccagattatatcaaatcaactgtcgaaactgtggtgaaaattcaccagacagagggagacggagacgttttagcatttcttactggccaggaagaggtagaaactgttgtgtcgatgctcatcgagcaggctcgagcactagctcgcactgggatgaagagacacctccgagttctccccatgtatgcaggactgccttcctttgagcaaatgaaagtgtttgaaagggtgtcacgcagtgtcagaaaggtgatagtggccaccaatgtggcagaaacctctatcacaatcagcggcattgtgtatgtgatcgactgtggctttgtgaaactccgagcctacaatcccaggacagctattgaatgcttggtggtggtgccagtctcccaggcatcagctaatcagcgagcaggacgtggtggtcgtagtcgctcgggaaaatgttatcgcctttatacagaggaagcctttgacaagttgcctcagtctacggttcctgagatgcagcgtagtaatttggcacctgtcatcctgcagctgaaagcactaggaattgacaatgtcctcaggttccacttcatgtcgccccctccagcacagtcgatggttcaagccttggagttactgtatgctctgggaggtctggacaaagactgtcgcctaactgaaccgcttggcatgagaattgcagagtttcctttgaatcccatgtttgccaaaatgctgcttgaatcaggaaacttcggctgttctcaggaaattctaagcatcgctgccatgatgcagatccagaatatctttgtggtccccccaaaccagaagtctcacgcaattcgagtgcaccgtaaatttgctgtggaggagggcgaccacctcactatgctcaatatatatgaagcatttatcaaacacaataaggactctaaatggtgtcaggaacatttcctgaattacaagggtcttgtcagagctgcgactgtaagagaacaattgaaaaagcttcttgtcaagtttcaagtgcccaggaagtctagtgaaggtgacccggatctggttctgaggtgcattgtctccggcttcttcgccaatgcagcgaggtttcattctactggagcttatagggtcatctataacgaagttatacagacctccaagtactacatgagagatgtgactgccattgaatcggcctggctgttggagctggctccacacttttatcaacaaggaacgcacctgtctctgaaagccaaaagggccaaggtccaggacccgtgagaggagcccacagctacagctgcagggactgctggcgtcctctcctccatgctgctgcccctggtcccaggtggggtgagctggcaccagctcctgtggaatgtttggttgctctgaagtgggctgcggcctgttcattagtcctttcttcccgctgcccacagcatttgcatccttgctgggatcctggaggactttgtgcatgggcaggcatccttctgtgctgcagcgggcagagtgggagttggctcactcagcacgctcactaacccagcatgccacttccagcaggcatgcagtcctggcccagctctatgggaaacaaggaggaaagttagccactgaaggccaaaacaccatgtggggtggacagagggtttgctgggctggctttgctttccctgctggggccacagctgtgttaaccaatgaggtctgctgccaggtgtgaacaagcatgtctctacgaatgaacgaaacattggggatctctgccgaaaccaccaaagggcatgtctgatgggcacagggtctcccaaacccagtggcttctgtctgtcctcagcccttgtccctgtttatctgcagccaggagacttgcaagggattggtgattgacagagaggactcgtgcgctgttttgtgttagcagaggatttgtgtttcacaggtaggcttagcgtcctctcagagtgtagtgccaggtcctggtgccacgctagctgagcactcaggagagttcatcagctcagatcccacagggcctcctctttagcaggaattcacaacagtttggatgccctaaacttctgtagctcaggaacatcactggtgtatttgtttttttgtttgtttgcttgggttcttgcaagagcgcgtggggacagttcttccagcaggcactggttttgttgccccagggctgctttgctgtgatgatgattgcatttcaacacatgccagatgcagattttttcccccttactgtttcaatgacctttattttaaaaacacatagcttgaaaatttatttttatactgatattagtttggatgtgccacttttggcaccaaacgtgtatgtcatttttatttccattttataaacatgtaaataatagtgataacttgttaataatagtaaacctttatacctaaagtaaatgtcttccctccca

SEQ ID NO: 125617 - DNA, 607 bp, Homo sapiens
  Payload ID: 4623
  Gene Symbol: DHX35
  Gene Name: DEAH (Asp-Glu-Ala-His) box polypeptide 35
  ENST ID: ENST00000449559
  CDS Start-End: 1-504
atcgctgccatgatgcagatccagaatatctttgtggtccccccaaaccagaagtctcacgcacacaataaggactctaaatggtgtcaggaacatttcctgaattacaagggtcttgtcagagctgcgactgtaagagaacaattgaaaaagcttcttgtcaagtttcaagtgcccaggaagtctagtgaaggtgacccggatctggttctgaggtgcattgtctccggcttcttcgccaatgcagcgaggtttcattctactggagcttataggaccatccgtgatgaccatgagctgcacatacaccctgcgtcagtcctctatgcagagaagccgcctcgctgggtcatctataacgaagttatacagacctccaagtactacatgagagatgtgactgccattgaatcggcctggctgttggagctggctccacacttttatcaacaaggaacgcacctgtctctgaaagccaaaagggccaaggtccaggacccgtgagaggagcccacagctacagctgcagggactgctggcgtcctctcctccatgctgctgcccctggtcccaggtggggtgagctggcaccagctcctgtggaatg

SEQ ID NO: 125618 - DNA, 3318 bp, Homo sapiens
  Payload ID: 4623
  Gene Symbol: DHX35
  Gene Name: DEAH (Asp-Glu-Ala-His) box polypeptide 35
  ENST ID: ENST00000484417
  CDS Start-End: 9-389
accccaacatggctgcgcccgtgggaccggtgaagttctggcgacccggtacagaggggccaggtgtaagcatctctgaagagagacaaagtctggctgaaaactctgggacaacggttgtttacaacccttatgctgccctttccatagagcagcagaggcagaagctgccggtattcaagcttaggaatcatattttatacttgatagaaaattatcagacagtggtgattgttggtgaaacaggatgtgggaagagcacacagattcctcagtaccttgcagaagccggctggacagctgaaggaagagtggtaggagtgacccagcctcgaagagtggctgctgttacacatgatctttcttcccaaaggttgcagggagagtagctgaagaaaggggtgcagtgctgggccacgaggtgggctactgcatccgctttgatgactgcaccgaccagctggccacgagaattaagtttcttactgatggaatgctggtcagggaaatgatggttgatccgttgttaacaaaatatagtgtcatcatgctggatgaagcccacgagaggaccttgtacactgacattgccattggcttgctaaaaaagattcagaaaaagcgaggggatcttcgattgattgtagcttcagccactctggatgcagacaaattccgggatttctttaatcaaaatgaaaccagtgatccagcaagggatacatgtgtgatccttacagtggaagggagaacatttccggtggatatcttttatctacaaagtcctgttccagattatatcaaatcaactgtcgaaactgtggtgaaaattcaccagacagagggagacggagacgttttagcatttcttactggccaggaagaggtagaaactgttgtgtcgatgctcatcgagcaggctcgagcactagctcgcactgggatgaagagacacctccgagttctccccatgtatgcaggactgccttcctttgagcaaatgaaagtgtttgaaagggtgtcacgcagtgtcagaaaggtgatagtggccaccaatgtggcagaaacctctatcacaatcagcggcattgtgtatgtgatcgactgtggctttgtgaaactccgagcctacaatcccaggacagctattgaatgcttggtggtggtgccagtctcccaggcatcagctaatcagcgagcaggacgtggtggtcgtagtcgctcgggaaaatgttatcgcctttatacagaggaagcctttgacaagttgcctcagtctacggttcctgagatgcagcgtagtaatttggcacctgtcatcctgcagctgaaagcactaggaattgacaatgtcctcaggttccacttcatgtcgccccctccagcacagtcgatggttcaagccttggagttactgtatgctctgggaggtctggacaaagactgtcgcctaactgaaccgcttggcatgagaattgcagagtttcctttgaatcccatgtttgccaaaatgctgcttgaatcaggaaacttcggctgttctcaggaaattctaagcatcgctgccatgatgcagatccagaatatctttgtggtccccccaaaccagaagtctcacgcaattcgagtgcaccgtaaatttgctgtggaggagggcgaccacctcactatgctcaatatatatgaagcatttatcaaacacaataaggactctaaatggtgtcaggaacatttcctgaattacaagggtcttgtcagagctgcgactgtaagagaacaattgaaaaagcttcttgtcaagtttcaagtgcccaggaagtctagtgaaggtgacccggatctggttctgaggtgcattgtctccggcttcttcgccaatgcagcgaggtttcattctactggagcttataggaccatccgtgatgaccatgagctgcacatacaccctgcgtcagtcctctatgcagagaagccgcctcgctgggtcatctataacgaagttatacagacctccaagtactacatgagagatgtgactgccattgaatcggcctggctgttggagctggctccacacttttatcaacaaggaacgcacctgtctctgaaagccaaaagggccaaggtccaggacccgtgagaggagcccacagctacagctgcagggactgctggcgtcctctcctccatgctgctgcccctggtcccaggtggggtgagctggcaccagctcctgtggaatgtttggttgctctgaagtgggctgcggcctgttcattagtcctttcttcccgctgcccacagcatttgcatccttgctgggatcctggaggactttgtgcatgggcaggcatccttctgtgctgcagcgggcagagtgggagttggctcactcagcacgctcactaacccagcatgccacttccagcaggcatgcagtcctggcccagctctatgggaaacaaggaggaaagttagccactgaaggccaaaacaccatgtggggtggacagagggtttgctgggctggctttgctttccctgctggggccacagctgtgttaaccaatgaggtctgctgccaggtgtgaacaagcatgtctctacgaatgaacgaaacattggggatctctgccgaaaccaccaaagggcatgtctgatgggcacagggtctcccaaacccagtggcttctgtctgtcctcagcccttgtccctgtttatctgcagccaggagacttgcaagggattggtgattgacagagaggactcgtgcgctgttttgtgttagcagaggatttgtgtttcacaggtaggcttagcgtcctctcagagtgtagtgccaggtcctggtgccacgctagctgagcactcaggagagttcatcagctcagatcccacagggcctcctctttagcaggaattcacaacagtttggatgccctaaacttctgtagctcaggaacatcactggtgtatttgtttttttgtttgtttgcttgggttcttgcaagagcgcgtggggacagttcttccagcaggcactggttttgttgccccagggctgctttgctgtgatgatgattgcatttcaacacatgccagatgcagattttttcccccttactgtttcaatgacctttattttaaaaacacatagcttgaaaatttatttttatactgatattagtttggatgtgccacttttggcaccaaacgtgtatgtcatttttatttccattttataaacatgtaaataatagtgataacttgttaataatagtaaacctttatacctaaagtaaatgtcttccctccca

SEQ ID NO: 125619 - DNA, 3487 bp, Homo sapiens
  Payload ID: 4624
  Gene Symbol: DHX36
  Gene Name: DEAH (Asp-Glu-Ala-His) box polypeptide 36
  Uniprot ID: Q9H2U1
  ENST ID: ENST00000308361
  CDS Start-End: 45-2984
ttccagcggttgctggttctgacgggttgtagtctgccaggacaatgagttatgactaccatcagaactggggccgtgatgggggtccccgcagctccggtgggggctatggaggggggccagcagggggtcatggaggtaaccgaggctccggaggaggcggcggcggcggagggggtggtcgaggcggcaggggccggcatcccgggcacctgaaaggccgcgaaatcggcatgtggtacgcgaaaaaacaggggcagaagaacaaggaagcggagaggcaagagagagctgtagtacacatggatgaacgacgagaagaacaaattgtacagttactgaattctgttcaagcgaagaatgataaagagtcagaagcacagatatcctggtttgctcctgaggatcatggatacggtactgaagtttctactaagaacacaccatgctcagagaacaaacttgacatccaggaaaagaagttgataaatcaagaaaaaaaaatgtttagaatcaggaacagatcatatattgaccgagattctgagtatctcttgcaagaaaatgaaccagatggaactttagaccaaaaattattggaagatttacaaaagaaaaaaaatgaccttcggtatattgaaatgcagcatttcagagaaaagctgccttcgtatggaatgcaaaaggaattggtaaatttaattgataaccatcaggtaacagtaataagtggtgaaactggttgtggcaaaaccactcaagttactcagttcattttggataactacattgaaagaggaaaaggatctgcttgcagaatagtttgtactcagccaagaagaattagtgccatttcagttgcggaaagagtagctgcagaaagggcagaatcttgtggcagtggtaatagtactggatatcaaattcgtctccagagtcggttgccaaggaaacagggttctatcttatactgtacaacaggaatcatccttcagtggctccagtcagacccgtatttgtccagtgttagtcatatcgtacttgatgaaatccatgaaagaaatctgcagtcagatgttttaatgactgttgttaaagaccttctcaattttcgatctgacttgaaagtaatattgatgagtgcaacattgaatgcagaaaagttttcagaatattttggtaactgtccaatgatacatatacctggttttacctttccggttgtggaatatcttttggaagatgtaattgaaaaaataaggtatgttccagaacaaaaagaacacagatcccagtttaagaggggtttcatgcaagggcatgtaaatagacaagaaaaagaagaaaaagaagcaatatataaagaacgttggccagattatgtaagggaactgcgaagaaggtattctgcaagtactgtagatgttatagaaatgatggaggatgataaagttgatctgaatttgattgttgccctcatccgatacattgttttggaagaagaggatggtgcgatactggtctttctgccaggctgggacaatatcagcactttacatgatctcttgatgtcacaagtaatgtttaaatcagataaatttttaattatacctttacattcactgatgcctacagttaaccagacacaggtgtttaaaagaacccctcctggtgttcggaaaatagtaattgctaccaacattgcggagactagcattaccatagatgatgtcgtttatgtgatagatggaggaaaaataaaagagacgcattttgatactcagaacaatatcagtacaatgtccgctgagtgggttagtaaagctaatgccaaacagagaaaaggtcgagctggaagagttcaacctggtcattgctatcatctgtataatggtcttagagcaagtcttctagatgactatcaactgccagaaattttgagaactcctttggaagaactttgtttacaaataaagattttaaggctaggtggaattgcttattttctgagtagattaatggacccaccatcaaatgaggcagtgttactctccataagacacctgatggagctgaacgctttggataaacaagaagaattgacacctcttggagtccacttggcacgattacccgttgagccacatattggaaaaatgattctttttggagcactgttctgctgcttagacccagtactcactattgctgctagtctcagtttcaaagatccatttgtcattccactgggctgggaagaggctaggcgacgtggtttcagatacgaaaaggactattgctgggaatattttctgtcttcaaacacactgcagatgctgcataacatgaaaggacagtttgctgagcatcttcttggagctggatttgtaagcagtagaaatcctaaagatccagaatctaatataaattcagataatgagaagataattaaagctgtcatctgtgctggtttatatcccaaagttgctaaaattcgactaaatttgggtaaaaaaagaaaaatggtaaaagtttacacaaaaaccgatggcctggttgctgttcatcctaaatctgttaatgtggagcaaacagactttcactacaactggcttatctatcacctaaagatgagaacaagcagtatatacttgtatgactgcacagaggtttccccatactgtctcttgttttttggaggtgacatttccatccagaaggataacgatcaggaaactattgctgtagatgagtggattgtatttcagtctccagcaagaattgcccatcttgttaaggaattaagaaaggaactagatattcttctgcaagagaagattgaaagtcctcatcctgtagactggaatgacactaaatccagagactgtgcagtactgtcagctattatagacttgatcaaaacacaggaaaaggcaactcccaggaactttccgccacgattccaggatggatattacagctgacagcttttcaggggtggtctgaaaagccagtttgacagccattcttcatcattgtttaaattttggctggatgccaaaccctgggacatgaacaattttcatgtgtaaggtagaagccttcagtaggtagtaaagacttaatgtgcatgacttgatgttatatgtagagatatatatatatatatatatataccataaaagcaatatgttctctgatcatatactctgctgtggtcatgcccactctttgggagtatattccctttatatatattgagtattgtaccacttgagaaattcctttgttctgttatacaaaattaatctttctgctcataatgattgatgataccaccagtaaaaataggatgtttaccccaaaacaagtgtcaattaagaatttgaacacaaccacattttttaaaatgaaacttctatcggaagtaaattaatttgttgtaataaagtccagtatttaataaaatgtacaatgttaaatctca

SEQ ID NO: 125620 - DNA, 2985 bp, Homo sapiens
  Payload ID: 4624
  Gene Symbol: DHX36
  Gene Name: DEAH (Asp-Glu-Ala-His) box polypeptide 36
  Uniprot ID: Q9H2U1
  ENST ID: ENST00000329463
  CDS Start-End: 1-2985
atgagttatgactaccatcagaactggggccgtgatgggggtccccgcagctccggtgggggctatggaggggggccagcagggggtcatggaggtaaccgaggctccggaggaggcggcggcggcggagggggtggtcgaggcggcaggggccggcatcccgggcacctgaaaggccgcgaaatcggcatgtggtacgcgaaaaaacaggggcagaagaacaaggaagcggagaggcaagagagagctgtagtacacatggatgaacgacgagaagaacaaattgtacagttactgaattctgttcaagcgaagaatgataaagagtcagaagcacagatatcctggtttgctcctgaggatcatggatacggtactgaagtttctactaagaacacaccatgctcagagaacaaacttgacatccaggaaaagaagttgataaatcaagaaaaaaaaatgtttagaatcaggaacagatcatatattgaccgagattctgagtatctcttgcaagaaaatgaaccagatggaactttagaccaaaaattattggaagatttacaaaagaaaaaaaatgaccttcggtatattgaaatgcagcatttcagagaaaagctgccttcgtatggaatgcaaaaggaattggtaaatttaattgataaccatcaggtaacagtaataagtggtgaaactggttgtggcaaaaccactcaagttactcagttcattttggataactacattgaaagaggaaaaggatctgcttgcagaatagtttgtactcagccaagaagaattagtgccatttcagttgcggaaagagtagctgcagaaagggcagaatcttgtggcagtggtaatagtactggatatcaaattcgtctccagagtcggttgccaaggaaacagggttctatcttatactgtacaacaggaatcatccttcagtggctccagtcagacccgtatttgtccagtgttagtcatatcgtacttgatgaaatccatgaaagaaatctgcagtcagatgttttaatgactgttgttaaagaccttctcaattttcgatctgacttgaaagtaatattgatgagtgcaacattgaatgcagaaaagttttcagaatattttggtaactgtccaatgatacatatacctggttttacctttccggttgtggaatatcttttggaagatgtaattgaaaaaataaggtatgttccagaacaaaaagaacacagatcccagtttaagaggggtttcatgcaagggcatgtaaatagacaagaaaaagaagaaaaagaagcaatatataaagaacgttggccagattatgtaagggaactgcgaagaaggtattctgcaagtactgtagatgttatagaaatgatggaggatgataaagttgatctgaatttgattgttgccctcatccgatacattgttttggaagaagaggatggtgcgatactggtctttctgccaggctgggacaatatcagcactttacatgatctcttgatgtcacaagtaatgtttaaatcagttaaccagacacaggtgtttaaaagaacccctcctggtgttcggaaaatagtaattgctaccaacattgcggagactagcattaccatagatgatgtcgtttatgtgatagatggaggaaaaataaaagagacgcattttgatactcagaacaatatcagtacaatgtccgctgagtgggttagtaaagctaatgccaaacagagaaaaggtcgagctggaagagttcaacctggtcattgctatcatctgtataatggtcttagagcaagtcttctagatgactatcaactgccagaaattttgagaactcctttggaagaactttgtttacaaataaagattttaaggctaggtggaattgcttattttctgagtagattaatggacccaccatcaaatgaggcagtgttactctccataagacacctgatggagctgaacgctttggataaacaagaagaattgacacctcttggagtccacttggcacgattacccgttgagccacatattggaaaaatgattctttttggagcactgttctgctgcttagacccagtactcactattgctgctagtctcagtttcaaagatccatttgtcattccactgggaaaagaaaagattgcagatgcaagaagaaaggaattggcaaaggatactagaagtgatcacttaacagttgtgaatgcgtttgagggctgggaagaggctaggcgacgtggtttcagatacgaaaaggactattgctgggaatattttctgtcttcaaacacactgcagatgctgcataacatgaaaggacagtttgctgagcatcttcttggagctggatttgtaagcagtagaaatcctaaagatccagaatctaatataaattcagataatgagaagataattaaagctgtcatctgtgctggtttatatcccaaagttgctaaaattcgactaaatttgggtaaaaaaagaaaaatggtaaaagtttacacaaaaaccgatggcctggttgctgttcatcctaaatctgttaatgtggagcaaacagactttcactacaactggcttatctatcacctaaagatgagaacaagcagtatatacttgtatgactgcacagaggtttccccatactgtctcttgttttttggaggtgacatttccatccagaaggataacgatcaggaaactattgctgtagatgagtggattgtatttcagtctccagcaagaattgcccatcttgttaaggaattaagaaaggaactagatattcttctgcaagagaagattgaaagtcctcatcctgtagactggaatgacactaaatccagagactgtgcagtactgtcagctattatagacttgatcaaaacacaggaaaaggcaactcccaggaactttccgccacgattccaggatggatattacagctga

SEQ ID NO: 125621 - DNA, 6733 bp, Homo sapiens
  Payload ID: 4624
  Gene Symbol: DHX36
  Gene Name: DEAH (Asp-Glu-Ala-His) box polypeptide 36
  Uniprot ID: Q9H2U1
  ENST ID: ENST00000496811
  CDS Start-End: 82-3108
aagtgggcgcacagtggcttccgggcccggacgccatttccagcggttgctggttctgacgggttgtagtctgccaggacaatgagttatgactaccatcagaactggggccgtgatgggggtccccgcagctccggtgggggctatggaggggggccagcagggggtcatggaggtaaccgaggctccggaggaggcggcggcggcggagggggtggtcgaggcggcaggggccggcatcccgggcacctgaaaggccgcgaaatcggcatgtggtacgcgaaaaaacaggggcagaagaacaaggaagcggagaggcaagagagagctgtagtacacatggatgaacgacgagaagaacaaattgtacagttactgaattctgttcaagcgaagaatgataaagagtcagaagcacagatatcctggtttgctcctgaggatcatggatacggtactgaagtttctactaagaacacaccatgctcagagaacaaacttgacatccaggaaaagaagttgataaatcaagaaaaaaaaatgtttagaatcaggaacagatcatatattgaccgagattctgagtatctcttgcaagaaaatgaaccagatggaactttagaccaaaaattattggaagatttacaaaagaaaaaaaatgaccttcggtatattgaaatgcagcatttcagagaaaagctgccttcgtatggaatgcaaaaggaattggtaaatttaattgataaccatcaggtaacagtaataagtggtgaaactggttgtggcaaaaccactcaagttactcagttcattttggataactacattgaaagaggaaaaggatctgcttgcagaatagtttgtactcagccaagaagaattagtgccatttcagttgcggaaagagtagctgcagaaagggcagaatcttgtggcagtggtaatagtactggatatcaaattcgtctccagagtcggttgccaaggaaacagggttctatcttatactgtacaacaggaatcatccttcagtggctccagtcagacccgtatttgtccagtgttagtcatatcgtacttgatgaaatccatgaaagaaatctgcagtcagatgttttaatgactgttgttaaagaccttctcaattttcgatctgacttgaaagtaatattgatgagtgcaacattgaatgcagaaaagttttcagaatattttggtaactgtccaatgatacatatacctggttttacctttccggttgtggaatatcttttggaagatgtaattgaaaaaataaggtatgttccagaacaaaaagaacacagatcccagtttaagaggggtttcatgcaagggcatgtaaatagacaagaaaaagaagaaaaagaagcaatatataaagaacgttggccagattatgtaagggaactgcgaagaaggtattctgcaagtactgtagatgttatagaaatgatggaggatgataaagttgatctgaatttgattgttgccctcatccgatacattgttttggaagaagaggatggtgcgatactggtctttctgccaggctgggacaatatcagcactttacatgatctcttgatgtcacaagtaatgtttaaatcagataaatttttaattatacctttacattcactgatgcctacagttaaccagacacaggtgtttaaaagaacccctcctggtgttcggaaaatagtaattgctaccaacattgcggagactagcattaccatagatgatgtcgtttatgtgatagatggaggaaaaataaaagagacgcattttgatactcagaacaatatcagtacaatgtccgctgagtgggttagtaaagctaatgccaaacagagaaaaggtcgagctggaagagttcaacctggtcattgctatcatctgtataatggtcttagagcaagtcttctagatgactatcaactgccagaaattttgagaactcctttggaagaactttgtttacaaataaagattttaaggctaggtggaattgcttattttctgagtagattaatggacccaccatcaaatgaggcagtgttactctccataagacacctgatggagctgaacgctttggataaacaagaagaattgacacctcttggagtccacttggcacgattacccgttgagccacatattggaaaaatgattctttttggagcactgttctgctgcttagacccagtactcactattgctgctagtctcagtttcaaagatccatttgtcattccactgggaaaagaaaagattgcagatgcaagaagaaaggaattggcaaaggatactagaagtgatcacttaacagttgtgaatgcgtttgagggctgggaagaggctaggcgacgtggtttcagatacgaaaaggactattgctgggaatattttctgtcttcaaacacactgcagatgctgcataacatgaaaggacagtttgctgagcatcttcttggagctggatttgtaagcagtagaaatcctaaagatccagaatctaatataaattcagataatgagaagataattaaagctgtcatctgtgctggtttatatcccaaagttgctaaaattcgactaaatttgggtaaaaaaagaaaaatggtaaaagtttacacaaaaaccgatggcctggttgctgttcatcctaaatctgttaatgtggagcaaacagactttcactacaactggcttatctatcacctaaagatgagaacaagcagtatatacttgtatgactgcacagaggtttccccatactgtctcttgttttttggaggtgacatttccatccagaaggataacgatcaggaaactattgctgtagatgagtggattgtatttcagtctccagcaagaattgcccatcttgttaaggaattaagaaaggaactagatattcttctgcaagagaagattgaaagtcctcatcctgtagactggaatgacactaaatccagagactgtgcagtactgtcagctattatagacttgatcaaaacacaggaaaaggcaactcccaggaactttccgccacgattccaggatggatattacagctgacagcttttcaggggtggtctgaaaagccagtttgacagccattcttcatcattgtttaaattttggctggatgccaaaccctgggacatgaacaattttcatgtgtaaggtagaagccttcagtaggtagtaaagacttaatgtgcatgacttgatgttatatgtagagatatatatatatatatatatataccataaaagcaatatgttctctgatcatatactctgctgtggtcatgcccactctttgggagtatattccctttatatatattgagtattgtaccacttgagaaattcctttgttctgttatacaaaattaatctttctgctcataatgattgatgataccaccagtaaaaataggatgtttaccccaaaacaagtgtcaattaagaatttgaacacaaccacattttttaaaatgaaacttctatcggaagtaaattaatttgttgtaataaagtccagtatttaataaaatgtacaatgttaaatctcagccaacctcttggattggtttctacattttcacctatggcttggttcatttgatatttttactatttttaaaacacgtgccctttttatatcaccctgtgcctcataatacagcaattgagagcacggtctggagcctgattacctcagttccagtctcagctctgtcagttagtcagtgtcttggcttctctcctttttccttatcttgtaagatacagttggcccttcatatccatgcattccacatctgtggattcaaacaactgtggatagaagatatttggggaaaaaaaggatggttgtgtctatactgaacatgtgcagacttttttccttgtcattccctaaacaatacagtttaacagctatttatatagtatttacattgtattaggtattataaataatctagagatgacttaaagaatatgggaggttgtgcctaggtaacatgcaaatactacgccattttattataaaagacttgagcatccatggatttaggtatttgaggggttggggttggaaaccagtcccccacagatactgagggacaactgtacatgtaacagttgtgaggatgaagtacattaatacatgtaaagcacataggctagtgcctgtactctctgaatcttagttgttatttgtccctgaaatattttcgtaaatgtctaacaatctattatattacactttttattttattgctacttatcttcttcgccaaggaatagtgtaacaacacatgctgtacattttcagccctatcagattgtgataaatactgttggttgccggccagcaactattttgtccctcccttcttgcttgcttattctggtgttcccttctgtgcagctctgtgtccaggtatgttggaccctttccctaagggtgaatcctgctgttctaaatgaatcacatgtggtcttatcccccttataagtaattgataaggcatgagtacataaacatgtcctagtgaatggcagctgagaagtgatcttcaagggggtgtctgaaaaatgttttactcactaataggcttagaggaggaaatcctgctctctctggacattgtcttttctgactctgatagttggaactgctgcagccaactaatgatcacaaggagacacggactcagactgaggttagctcagtggaaagatagaactcaccagagcctttgataatgccggtaagcttcagaattaacccattctagagctgctttacatgtggacttatgttgatataataaaaacccttcaattgtttaagccacttttaataggatattgttagttttttgttggttttttgttttgttttgttttgttttttgttttttggagacagtgtcttgccctgtcacccaggctggagtgcagtggtgtgatcttggttcactgcagcctcgacttcctgggttcaagtgatccttctgcctcagcctcccaaatagctgggactataggcatgcatcaccacacccagctaatttctgtattttttgtagagacaccgtttcaccatgttgcccaggctggtctcaaaactcctgtgctcaagcagtctgcccgccttggcttcccaaagtgctgacattacaggtatgagccactgcacccggtccctagtagggtatttttaacttggcaaaaagggtattaatcagaaacatacactatccatcactgagtattatactcttgattttgcaatgtaagagttttaacctatttgtctgacagaaggtgtaaaagtgctggacatgctgcagaaagaaacaggaaaagcatcttgctgcactccaaagaatgcaaattttaatgtgccttccaataaatgcaaggaaaccgaaagagttaatagtatcatacaatgactgggatgtattgataatgctacagtgatccattaacagcacttgttcaggtactgctcccaatcctgggaatgtgtgttacctgttatgtctcaaatcctttatcttggctgttcttctaaaagtgatctgtctgtcattgaatgctggcattagagtcatgtcacaatattagagcatactggttttgcctctaacgtcgaggtgaccatctggtctttcttgctctgtaagagtttctgtttgtgcttttttttcccttacttttattatccagtttaaatccagtcagttggccaaaatggtcttggaagaaaggatttagagattctgtaaaaaagattattagttggttctgtgtttgcaaaccagtatgtaattcccatatgaatggggaaaatgttcctgaggaattatttaattgatgaggcattcacagagattaaagcagttattgttacctccaatttatgtcttctgcacagctgattaggttggacattttaatccaaggtgctacttacattctgtttcttttgtttacaaaatagggcattactgagtagaaaatacattccaggtctaagaactgtttgttctttagtggattttaaagaataagacattaaattaagaaggaaaatctgtttgattcatcattttgagtaatgcagagaataactcttaaaaaaaaaacctgaaacagaaactttcaggaaaaaaacaaaagaaattaaactactgaataatctttcaaaagcatcgttgaacagtgagcacatgtgatgccttcccaattaattaatttgggcaaaagctctagataaacttacaccaattgttgcaaggcattctctattactgcatttttaaaacaaagtcctcccctaaaagttatgaattatacaaaagctttaggaggaattttagtactcctttacccaaaataaatagtggtaaatttccttctgttcttagctctgagtttgtatttatttataagtcattgtgatcatgtatacttatatatttttaatatgctaattgcttttaaatgggatttttgttctgattttaaaataatacatcctccctggacaatatttggaaatgtagcaaagtaaatcatgttaccattgttccattttgatatatataaactttaggtattattttatatataataaattttaagatattatatacaataaaattaaccaatttaa

SEQ ID NO: 125622 - DNA, 530 bp, Homo sapiens
  Payload ID: 4624
  Gene Symbol: DHX36
  Gene Name: DEAH (Asp-Glu-Ala-His) box polypeptide 36
  ENST ID: ENST00000479934
  CDS Start-End: 1-360
aacgctttggataaacaagaagaattgacacctcttggagtccacttggcacgattacccgttgagccacatattggaaaaatgattctttttggagcactgttctgctgcttagacccagtactcactattgctgctagtctcagtttcaaagatccatttgtcattccactgggaaaagaaaagattgcagatgcaagaagaaaggaattggcaaaggatactagaagtgatcacttaacagttgtgaatgcgtttgagggctgggaagaggctaggcgacgtggtttcagatacgaaaaggactattgctgggaatattttctgtcttcaaacacactgcagataatgagaagataattaaagctgtcatctgtgctggtttatatcccaaagttgctaaaattcgactaaatttgggtaaaaaaagaaaaatggtaaaagtttacacaaaaaccgatggcctggttgctgttcatcctaaatctgttaatgtggagcaaacagactttcactacaactggcttatc

SEQ ID NO: 125623 - DNA, 562 bp, Homo sapiens
  Payload ID: 4624
  Gene Symbol: DHX36
  Gene Name: DEAH (Asp-Glu-Ala-His) box polypeptide 36
  ENST ID: ENST00000469977
  CDS Start-End: 1-562
ttatacctttacattcactgatgcctacagttaaccagacacaggtgtttaaaagaacccctcctggtgttcggaaaatagtaattgctaccaacattgcggagactagcattaccatagatgatgtcgtttatgtgatagatggaggaaaaataaaagagacgcattttgatactcagaacaatatcagtacaatgtccgctgagtgggttagtaaagctaatgccaaacagagaaaaggtcgagctggaagagttcaacctggtcattgctatcatctgtataatggtcttagagcaagtcttctagatgactatcaactgccagaaattttgagaactcctttggaagaactttgtttacaaataaagaacgctttggataaacaagaagaattgacacctcttggagtccacttggcacgattacccgttgagccacatattggaaaaatgattctttttggagcactgttctgctgcttagacccagtactcactattgctgctagtctcagtttcaaagatccatttgtcattccactgggaaaagaaaagattgc

SEQ ID NO: 125624 - DNA, 2612 bp, Homo sapiens
  Payload ID: 4624
  Gene Symbol: DHX36
  Gene Name: DEAH (Asp-Glu-Ala-His) box polypeptide 36
  ENST ID: ENST00000481941
  CDS Start-End: 220-2612
ctagaagcagggtatttgagaatgtccaagaaagtgggaaataatcaaaattctatgataaaagaaaatagtcatgaaaaaaatgtgttttgagattctccaggcaaggagtgaaataaagtgaagcgtggtagaactagaagaaggttgttgagggggagagaggcatcctacaaaaaggcaagatccaagtttggaattaagagagctgtagtacacatggatgaacgacgagaagaacaaattgtacagttactgaattctgttcaagcgaagaatgataaagagtcagaagcacagatatcctggtttgctcctgaggatcatggatacggtactgaagtttctactaagaacacaccatgctcagagaacaaacttgacatccaggaaaagaagttgataaatcaagaaaaaaaaatgtttagaatcaggaacagatcatatattgaccgagattctgagtatctcttgcaagaaaatgaaccagatggaactttagaccaaaaattattggaagatttacaaaagaaaaaaaatgaccttcggtatattgaaatgcagcatttcagagaaaagctgccttcgtatggaatgcaaaaggaattggtaaatttaattgataaccatcaggtaacagtaataagtggtgaaactggttgtggcaaaaccactcaagttactcagttcattttggataactacattgaaagaggaaaaggatctgcttgcagaatagtttgtactcagccaagaagaattagtgccatttcagttgcggaaagagtagctgcagaaagggcagaatcttgtggcagtggtaatagtactggatatcaaattcgtctccagagtcggttgccaaggaaacagggttctatcttatactgtacaacaggaatcatccttcagtggctccagtcagacccgtatttgtccagtgttagtcatatcgtacttgatgaaatccatgaaagaaatctgcagtcagatgttttaatgactgttgttaaagaccttctcaattttcgatctgacttgaaagtaatattgatgagtgcaacattgaatgcagaaaagttttcagaatattttggtaactgtccaatgatacatatacctggttttacctttccggttgtggaatatcttttggaagatgtaattgaaaaaataaggtatgttccagaacaaaaagaacacagatcccagtttaagaggggtttcatgcaagggcatgtaaatagacaagaaaaagaagaaaaagaagcaatatataaagaacgttggccagattatgtaagggaactgcgaagaaggtattctgcaagtactgtagatgttatagaaatgatggaggatgataaagttgatctgaatttgattgttgccctcatccgatacattgttttggaagaagaggatggtgcgatactggtctttctgccaggctgggacaatatcagcactttacatgatctcttgatgtcacaagtaatgtttaaatcagataaatttttaattatacctttacattcactgatgcctacagttaaccagacacaggtgtttaaaagaacccctcctggtgttcggaaaatagtaattgctaccaacattgcggagactagcattaccatagatgatgtcgtttatgtgatagatggaggaaaaataaaagagacgcattttgatactcagaacaatatcagtacaatgtccgctgagtgggttagtaaagctaatgccaaacagagaaaaggtcgagctggaagagttcaacctggtcattgctatcatctgtataatggtcttagagcaagtcttctagatgactatcaactgccagaaattttgagaactcctttggaagaactttgtttacaaataaagattttaaggctaggtggaattgcttattttctgagtagattaatggacccaccatcaaatgaggcagtgttactctccataagacacctgatggagctgaacgctttggataaacaagaagaattgacacctcttggagtccacttggcacgattacccgttgagccacatattggaaaaatgattctttttggagcactgttctgctgcttagacccagtactcactattgctgctagtctcagtttcaaagatccatttgtcattccactgggaaaagaaaagattgcagatgcaagaagaaaggaattggcaaaggatactagaagtgatcacttaacagttgtgaatgcgtttgagggctgggaagaggctaggcgacgtggtttcagatacgaaaaggactattgctgggaatattttctgtcttcaaacacactgcagatgctgcataacatgaaaggacagtttgctgagcatcttcttggagctggatttgtaagcagtagaaatcctaaagatccagaatctaatataaattcagataatgagaagataattaaagctgtcatctgtgctggtttatatcccaaagttgctaaaattcgactaaatttgggtaaaaaaagaaaaatggtaaaagtttacacaaaaaccgatggcctggttgctgttcatcctaaatctgttaatgtggagcaaacagactttcactacaa

SEQ ID NO: 125625 - DNA, 185 bp, Homo sapiens
  Payload ID: 4624
  Gene Symbol: DHX36
  Gene Name: DEAH (Asp-Glu-Ala-His) box polypeptide 36
  ENST ID: ENST00000630536
  CDS Start-End: 1-15
ataatgagaagataattaaagctgtcatctgtgctggtttatatcccaaagttgctaaaattcgactaaatttgggtaaaaaaagaaaaatggtaaaagtttacacaaaaaccgatggcctggttgctgttcatcctaaatctgttaatgtggagcaaacagactttcactacaactggcttatc

SEQ ID NO: 125626 - DNA, 4276 bp, Homo sapiens
  Payload ID: 4624
  Gene Symbol: DHX36
  Gene Name: DEAH (Asp-Glu-Ala-His) box polypeptide 36
  ENST ID: ENST00000626678
  CDS Start-End: 1-651
atgctgcataacatgaaaggacagtttgctgagcatcttcttggagctggatttgtaagcagtagaaatcctaaagatccagaatctaatataaattcagataatgagaagataattaaagctgtcatctgtgctggtttatatcccaaagttgctaaaattcgactaaatttgggtaaaaaaagaaaaatggtaaaagtttacacaaaaaccgatggcctggttgctgttcatcctaaatctgttaatgtggagcaaacagactttcactacaactggcttatctatcacctaaagatgagaacaagcagtatatacttgtatgactgcacagaggtttccccatactgtctcttgttttttggaggtgacatttccatccagaaggataacgatcaggaaactattgctgtagatgagtggattgtatttcagtctccagcaagaattgcccatcttgttaaggaattaagaaaggaactagatattcttctgcaagagaagattgaaagtcctcatcctgtagactggaatgacactaaatccagagactgtgcagtactgtcagctattatagacttgatcaaaacacaggaaaaggcaactcccaggaactttccgccacgattccaggatggatattacagctgacagcttttcaggggtggtctgaaaagccagtttgacagccattcttcatcattgtttaaattttggctggatgccaaaccctgggacatgaacaattttcatgtgtaaggtagaagccttcagtaggtagtaaagacttaatgtgcatgacttgatgttatatgtagagatatatatatatatatatatataccataaaagcaatatgttctctgatcatatactctgctgtggtcatgcccactctttgggagtatattccctttatatatattgagtattgtaccacttgagaaattcctttgttctgttatacaaaattaatctttctgctcataatgattgatgataccaccagtaaaaataggatgtttaccccaaaacaagtgtcaattaagaatttgaacacaaccacattttttaaaatgaaacttctatcggaagtaaattaatttgttgtaataaagtccagtatttaataaaatgtacaatgttaaatctcagccaacctcttggattggtttctacattttcacctatggcttggttcatttgatatttttactatttttaaaacacgtgccctttttatatcaccctgtgcctcataatacagcaattgagagcacggtctggagcctgattacctcagttccagtctcagctctgtcagttagtcagtgtcttggcttctctcctttttccttatcttgtaagatacagttggcccttcatatccatgcattccacatctgtggattcaaacaactgtggatagaagatatttggggaaaaaaaggatggttgtgtctatactgaacatgtgcagacttttttccttgtcattccctaaacaatacagtttaacagctatttatatagtatttacattgtattaggtattataaataatctagagatgacttaaagaatatgggaggttgtgcctaggtaacatgcaaatactacgccattttattataaaagacttgagcatccatggatttaggtatttgaggggttggggttggaaaccagtcccccacagatactgagggacaactgtacatgtaacagttgtgaggatgaagtacattaatacatgtaaagcacataggctagtgcctgtactctctgaatcttagttgttatttgtccctgaaatattttcgtaaatgtctaacaatctattatattacactttttattttattgctacttatcttcttcgccaaggaatagtgtaacaacacatgctgtacattttcagccctatcagattgtgataaatactgttggttgccggccagcaactattttgtccctcccttcttgcttgcttattctggtgttcccttctgtgcagctctgtgtccaggtatgttggaccctttccctaagggtgaatcctgctgttctaaatgaatcacatgtggtcttatcccccttataagtaattgataaggcatgagtacataaacatgtcctagtgaatggcagctgagaagtgatcttcaagggggtgtctgaaaaatgttttactcactaataggcttagaggaggaaatcctgctctctctggacattgtcttttctgactctgatagttggaactgctgcagccaactaatgatcacaaggagacacggactcagactgaggttagctcagtggaaagatagaactcaccagagcctttgataatgccggtaagcttcagaattaacccattctagagctgctttacatgtggacttatgttgatataataaaaacccttcaattgtttaagccacttttaataggatattgttagttttttgttggttttttgttttgttttgttttgttttttgttttttggagacagtgtcttgccctgtcacccaggctggagtgcagtggtgtgatcttggttcactgcagcctcgacttcctgggttcaagtgatccttctgcctcagcctcccaaatagctgggactataggcatgcatcaccacacccagctaatttctgtattttttgtagagacaccgtttcaccatgttgcccaggctggtctcaaaactcctgtgctcaagcagtctgcccgccttggcttcccaaagtgctgacattacaggtatgagccactgcacccggtccctagtagggtatttttaacttggcaaaaagggtattaatcagaaacatacactatccatcactgagtattatactcttgattttgcaatgtaagagttttaacctatttgtctgacagaaggtgtaaaagtgctggacatgctgcagaaagaaacaggaaaagcatcttgctgcactccaaagaatgcaaattttaatgtgccttccaataaatgcaaggaaaccgaaagagttaatagtatcatacaatgactgggatgtattgataatgctacagtgatccattaacagcacttgttcaggtactgctcccaatcctgggaatgtgtgttacctgttatgtctcaaatcctttatcttggctgttcttctaaaagtgatctgtctgtcattgaatgctggcattagagtcatgtcacaatattagagcatactggttttgcctctaacgtcgaggtgaccatctggtctttcttgctctgtaagagtttctgtttgtgcttttttttcccttacttttattatccagtttaaatccagtcagttggccaaaatggtcttggaagaaaggatttagagattctgtaaaaaagattattagttggttctgtgtttgcaaaccagtatgtaattcccatatgaatggggaaaatgttcctgaggaattatttaattgatgaggcattcacagagattaaagcagttattgttacctccaatttatgtcttctgcacagctgattaggttggacattttaatccaaggtgctacttacattctgtttcttttgtttacaaaatagggcattactgagtagaaaatacattccaggtctaagaactgtttgttctttagtggattttaaagaataagacattaaattaagaaggaaaatctgtttgattcatcattttgagtaatgcagagaataactcttaaaaaaaaaacctgaaacagaaactttcaggaaaaaaacaaaagaaattaaactactgaataatctttcaaaagcatcgttgaacagtgagcacatgtgatgccttcccaattaattaatttgggcaaaagctctagataaacttacaccaattgttgcaaggcattctctattactgcatttttaaaacaaagtcctcccctaaaagttatgaattatacaaaagctttaggaggaattttagtactcctttacccaaaataaatagtggtaaatttccttctgttcttagctctgagtttgtatttatttataagtcattgtgatcatgtatacttatatatttttaatatgctaattgcttttaaatgggatttttgttctgattttaaaataatacatcctccctggacaatatttggaaatgtagcaaagtaaatcatgttaccattgttccattttgatatatataaactttaggtattattttatatataataaattttaagatattatatacaataaaattaaccaatttaa

SEQ ID NO: 125627 - DNA, 651 bp, Homo sapiens
  Payload ID: 4624
  Gene Symbol: DHX36
  Gene Name: DEAH (Asp-Glu-Ala-His) box polypeptide 36
  ENST ID: ENST00000627269
  CDS Start-End: 1-651
atgctgcataacatgaaaggacagtttgctgagcatcttcttggagctggatttgtaagcagtagaaatcctaaagatccagaatctaatataaattcagataatgagaagataattaaagctgtcatctgtgctggtttatatcccaaagttgctaaaattcgactaaatttgggtaaaaaaagaaaaatggtaaaagtttacacaaaaaccgatggcctggttgctgttcatcctaaatctgttaatgtggagcaaacagactttcactacaactggcttatctatcacctaaagatgagaacaagcagtatatacttgtatgactgcacagaggtttccccatactgtctcttgttttttggaggtgacatttccatccagaaggataacgatcaggaaactattgctgtagatgagtggattgtatttcagtctccagcaagaattgcccatcttgttaaggaattaagaaaggaactagatattcttctgcaagagaagattgaaagtcctcatcctgtagactggaatgacactaaatccagagactgtgcagtactgtcagctattatagacttgatcaaaacacaggaaaaggcaactcccaggaactttccgccacgattccaggatggatattacagctga

SEQ ID NO: 125628 - DNA, 1154 bp, Homo sapiens
  Payload ID: 4624
  Gene Symbol: DHX36
  Gene Name: DEAH (Asp-Glu-Ala-His) box polypeptide 36
  ENST ID: ENST00000630672
  CDS Start-End: 1-651
atgctgcataacatgaaaggacagtttgctgagcatcttcttggagctggatttgtaagcagtagaaatcctaaagatccagaatctaatataaattcagataatgagaagataattaaagctgtcatctgtgctggtttatatcccaaagttgctaaaattcgactaaatttgggtaaaaaaagaaaaatggtaaaagtttacacaaaaaccgatggcctggttgctgttcatcctaaatctgttaatgtggagcaaacagactttcactacaactggcttatctatcacctaaagatgagaacaagcagtatatacttgtatgactgcacagaggtttccccatactgtctcttgttttttggaggtgacatttccatccagaaggataacgatcaggaaactattgctgtagatgagtggattgtatttcagtctccagcaagaattgcccatcttgttaaggaattaagaaaggaactagatattcttctgcaagagaagattgaaagtcctcatcctgtagactggaatgacactaaatccagagactgtgcagtactgtcagctattatagacttgatcaaaacacaggaaaaggcaactcccaggaactttccgccacgattccaggatggatattacagctgacagcttttcaggggtggtctgaaaagccagtttgacagccattcttcatcattgtttaaattttggctggatgccaaaccctgggacatgaacaattttcatgtgtaaggtagaagccttcagtaggtagtaaagacttaatgtgcatgacttgatgttatatgtagagatatatatatatatatatatataccataaaagcaatatgttctctgatcatatactctgctgtggtcatgcccactctttgggagtatattccctttatatatattgagtattgtaccacttgagaaattcctttgttctgttatacaaaattaatctttctgctcataatgattgatgataccaccagtaaaaataggatgtttaccccaaaacaagtgtcaattaagaatttgaacacaaccacattttttaaaatgaaacttctatcggaagtaaattaatttgttgtaataaagtccagtatttaataaaatgtacaatgttaaatctca

SEQ ID NO: 125629 - DNA, 275 bp, Homo sapiens
  Payload ID: 4624
  Gene Symbol: DHX36
  Gene Name: DEAH (Asp-Glu-Ala-His) box polypeptide 36
  ENST ID: ENST00000629736
  CDS Start-End: 1-275
atgctgcataacatgaaaggacagtttgctgagcatcttcttggagctggatttgtaagcagtagaaatcctaaagatccagaatctaatataaattcagataatgagaagataattaaagctgtcatctgtgctggtttatatcccaaagttgctaaaattcgactaaatttgggtaaaaaaagaaaaatggtaaaagtttacacaaaaaccgatggcctggttgctgttcatcctaaatctgttaatgtggagcaaacagactttcactacaa

SEQ ID NO: 125630 - DNA, 4550 bp, Homo sapiens
  Payload ID: 4625
  Gene Symbol: DHX37
  Gene Name: DEAH (Asp-Glu-Ala-His) box polypeptide 37
  Uniprot ID: Q8IY37
  ENST ID: ENST00000308736
  CDS Start-End: 100-3573
tctcacggccggagttggtggtctgggaacccacgtgggctgggtttcggattgctctgctggtccggccgctggagcgcccaccctggcctagtcgccatggggaagctgcgccggcgctacaacatcaaggggcgccagcaggcgggccccggaccctcgaagggcccccccgagccgccccccgtgcagctggaactggaggacaaggacacgttgaagggagttgatgcaagcaacgcgctcgttctaccggggaagaagaaaaagaagaccaaagcccctcccctgtcgaagaaggagaagaagcctctgaccaagaaggagaagaaagtgctgcagaaaatcttagaacagaaggagaaaaagagccagcgagcagagatgctacagaagctgagtgaagtccaggcttccgaagctgagatgagactcttttataccacttccaagctaggcactgggaaccgcatgtatcacaccaaagagaaggctgacgaggtggtagccccgggccaggagaagatcagtagcctcagcggtgcccaccggaagcgtcgccgctggccctcagctgaggaggaggaggaggaggaggaggagtcggaatcggagctggaggaggagtcggagctggacgaggacccagctgctgagccggctgaggctggtgtggggaccaccgtggcacctctgccgccagctccagcacccagcagtcagcccgtgccggctgggatgactgttcctcctcctccagctgcagccccaccactgcccagggccctggctaagcccgccgtcttcatccccgtgaaccgctccccggaaatgcaggaggaacggctgaagctcccaattctctccgaagaacaagtaatcatggaggctgtggccgagcaccccatcgtcatcgtgtgtggtgagaccggcagcgggaagaccacacaggtgcctcagtttctctatgaagcaggcttcagcagtgaagacagcatcatcggtgtcacggagccccgccgagtggccgccgtggccatgtcccagcgagtggccaaggagatgaatctgtcccagcgggtcgtctcctaccagatccggtatgaaggaaacgtgacagaggagaccagaatcaagttcatgacggatggtgtgctgcttaaagaaatccagaaggacttcctgctgctgcggtacaaggtggtgatcatcgacgaggcccacgagaggagcgtgtacacggacatcctcatcggcctcctgtcccgcattgtgactctccgggctaagaggaacctgccactcaagctgctcatcatgtcggccacgctgcgggtggaggacttcacccagaacccacggctcttcgccaagccgccgccggtcatcaaggtggaatccaggcagttcccagtgactgtgcatttcaacaagcggacaccgctggaagactacagtggcgagtgcttccggaaggtctgcaagatccaccggatgctgcccgcaggtggcatcctggtgttcctgacggggcaggctgaggtgcatgcgctgtgccgcaggctcaggaaggctttcccaccctccagagcccggccacaagaaaaggacgacgatcagaaagactcggtggaggaaatgcggaagtttaagaagtcaagggccagggccaagaaggcgcgggctgaggtgctgccccagatcaacttggatcattactcggtgttaccggcaggcgaaggcgatgaggacagggaggcagaagtggatgaggaagagggggccctggactccgacctcgatctggacctgggggatggcgggcaagatggaggtgagcagccggatgcctccctcccgctccacgtgctcccgctgtactctctgctggccccagagaagcaagcacaggtctttaagcctccaccggaggggactcggttgtgtgttgtggccaccaatgtggccgagacgtcgcttaccatccctggcatcaagtacgtggtggactgtgggaaggtcaagaaacgctactacgaccgcgtcactggcgtatcctccttccgtgtcacctgggtctcccaggcatcagctgaccagcgagcgggcagagcaggacggacggagcccggccactgctacaggctgtattcatctgcggtttttggtgacttcgagcagtttcctcctccagaaatcacccggaggcctgttgaagacttaatccttcaaatgaaggcgctcaacgttgaaaaggtcatcaacttccccttcccgacgcccccctccgtggaagcccttcttgccgccgaggagctgttgatcgcactgggtgccctgcaaccgccccagaaagcagaaagggtgaagcaactgcaggagaaccggctgagctgccccatcactgcgctgggccggacaatggccacattccccgtggcaccccgctacgctaagatgctggcactgagccgacaacacggctgcctgccctatgccatcaccatcgtggccagcatgacggtgcgggagctgtttgaggagctggacagaccagcggccagtgacgaggagctcaccaggctgaagagcaagcgggcccgggtggcccagatgaagaggacctgggcagggcagggggcttctctgaagctcggcgacctcatggtgctgctgggcgccgtgggagcctgtgagtatgccagctgcacaccccagttttgcgaagccaacgggctgcggtacaaagccatgatggagatccggcgcctgcggggccagctgaccaccgcagtcaatgccgtgtgccccgaggctgagctcttcgtggatcccaagatgcagccgcccaccgagagccaggtgacctacctgcgacagatcgtgacggcaggcctgggggaccacttggcccgcagggtccagagcgaggagatgctggaggacaagtggaggaacgcctacaagacccctctcctcgacgaccctgtcttcatccaccccagctccgtccttttcaaagagctccccgagtttgtggtctaccaggaaatcgtggagaccactaagatgtacatgaaaggcgtctctagcgtggaggtccagtggatcccggccctgctgccctcttactgccagtttgacaagcccctggaggaaccagcccctacatactgccccgagcgggggcgggtgctgtgtcaccgggccagcgtgttctatcgcgtgggctggccgctccccgccatcgaggtggattttccagaggggattgaccgctacaagcactttgcccggttcctgctggaagggcaggtcttccgcaagctggcctcataccggagctgtctgctgtccagccccggcaccatgctgaagacgtgggccaggctgcagccccgtacggagagccttctgcgagccctggttgcagagaaggctgactgccatgaagccttgctggctgcttggaagaaaaaccccaaatacctgctggctgagtactgtgagtggcttccacaggccatgcaccccgatatcgagaaagcctggccccccaccactgtccactgaccagaaacctggctgcagggccgaggactggtttggggactggagggctggcagcagcctgtcaccgtgcgaccgtgaccacctggcatgggcttcgtggcctgctctcaggaagtgggtcaagccctgggaaccctcatccatgagagctcgatcccgtatgaagggtgctgccgcccgtgccatctggcccgggggtgactttttgaactgtttattatatggtggatgatgatttcatctcacgtgctggacgctgttctgttcagtgtgctctttggactacattagtcccctgtggagcagcagggctggagatctctgcagtcccttccccgcccgccctgccagaaggccgaggaggcacgtggagggcctccttcctgcaattcttccctctccagagtcagggagggctgcccagccctggcctcacagccgtcccagatgttaggtgagccactgagctctgtgttgaccttgaggggcctggctgggggcccccaggctccatgccttcttgggagggtggccgccaacgcctttcctgtgttatggcaacagggagtgggcatctcatctgcctgtggtcagctctcagacggcagggagcggagctgacgttggctgtgcttggtcaccgctgccatgccgcagaggatgcgcctagctgggctggggccacacgactattatgttggccttgaacggggactgcagagccctcagtttgtctcccttgttcctctgtggctgaggtgggagggggagggtggggtaggtcccccagcaagaaagagggacaggagcaccccaggcaggaccaaggagtcgggaggcccctgccttctgtcctccatggtgagggcacagatgtctccccagagcccagcgctggcagaatggattctgctcctggctttgcttctgcggcttcggtggagacagttatggaataaaatgttccttgcacccag

SEQ ID NO: 125631 - DNA, 4112 bp, Homo sapiens
  Payload ID: 4625
  Gene Symbol: DHX37
  Gene Name: DEAH (Asp-Glu-Ala-His) box polypeptide 37
  ENST ID: ENST00000544745
  CDS Start-End: 111-2999
cggagctggacgaggacccagctgctgagccggctgaggctggtgtggggaccaccgtggcacctctgccgccagctccagcacccagcagtcagcccgtgccggctgggatgactgttcctcctcctccagctgcagccccaccactgcccagggccctggctaagcccgccgtcttcatccccgtgaaccgctccccggaaatgcaggaggaacggctgaagctcccaattctctccgaagaacaagtaatcatggaggctgtggccgagcaccccatcgtcatcgtgtgtggtgagaccggcagcgggaagaccacacaggtgcctcagtttctctatgaagcaggcttcagcagtgaagacagcatcatcggtgtcacggagccccgccgagtggccgccgtggccatgtcccagcgagtggccaaggagatgaatctgtcccagcgggtcgtctcctaccagatccggtatgaaggaaacgtgacagaggagaccagaatcaagttcatgacggatggtgtgctgcttaaagaaatccagaaggacttcctgctgctgcggtacaaggtggtgatcatcgacgaggcccacgagaggagcgtgtacacggacatcctcatcggcctcctgtcccgcattgtgactctccgggctaagaggaacctgccactcaagctgctcatcatgtcggccacgctgcgggtggaggacttcacccagaacccacggctcttcgccaagccgccgccggtcatcaaggtggaatccaggcagttcccagtgactgtgcatttcaacaagcggacaccgctggaagactacagtggcgagtgcttccggaaggtctgcaagatccaccggatgctgcccgcaggtggcatcctggtgttcctgacggggcaggctgaggtgcatgcgctgtgccgcaggctcaggaaggctttcccaccctccagagcccggccacaagaaaaggacgacgatcagaaagactcggtggaggaaatgcggaagtttaagaagtcaagggccagggccaagaaggcgcgggctgaggtgctgccccagatcaacttggatcattactcggtgttaccggcaggcgaaggcgatgaggacagggaggcagaagtggatgaggaagagggggccctggactccgacctcgatctggacctgggggatggcgggcaagatggaggtgagcagccggatgcctccctcccgctccacgtgctcccgctgtactctctgctggccccagagaagcaagcacaggtctttaagcctccaccggaggggactcggttgtgtgttgtggccaccaatgtggccgagacgtcgcttaccatccctggcatcaagtacgtggtggactgtgggaaggtcaagaaacgctactacgaccgcgtcactggcgtatcctccttccgtgtcacctgggtctcccaggcatcagctgaccagcgagcgggcagagcaggacggacggagcccggccactgctacaggctgtattcatctgcggtttttggtgacttcgagcagtttcctcctccagaaatcacccggaggcctgttgaagacttaatccttcaaatgaaggcgctcaacgttgaaaaggtcatcaacttccccttcccgacgcccccctccgtggaagcccttcttgccgccgaggagctgttgatcgcactgggtgccctgcaaccgccccagaaagcagaaagggtgaagcaactgcaggagaaccggctgagctgccccatcactgcgctgggccggacaatggccacattccccgtggcaccccgctacgctaagatgctggcactgagccgacaacacggctgcctgccctatgccatcaccatcgtggccagcatgacggtgcgggagctgtttgaggagctggacagaccagcggccagtgacgaggagctcaccaggctgaagagcaagcgggcccgggtggcccagatgaagaggacctgggcagggcagggggcttctctgaagctcggcgacctcatggtgctgctgggcgccgtgggagcctgtgagtatgccagctgcacaccccagttttgcgaagccaacgggctgcggtacaaagccatgatggagatccggcgcctgcggggccagctgaccaccgcagtcaatgccgtgtgccccgaggctgagctcttcgtggatcccaagatgcagccgcccaccgagagccaggtgacctacctgcgacagatcgtgacggcaggcctgggggaccacttggcccgcagggtccagagcgaggagatgctggaggacaagtggaggaacgcctacaagacccctctcctcgacgaccctgtcttcatccaccccagctccgtccttttcaaagagctccccgagtttgtggtctaccaggaaatcgtggagaccactaagatgtacatgaaaggcgtctctagcgtggaggtccagtggatcccggccctgctgccctcttactgccagtttgacaagcccctggaggaaccagcccctacatactgccccgagcgggggcgggtgctgtgtcaccgggccagcgtgttctatcgcgtgggctggccgctccccgccatcgaggtggattttccagaggggattgaccgctacaagcactttgcccggttcctgctggaagggcaggtcttccgcaagctggcctcataccggagctgtctgctgtccagccccggcaccatgctgaagacgtgggccaggctgcagccccgtacggagagccttctgcgagccctggttgcagagaaggctgactgccatgaagccttgctggctgcttggaagaaaaaccccaaatgtgagtttgaccagggccagggggtgggagtagacaggatggggtcactgaggcaggggctttgtgctttgtgcacggtcagccctggcttggcagaaggatctggccccacggctgctggccagctttttgccacctgaggagagtccctgggcccagggtcaccctgacactgtcctccttccctcccctgcagacctgctggctgagtactgtgagtggcttccacaggccatgcaccccgatatcgagaaagcctggccccccaccactgtccactgaccagaaacctggctgcagggccgaggactggtttggggactggagggctggcagcagcctgtcaccgtgcgaccgtgaccacctggcatgggcttcgtggcctgctctcaggaagtgggtcaagccctgggaaccctcatccatgagagctcgatcccgtatgaagggtgctgccgcccgtgccatctggcccgggggtgactttttgaactgtttattatatggtggatgatgatttcatctcacgtgctggacgctgttctgttcagtgtgctctttggactacattagtcccctgtggagcagcagggctggagatctctgcagtcccttccccgcccgccctgccagaaggccgaggaggcacgtggagggcctccttcctgcaattcttccctctccagagtcagggagggctgcccagccctggcctcacagccgtcccagatgttaggtgagccactgagctctgtgttgaccttgaggggcctggctgggggcccccaggctccatgccttcttgggagggtggccgccaacgcctttcctgtgttatggcaacagggagtgggcatctcatctgcctgtggtcagctctcagacggcagggagcggagctgacgttggctgtgcttggtcaccgctgccatgccgcagaggatgcgcctagctgggctggggccacacgactattatgttggccttgaacggggactgcagagccctcagtttgtctcccttgttcctctgtggctgaggtgggagggggagggtggggtaggtcccccagcaagaaagagggacaggagcaccccaggcaggaccaaggagtcgggaggcccctgccttctgtcctccatggtgagggcacagatgtctccccagagcccagcgctggcagaatggattctgctcctggctttgcttctgcggcttcggtggagacagttatggaataaaatgttccttgc

SEQ ID NO: 125632 - DNA, 669 bp, Homo sapiens
  Payload ID: 4625
  Gene Symbol: DHX37
  Gene Name: DEAH (Asp-Glu-Ala-His) box polypeptide 37
  ENST ID: ENST00000543962
  CDS Start-End: 269-669
ccatcccccacctcacccccgaataaatggccaccactgagtggccatgccttgaacaacaaagggcagtgtgctggcgaccacgccggccacagacgcctttctccccaacctgcccctctcccagaaaaggacgacgatcagaaagactcggtggaggaaatgcggaagtttaagaagtcaagggccagggccaagaaggcgcgggctgaggtgctgccccagatcaacttggatcattactcggtgttaccggcaggcgaaggcgatgaggacagggaggcagaagtggatgaggaagagggggccctggactccgacctcgatctggacctgggggatggcgggcaagatggaggtgagcagccggatgcctccctcccgctccacgtgctcccgctgtactctctgctggccccagagaagcaagcacaggtctttaagcctccaccggaggggactcggttgtgtgttgtggccaccaatgtggccgagacgtcgcttaccatccctggcatcaagtacgtggtggactgtgggaaggtcaagaaacgctactacgaccgcgtcactggcgtatcctccttccgtgtcacctgggtctcccaggcatcagctgaccagcgagcgggcagagcaggacggacggagcccggccactgctacagg

SEQ ID NO: 125633 - DNA, 4608 bp, Homo sapiens
  Payload ID: 4626
  Gene Symbol: DHX38
  Gene Name: DEAH (Asp-Glu-Ala-His) box polypeptide 38
  Uniprot ID: Q92620
  ENST ID: ENST00000268482
  CDS Start-End: 510-4193
aagcgcagaaaagaaactcctggccgtcggtcggcccccgctcaacagcccaataaacggaagagcttctagtcaccgcccaccttgctcggctctgaccggaagctaggcgtcacctccgcccgtattaaagatggtcgacctttttcccctccttttcctgcccccagactagaggcgggatgtagtctcttaggctaagagtgattggtcacaaggagactcggaagtgtctgatcagagccccagaggaggccttgagagcctgttggcgtaccgttccacacttggatccaggaatcgggcgtgttccaggctgctctctatggtagctttgggcggatagagggggcgcgcaaagtattaagggacaataatggccgctttcaaggtgtggattttggctccttgagcctgtctgagcgaggggtggcagcgccggcgccccagaatccgggacagaagggtcccaagagtcgcgcttggtgagagaaatcccagatcctgtgatgggggacaccagtgaggatgcctcgatccatcgattggaaggcactgatctggactgtcaggttggtggtcttatttgcaagtccaaaagtgcggccagcgagcagcatgtcttcaaggctcctgctccccgcccttcattactcggactggacttgctggcttccctgaaacggagagagcgagaggagaaggacgatggggaggacaagaagaagtccaaagtctcctcctacaaggactgggaagagagcaaggatgaccagaaggatgctgaggaagagggcggtgaccaggctggccaaaatatccggaaagacagacattatcggtctgctcgggtagagactccatcccatccgggtggtgtgagcgaagagttttgggaacgcagtcggcagagagagcgggagcggcgggaacatggtgtctatgcctcgtccaaagaagaaaaggattggaagaaggagaaatcgcgggatcgagactatgaccgcaagagggacagagatgagcgggatagaagtaggcacagcagcagatcagagcgagatggagggtcagagcgtagcagcagaagaaatgaacccgagagcccacgacatcgacctaaagatgcagccaccccttcaaggtctacctgggaggaagaggacagtggctatggctcctcaaggcgctcacagtgggaatcgccctccccgacgccttcctatcgggattctgagcggagccatcggctgtccactcgagatcgagacaggtctgtgaggggcaagtactcggatgacacgcctctgccaactccctcctacaaatataacgagtgggccgatgacagaagacacttggggtccaccccgcgtctgtccaggggccgaggaagacgtgaggagggcgaagaaggaatttcatttgacacggaggaggagcggcagcagtgggaagatgaccagaggcaagccgatcgggattggtacatgatggacgagggctatgacgagttccacaacccgctggcctactcctccgaggactacgtgaggaggcgggagcagcacctgcataaacagaagcagaagcgcatttcagctcagcggagacagatcaatgaggataacgagcgctgggagacaaaccgcatgctcaccagtggggtggtccatcggctggaggtggatgaggactttgaagaggacaacgcggccaaggtgcatctgatggtgcacaatctggtgcctccctttctggatgggcgcattgtcttcaccaagcagccggagccggtgattccagtgaaggatgctacttctgacctggccatcattgctcggaaaggcagccagacagtgcggaagcacagggagcagaaggagcgcaagaaggctcagcacaaacactgggaactggcggggaccaaactgggagatataatgggcgtcaagaaggaggaagagccagataaagctgtgacggaggatgggaaggtggactacaggacagagcagaagtttgcagatcacatgaagagaaagagcgaagccagcagtgaatttgcaaagaagaagtccatcctggagcagaggcagtacctgcccatctttgcagtgcagcaggagctgctcactattatcagagacaacagcatcgtgatcgtggttggggagacggggagtggtaagaccactcagctgacgcagtacctgcatgaagatggttacacggactatgggatgattgggtgtacccagccccggcgtgtagctgccatgtcagtggccaagagagtcagtgaagagatggggggaaaccttggcgaggaggtgggctatgccatccgctttgaagactgcacttcagagaacaccttgatcaaatacatgactgacgggatcctgctccgagagtccctccgggaagccgacctggatcactacagtgccatcatcatggacgaggcccacgagcgctccctcaacactgacgtgctctttgggctgctccgggaggtagtggctcggcgctcagacctgaagctcatcgtcacatcagccacgatggatgcggagaagtttgctgccttttttgggaatgtccccatcttccacatccctggccgtaccttccctgttgacatcctcttcagcaagaccccacaggaggattacgtggaggctgcagtgaagcagtccttgcaggtgcacctgtcgggggcccctggagacatccttatcttcatgcctggccaagaggacattgaggtgacctcagaccagattgtggagcatctggaggaactggagaacgcgcctgccctggctgtgctgcccatctactctcagctgccttctgacctccaggccaaaatcttccagaaggctccagatggcgttcggaagtgcatcgttgccaccaatattgccgagacgtctctcactgttgacggcatcatgtttgttatcgattctggttattgcaaattaaaggtcttcaaccccaggattggcatggatgctctgcagatctatcccattagccaggccaatgccaaccagcggtcagggcgagccggcaggacgggcccaggtcagtgtttcaggctctacacccagagcgcctacaagaatgagctcctgaccaccacagtgcccgagatccagaggactaacctggccaacgtggtgctgctgctcaagtccctcggggtgcaggacctgctgcagttccacttcatggacccgcccccggaggacaacatgctcaactctatgtatcagctctggatcctcggggccctggacaacacaggtggtctgacctctaccgggcggctgatggtggagttcccgctggaccctgccctgtccaagatgctcatcgtgtcctgtgacatgggctgcagctccgagatcctgctcatcgtttccatgctctcggtcccagccatcttctacaggcccaagggtcgagaggaggagagtgatcaaatccgggagaagttcgctgttcctgagagcgatcatttgacctacctgaatgtttacctgcagtggaagaacaataattactccaccatctggtgtaacgatcatttcatccatgctaaggccatgcggaaggtccgggaggtgcgagctcaactcaaggacatcatggtgcagcagcggatgagcctggcctcgtgtggcactgactgggacatcgtcaggaagtgcatctgtgctgcctatttccaccaagcagccaagctcaagggaatcggggagtacgtgaacatccgcacagggatgccctgccacttgcaccccaccagctccctttttggaatgggctacaccccagattacatagtgtatcacgagttggtcatgaccaccaaggagtatatgcagtgtgtgaccgctgtggacggggagtggctggcggagctgggccccatgttctatagcgtgaaacaggcgggcaagtcacggcaggagaaccgtcgtcgggccaaagaggaagcctctgccatggaggaggagatggcgctggccgaggagcagctgcgagcccggcggcaggagcaggagaagcgcagccccctgggcagtgtcaggtctacgaagatctacactccaggccggaaagagcaaggggagcccatgacccctcgccgcacgccagcccgctttggtctgtgagctgaggctgtccccagagaggatggcagcaggtattgggtcctcagccttctggcgggagccctgaggctgcggacaaagccctttcatctgaggactttcatctgtgcatatcacggccccccagggcagttcctgctggaccagactctctggcagaggaggtggagttcttccatgcaggagcacggcatggcgggagcggggctgcagagtatccgaggtgctgccggggcagcgggaggtggctggacccatcgcatctaaaactggcccaggacacttggtgtatgcgtgacttggctgtggctgtcttttttaatccttgtgtaaagcagcaaaaaagacctaaagggaattgtaatttggttataattcaggatttggaaataaatttattatttgtaaaacatga

SEQ ID NO: 125634 - DNA, 892 bp, Homo sapiens
  Payload ID: 4626
  Gene Symbol: DHX38
  Gene Name: DEAH (Asp-Glu-Ala-His) box polypeptide 38
  ENST ID: ENST00000567142
  CDS Start-End: 1-575
ccatgcggaaggtccgggaggtgcgagctcaactcaaggacatcatggtgcagcagcggatgagcctggcctcgtgtggcactgactgggacatcgtcaggaagtgcatctgtgctgcctatttccaccaagcagccaagctcaagggaatcggggagtacgtgaacatccgcacagggatgccctgccacttgcaccccaccagctccctttttggaatgggctacaccccagattacatagtgtatcacgagttggtcatgaccaccaaggagtatatgcagtgtgtgaccgctgtggacggggagtggctggcggagctgggccccatgttctatagcgtgaaacaggcgggcaagtcacggcaggagaaccgtcgtcgggccaaagaggaagcctctgccatggaggaggagatggcgctggccgaggagcagctgcgagcccggcggcaggagcaggagaagcgcagccccctgggcagtgtcaggtctacgaagatctacactccaggccggaaagagcaaggggagcccatgacccctcgccgcacgccagcccgctttggtctgtgagctgaggctgtccccagagaggatggcagcagggcagttcctgctggaccagactctctggcagaggaggtggagttcttccatgcaggagcacggcatggcgggagcggggctgcagagtatccgaggtgctgccggggcagcgggaggtggctggacccatcgcatctaaaactggcccaggacacttggtgtatgcgtgacttggctgtggctgtcttttttaatccttgtgtaaagcagcaaaaaagacctaaagggaattgtaatttggttataattcaggatttggaaataaatttattatttgtaaaaca

SEQ ID NO: 125635 - DNA, 710 bp, Homo sapiens
  Payload ID: 4626
  Gene Symbol: DHX38
  Gene Name: DEAH (Asp-Glu-Ala-His) box polypeptide 38
  ENST ID: ENST00000566794
  CDS Start-End: 297-710
aataaacggaagagcttctagtcaccgcccaccttgctcggctctgaccggaagctaggcgtcacctccgcccgtattaaagatggtcgacctttttcccctccttttcctgcccccagactagaggcgggatgtagtctcttaggctaagagtgattggtcacaaggagactcggaagtgtctgatcagagccccagaggaggccttgagagcctgttggcgtaccgttccacacttggatccaggaatcgggcgtgttccaggctgctctctatgagaaatcccagatcctgtgatgggggacaccagtgaggatgcctcgatccatcgattggaaggcactgatctggactgtcaggttggtggtcttatttgcaagtccaaaagtgcggccagcgagcagcatgtcttcaaggctcctgctccccgcccttcattactcggactggacttgctggcttccctgaaacggagagagcgagaggagaaggacgatggggaggacaagaagaagtccaaagtctcctcctacaaggactgggaagagagcaaggatgaccagaaggatgctgaggaagagggcggtgaccaggctggccaaaatatccggaaagacagacattatcggtctgctcgggtagagactccatcccatccgggtggtgtgagcgaagagttttgggaacgcagtcggcagagagagcgggag

SEQ ID NO: 125636 - DNA, 574 bp, Homo sapiens
  Payload ID: 4626
  Gene Symbol: DHX38
  Gene Name: DEAH (Asp-Glu-Ala-His) box polypeptide 38
  ENST ID: ENST00000566489
  CDS Start-End: 206-574
attaagggacaataatggccgctttcaaggtgtggattttggctccttgagcctgtctgagcgaggggtggcagcgccggcgccccagaatccgggacagaagggtcccaagagtcgcgcttggtgagtgtcatttataccaggcaatctggtgggcgatctcttctactagaatgtcagctccagagaaatcccagatcctgtgatgggggacaccagtgaggatgcctcgatccatcgattggaaggcactgatctggactgtcaggttggtggtcttatttgcaagtccaaaagtgcggccagcgagcagcatgtcttcaaggctcctgctccccgcccttcattactcggactggacttgctggcttccctgaaacggagagagcgagaggagaaggacgatggggaggacaagaagaagtccaaagtctcctcctacaaggactgggaagagagcaaggatgaccagaaggatgctgaggaagagggcggtgaccaggctggccaaaatatccggaaagacagacattatcggtctgctcgggtagagactccatcccatccgggtggt

SEQ ID NO: 125637 - DNA, 2258 bp, Homo sapiens
  Payload ID: 4626
  Gene Symbol: DHX38
  Gene Name: DEAH (Asp-Glu-Ala-His) box polypeptide 38
  ENST ID: ENST00000579387
  CDS Start-End: 225-653
acttggatccaggaatcgggcgtgttccaggctgctctctatggtagctttgggcggatagagggggcgcgcaaagtattaagggacaataatggccgctttcaaggtgtggattttggctccttgagcctgtctgagcgaggggtggcagcgccggcgccccagaatccgggacagaagggtcccaagagtcgcgcttggtgagagaaatcccagatcctgtgatgggggacaccagtgaggatgcctcgatccatcgattggaaggcactgatctggactgtcaggttggtggtcttatttgcaagtccaaaagtgcggccagcgagcagcatgtcttcaaggctcctgctccccgcccttcattactcggactggacttgctggcttccctgaaacggagagagcgagaggagaaggacgatggggaggacaagaagaagtccaaagtctcctcctacaaggactgggaagagagcaaggatgaccagaaggatgctgaggaagagggcggtgaccaggctggccaaaatatccggaaagacaggctccagatggcgttcggaagtgcatcgttgccaccaatattgccgagacgtctctcactgttgacggcatcatgtttgttatcgattctggttattgcaaattaaaggtcttcaaccccaggattggcatggatgctctgcagatctatcccattagccaggccaatgccaaccagcggtcagggcgagccggcaggacgggcccaggtcagtgtttcaggctctacacccagagcgcctacaagaatgagctcctgaccaccacagtgcccgagatccagaggactaacctggccaacgtggtgctgctgctcaagtccctcggggtgcaggacctgctgcagttccacttcatggacccgcccccggaggacaacatgctcaactctatgtatcagctctggatcctcggggccctggacaacacaggtggtctgacctctaccgggcggctgatggtggagttcccgctggaccctgccctgtccaagatgctcatcgtgtcctgtgacatgggctgcagctccgagatcctgctcatcgtttccatgctctcggtcccagccatcttctacaggcccaagggtcgagaggaggagagtgatcaaatccgggagaagttcgctgttcctgagagcgatcatttgacctacctgaatgtttacctgcagtggaagaacaataattactccaccatctggtgtaacgatcatttcatccatgctaaggccatgcggaaggtccgggaggtgcgagctcaactcaaggacatcatggtgcagcagcggatgagcctggcctcgtgtggcactgactgggacatcgtcaggaagtgcatctgtgctgcctatttccaccaagcagccaagctcaagggaatcggggagtacgtgaacatccgcacagggatgccctgccacttgcaccccaccagctccctttttggaatgggctacaccccagattacatagtgtatcacgagttggtcatgaccaccaaggagtatatgcagtgtgtgaccgctgtggacggggagtggctggcggagctgggccccatgttctatagcgtgaaacaggcgggcaagtcacggcaggagaaccgtcgtcgggccaaagaggaagcctctgccatggaggaggagatggcgctggccgaggagcagctgcgagcccggcggcaggagcaggagaagcgcagccccctgggcagtgtcaggtctacgaagatctacactccaggccggaaagagcaaggggagcccatgacccctcgccgcacgccagcccgctttggtctgtgagctgaggctgtccccagagaggatggcagcaggtattgggtcctcagccttctggcgggagccctgaggctgcggacaaagccctttcatctgaggactttcatctgtgcatatcacggccccccagggcagttcctgctggaccagactctctggcagaggaggtggagttcttccatgcaggagcacggcatggcgggagcggggctgcagagtatccgaggtgctgccggggcagcgggaggtggctggacccatcgcatctaaaactggcccaggacacttggtgtatgcgtgacttggctgtggctgtcttttttaatccttgtgtaaagcagcaaaaaagacctaaagggaattgtaatttggttataattcaggatttggaaataaatttattatttgt

SEQ ID NO: 125638 - DNA, 706 bp, Homo sapiens
  Payload ID: 4626
  Gene Symbol: DHX38
  Gene Name: DEAH (Asp-Glu-Ala-His) box polypeptide 38
  ENST ID: ENST00000563819
  CDS Start-End: 1-564
ctgaatgtttacctgcagtggaagaacaataattactccaccatctggtgtaacgatcatttcatccatgctaaggccatgcggaaggtccgggaggtgcgagctcaactcaaggacatcatggtgcagcagcggatgagcctggcctcgtgtggcactgactgggacatcgtcaggaagtgcatctgtgctgcctatttccaccaagcagccaagctcaagggaatcggggagtacgtgaacatccgcacagggatgccctgccacttgcaccccaccagctccctttttggaatgggctacaccccagattacatagtgtatcacgagttggtcatgaccaccaaggagtatatgcagtgtgtgaccgctgtggacggggagtggctggcggagctgggccccatgttctatagcgtgaaacaggcgggcaagtcacggcaggagcaggagaagcgcagccccctgggcagtgtcaggtctacgaagatctacactccaggccggaaagagcaaggggagcccatgacccctcgccgcacgccagcccgctttggtctgtgagctgaggctgtccccagagaggatggcagcaggtattgggtcctcagccttctggcgggagccctgaggctgcggacaaagccctttcatctgaggactttcatctgtgcatatcacggccccccagggcagttcctgctgg

SEQ ID NO: 125639 - DNA, 500 bp, Homo sapiens
  Payload ID: 4626
  Gene Symbol: DHX38
  Gene Name: DEAH (Asp-Glu-Ala-His) box polypeptide 38
  ENST ID: ENST00000562774
  CDS Start-End: 1-387
gtagtggctcggcgctcagacctgaagctcatcgtcacatcagccacgatggatgcggagaagtttgctgccttttttgggaatgtccccatcttccacatccctggccgtaccttccctgttgacatcctcttcagcaagaccccacaggaggattacgtggaggctgcagtgaagcagtccttgcaggtgcacctgtcgggggcccctggagacatccttatcttcatgcctggccaagaggacattgaggtgacctcagaccagattgtggagcatctggaggaactggagaacgcgcctgccctggctgtgctgccggggcagcgggaggtggctggacccatcgcatctaaaactggcccaggacacttggtgtatgcgtgacttggctgtggctgtcttttttaatccttgtgtaaagcagcaaaaaagacctaaagggaattgtaatttggttataattcaggatttggaaataaatttattatttgtaaaac

SEQ ID NO: 125640 - DNA, 3660 bp, Homo sapiens
  Payload ID: 4627
  Gene Symbol: DHX40
  Gene Name: DEAH (Asp-Glu-Ala-His) box polypeptide 40
  Uniprot ID: Q8IX18
  ENST ID: ENST00000251241
  CDS Start-End: 148-2487
ccacgtcatcgagcagctccccctccccttgctacaagtcgcacgcgcggaagtaaacacctctacgtcatcagggcgcgtcctcgtctttcccctcccatctcctcagatcggtggacgtgctcgcctccactcggggccaggtctatgtcccggtttcccgcagtcgcgggcagggcgccaaggcggcaggaggagggtgagcggtcaagagacctccaggaagagcggctctcggctgtttgcatcgccgatagagaagagaaaggatgcacgtcccaggagggaggaactactccaacttttcctattcagaaacaaagaaaaaagattattcaagctgtgagggacaattcattccttattgttactggaaatacaggaagtggtaaaacaactcaactcccaaaatatctatatgaagcagggttttcacaacatggtatgattggtgtaactcaaccacgaaaagtagctgctatatcagttgctcagagagtagctgaagaaatgaaatgcactttgggatccaaagtaggataccaagttcgttttgatgattgcagttctaaggagacagcaatcaaatatatgactgatggatgtttactgaaacatattctgggagacccaaatcttaccaaattcagtgtcattattttggatgaagcccatgaaagaactctaactacagatatcttatttggtttattgaagaagctatttcaggagaagtctcctaataggaaggagcatttaaaagtggtggtaatgtcagcaactatggaattagccaagctctctgcattctttggaaattgtccaatatttgatatacctggaaggctttatccagtcagagagaaattctgcaatttgattggtccacgagacagagaaaatactgcgtatattcaagcgattgtgaaagtcaccatggatatccatttgaatgaaatggctggagacatcttggtttttctgactggccagtttgaaatagaaaaaagttgtgagttactttttcagatggcagagtctgttgattatgattatgatgttcaagataccaccctcgatggcttgttaatattgccgtgttatggatcaatgacaacagatcaacagaggaggatatttttgccaccaccacctggaattagaaaatgtgtcatatccaccaatatttctgcaacgtctttgacaatagatggaatcagatatgtggtagatggtggcttcgtgaagcagttaaatcacaaccccagattagggttggacatcctggaggtggttccaatttcaaagagcgaggcattacagcgaagtggccgagctggcaggacttcttcaggaaaatgctttcggatctatagtaaagatttttggaaccagtgtatgcctgaccatgtgatccctgaaattaagagaactagtttgacatctgtagttctgaccttaaagtgccttgccatacacgatgtcataaggtttccctatttggatccacctaatgagagacttattttagaagctcttaaacaactttaccagtgtgatgctattgacaggagtggccatgtcaccagattgggtttgtctatggtggagtttcctttgcctccacatctgacatgtgcagtaataaaagctgcttccctggattgtgaagatctactacttccaatagcagcaatgttgtctgtggaaaacgtcttcattagacctgttgatccagagtaccagaaggaagcagaacagagacatcgagaattggcagctaaagctggaggatttaatgactttgcaactttagctgtcatctttgaacaatgcaaatcaagtggagctccagcttcatggtgccaaaaacactggattcattggaggtgcttattttctgcatttcgtgtggaagctcaacttcgagaactaatcaggaagcttaaacagcaaagtgatttcccaaaagagacctttgaaggccctaaacatgaagtactacgaagatgtctttgtgcgggctatttcaaaaatgtagctcgaagatctgttgggagaacgttttgcacaatggatggtcgtggaagcccagttcacattcatccttcctcagcacttcatgaacaggaaaccaaacttgaatggatcatttttcatgaggtattggttaccaccaaagtctacgcaagaattgtatgcccaatccgttatgaatgggtaagagacttgttacccaagttgcatgaatttaatgcacatgatttgagcagtgtggcccgacgtgaagtgagagaagatgcaagaaggagatggacaaataaggaaaatgtaaagcagctaaaggatggaatatcgaaagacgtcttaaagaaaatgcaaagaagaaatgatgacaaatccatatctgatgcacgggctcgtttccttgagagaaagcagcagaggacccaggaccacagtgacacacgaaaggaaacaggctaaggtggtgaaccctccaattcaggaagtgggaaaaggagccaggaaatgtgcttctactttgccagttatttcagacagcactaccaagaggaggtggtcagcacttgttattggcctatgaactaaaagcaaatcaaagctcataaatcaaagctcatcagttcccataaatgcagttgtcaaagaaaagatttggttgccatagtcataagcaatgatacatgaaaccaatgaaagacagtacatgtaataatattttcctcagtacaattttgctggccttaactggtatcaaacgctgtcattgagatgttttcaaagaacattgagttgtatttaatcagcgtgtactccatttgcattgaagcattaaaaattatttttcttaaaatctctttaaggccttcttgttgctgttagaatagtgctatatatcaggtatgtgaccatttatttcagaaggctgaacataagaggtttctactcagcaatacttagatgtctaactgtttaattgctacagagctttatagatatttagagaaaagacttaatcaattagtaaataaaattgcctatggcaggattctttcttgaattaatattaatccttaaattgatttttctgggattatacaaattcctttttatataaaagtatattgtttaaaacagtagctatagccattaaccaaaggacagatgatatatatatatatgatatatatatatatataagttcttttttagctgtacctacgtacttatatcagcaccatgtatgtaggtgtgatagtactttcaaacagcgcctccacctggcctactctgttatttccacctgtttgggtagggccatttaacttccattatgccaaacttgggatgggattttcgaagcagacaacactatttcatcgtgtttcaaattggaaccttgaggctagttagtatcacactcaggccacactcagcacttgcccactcttgtttactgccttgtattctagttatttgtgtatttgtctccctcactagattatacgctccttgtgggcagggactgtgtcttttttcatctttgtatctttcatgcacctagcatagtgctttgcacatagtagtcactcagtgtttgttaaataaagctattagtgtcattaaaattcaaaa

SEQ ID NO: 125641 - DNA, 2255 bp, Homo sapiens
  Payload ID: 4627
  Gene Symbol: DHX40
  Gene Name: DEAH (Asp-Glu-Ala-His) box polypeptide 40
  Uniprot ID: Q8IX18
  ENST ID: ENST00000425628
  CDS Start-End: 61-2169
ctttcccctcccatctcctcagatcggtggacgtgctcgcctccactcggggccaggtctatgtcccggtttcccgcagtcgcgggcagggcgccaaggcggcaggaggagggtgagcggtcaagagacctccaggaagagcggctctcggctgtttgcatcgccgatagagaagagaaaggatgcacgtcccaggagggaggaactactccaacttttcctattcagaaacaaagaaaaaagattattcaagctgagacagcaatcaaatatatgactgatggatgtttactgaaacatattctgggagacccaaatcttaccaaattcagtgtcattattttggatgaagcccatgaaagaactctaactacagatatcttatttggtttattgaagaagctatttcaggagaagtctcctaataggaaggagcatttaaaagtggtggtaatgtcagcaactatggaattagccaagctctctgcattctttggaaattgtccaatatttgatatacctggaaggctttatccagtcagagagaaattctgcaatttgattggtccacgagacagagaaaatactgcgtatattcaagcgattgtgaaagtcaccatggatatccatttgaatgaaatggctggagacatcttggtttttctgactggccagtttgaaatagaaaaaagttgtgagttactttttcagatggcagagtctgttgattatgattatgatgttcaagataccaccctcgatggcttgttaatattgccgtgttatggatcaatgacaacagatcaacagaggaggatatttttgccaccaccacctggaattagaaaatgtgtcatatccaccaatatttctgcaacgtctttgacaatagatggaatcagatatgtggtagatggtggcttcgtgaagcagttaaatcacaaccccagattagggttggacatcctggaggtggttccaatttcaaagagcgaggcattacagcgaagtggccgagctggcaggacttcttcaggaaaatgctttcggatctatagtaaagatttttggaaccagtgtatgcctgaccatgtgatccctgaaattaagagaactagtttgacatctgtagttctgaccttaaagtgccttgccatacacgatgtcataaggtttccctatttggatccacctaatgagagacttattttagaagctcttaaacaactttaccagtgtgatgctattgacaggagtggccatgtcaccagattgggtttgtctatggtggagtttcctttgcctccacatctgacatgtgcagtaataaaagctgcttccctggattgtgaagatctactacttccaatagcagcaatgttgtctgtggaaaacgtcttcattagacctgttgatccagagtaccagaaggaagcagaacagagacatcgagaattggcagctaaagctggaggatttaatgactttgcaactttagctgtcatctttgaacaatgcaaatcaagtggagctccagcttcatggtgccaaaaacactggattcattggaggtgcttattttctgcatttcgtgtggaagctcaacttcgagaactaatcaggaagcttaaacagcaaagtgatttcccaaaagagacctttgaaggccctaaacatgaagtactacgaagatgtctttgtgcgggctatttcaaaaatgtagctcgaagatctgttgggagaacgttttgcacaatggatggtcgtggaagcccagttcacattcatccttcctcagcacttcatgaacaggaaaccaaacttgaatggatcatttttcatgaggtattggttaccaccaaagtctacgcaagaattgtatgcccaatccgttatgaatgggtaagagacttgttacccaagttgcatgaatttaatgcacatgatttgagcagtgtggcccgacgtgaagtgagagaagatgcaagaaggagatggacaaataaggaaaatgtaaagcagctaaaggatggaatatcgaaagacgtcttaaagaaaatgcaaagaagaaatgatgacaaatccatatctgatgcacgggctcgtttccttgagagaaagcagcagaggacccaggaccacagtgacacacgaaaggaaacaggctaaggtggtgaaccctccaattcaggaagtgggaaaaggagccaggaaatgtgcttctactttgccagttatttcagacagcactacca

SEQ ID NO: 125642 - DNA, 750 bp, Homo sapiens
  Payload ID: 4627
  Gene Symbol: DHX40
  Gene Name: DEAH (Asp-Glu-Ala-His) box polypeptide 40
  ENST ID: ENST00000538926
  CDS Start-End: 1-750
atcaacagaggaggatatttttgccaccaccacctggaattagaaaatgtgtcatatccaccaatatttctgcaacgtctttgacaatagatggaatcagatatgtggtagatggtggcttcgtgaagcagttaaatcacaaccccagattagggttggacatcctggaggtggttccaatttcaaagagcgaggcattacagcgaagtggccgagctggcaggacttcttcaggaaaatgctttcggatctatagtaaagatttttggaaccagtgtatgcctgaccatgtgatccctgaaattaagagaactagtttgacatctgtagttctgaccttaaagtgccttgccatacacgatgtcataaggagtggccatgtcaccagattgggtttgtctatggtggagtttcctttgcctccacatctgacatgtgcagtaataaaagctgcttccctggattgtgaagatctactacttccaatagcagcaatgttgtctgtggaaaacgtcttcattagacctgttgatccagagtaccagaaggaagcagaacagagacatcgagaattggcagctaaagctggaggatttaatgactttgcaactttagctgtcatctttgaacaatgcaaatcaagtggagctccagcttcatggtgccaaaaacactggattcattggaggtgcttattttctgcatttcgtgtggaagctcaacttcgagaactaatcaggaagcttaaac

SEQ ID NO: 125643 - DNA, 539 bp, Homo sapiens
  Payload ID: 4627
  Gene Symbol: DHX40
  Gene Name: DEAH (Asp-Glu-Ala-His) box polypeptide 40
  ENST ID: ENST00000577596
  CDS Start-End: 62-277
tctttcccctcccatctcctcagatcggtggacgtgctcgcctccactcggggccaggtctatgtcccggtttcccgcagtcgcgggcagggcgccaaggcggcaggaggagggtgagcggtcaagagacctccaggaagagcggctctcggctgtttgcatcgccgatagagaagagaaaggatgcacgtcccaggagggaggaactactccaacttttcctattcagaaacaaagaaaaaagattattcaagctggttttcacaacatggtatgattggtgtaactcaaccacgaaaagtagctgctatatcagttgctcagagagtagctgaagaaatgaaatgcactttgggatccaaagtaggataccaagttcgttttgatgattgcagttctaaggagacagcaatcaaatatatgactgatggatgtttactgaaacatattctgggagacccaaatcttaccaaattcagtgtcattattttggatgaagcccatgaaagaactctaactacagatatcttatttggttt

SEQ ID NO: 125644 - DNA, 855 bp, Homo sapiens
  Payload ID: 4627
  Gene Symbol: DHX40
  Gene Name: DEAH (Asp-Glu-Ala-His) box polypeptide 40
  ENST ID: ENST00000580030
  CDS Start-End: 50-855
catctcctcagatcggtggacgtgctcgcctccactcggggccaggtctatgtcccggtttcccgcagtcgcgggcagggcgccaaggcggcaggaggaggaagagaaaggatgcacgtcccaggagggaggaactactccaacttttcctattcagaaacaaagaaaaaagattattcaagctgtgagggacaattcattccttattgttactggaaatacaggaagtggtaaaacaactcaactcccaaaatatctatatgaagcagggttttcacaacatggtatgattggtgtaactcaaccacgaaaagtagctgctatatcagttgctcagagagtagctgaagaaatgaaatgcactttgggatccaaagtaggataccaagttcgttttgatgattgcagttctaaggagacagcaatcaaatatatgactgatggatgtttactgaaacatattctgggagacccaaatcttaccaaattcagtgtcattattttggatgaagcccatgaaagaactctaactacagatatcttatttggtttattgaagaagctatttcaggagaagtctcctaataggaaggagcatttaaaagtggtggtaatgtcagcaactatggaattagccaagctctctgcattctttggaaattgtccaatatttgatatacctggaaggctttatccagtcagagagaaattctgcaatttgattggtccacgagacagagaaaatactgcgtatattcaagcgattgtgaaagtcaccatggatatccatttgaatgaaatggctggagacatcttggtttttctgactggccagtttgaaatagaaaaaagttg

SEQ ID NO: 125645 - DNA, 814 bp, Homo sapiens
  Payload ID: 4627
  Gene Symbol: DHX40
  Gene Name: DEAH (Asp-Glu-Ala-His) box polypeptide 40
  ENST ID: ENST00000580218
  CDS Start-End: 115-420
acaagtcgcacgcgcggaagtaaacacctctacgtcatcagggcgcgtcctcgtctttcccctcccatctcctcagatcggtggacgtgctcgcctccactcggggccaggtctatgtcccggtttcccgcagtcgcgggcagggcgccaaggcggcaggaggagggtgagcggtcaagagacctccaggaagagcggctctcggctgtttgcatcgccgatagagaagagaaaggatgcacgtcccaggagggaggaactactccaacttttcctattcagaaacaaagaaaaaagattattcaagctgtgagggacaattcattccttattgttactggaaatacaggaagtggtaaaacaactcaactcccaaaatatctatatgaagcaggagacagcaatcaaatatatgactgatggatgtttactgaaacatattctgggagacccaaatcttaccaaattcagtgtcattattttggatgaagcccatgaaagaactctaactacagatatcttatttggtttattgaagaagctatttcaggagaagtctcctaataggaaggagcatttaaaagtggtggtaatgtcagcaactatggaattagccaagctctctgcattctttggaaattgtccaatatttgatatacctggaaggctttatccagtcagagagaaattctgcaatttgattggtccacgagacagagaaaatactgcgtatattcaagcgattgtgaaagtcaccatggatatccatttgaatgaaatggctggagacatcttggtttttctgactggtgag

SEQ ID NO: 125646 - DNA, 580 bp, Homo sapiens
  Payload ID: 4627
  Gene Symbol: DHX40
  Gene Name: DEAH (Asp-Glu-Ala-His) box polypeptide 40
  ENST ID: ENST00000584385
  CDS Start-End: 60-580
tttcccctcccatctcctcagatcggtggacgtgctcgcctccactcggggccaggtctatgtcccggtttcccgcagtcgcgggcagggcgccaaggcggcaggaggagggtgagcggtcaagagacctccaggaagagcggctctcggctgtttgcatcgccgatagagggttttcacaacatggtatgattggtgtaactcaaccacgaaaagtagctgctatatcagttgctcagagagtagctgaagaaatgaaatgcactttgggatccaaagtaggataccaagttcgttttgatgattgcagttctaaggagacagcaatcaaatatatgactgatggatgtttactgaaacatattctgggagacccaaatcttaccaaattcagtgtcattattttggatgaagcccatgaaagaactctaactacagatatcttatttggtttattgaagaagctatttcaggagaagtctcctaataggaaggagcatttaaaagtggtggtaatgtcagcaactatggaattagccaagctctctgcattctttggaaattgtccaatatttgatat

SEQ ID NO: 125647 - DNA, 5558 bp, Homo sapiens
  Payload ID: 4628
  Gene Symbol: DHX8
  Gene Name: DEAH (Asp-Glu-Ala-His) box polypeptide 8
  Uniprot ID: Q14562
  ENST ID: ENST00000262415
  CDS Start-End: 73-3735
gaaagctggaacccggccggagtagctctgagcgccggctgtgaggaaggaggttctgggcaagctatagccatggctgtggctgtagccatggcgggagccttaatcgggtcggagccaggccccgcggaagaacttgccaaactcgagtacctgtctttggtgtcaaaggtttgcactgagctggacaatcacttggggatcaacgacaaggaccttgctgaatttgtgatcagtcttgctgagaaaaataccacctttgatacttttaaggcttctctcgtcaaaaatggtgcagaatttacggattctcttattagtaacttgctgcgtctcatacaaaccatgcggcctccagcgaagccttccactagcaaagatccagttgttaaacctaaaacagaaaaagaaaagctgaaggaactcttcccagtcctttgccaaccggacaacccttctgttcggaccatgttggatgaagatgatgtgaaagttgctgtggatgtcctgaaagaactggaagctttaatgcccagcgcagcaggccaggagaagcaaagagatgctgaacaccgggacaggacaaagaagaagaagcggagtcgaagccgagatcgaaaccgagatcgagacagagatagggaacgaaaccgagatagagaccacaagcggagacaccgatcccgctctcgatcacgttccaggacccgggagaggaataaagtgaagtctagatatcggtccaggagcaggagtcagagtccccccaaagaccggaaggaccgggacaaatatggagagcggaatctggatagatggcgggataagcatgtggaccgccctcctccagaagagcccaccattggtgacatttataatggcaaagttaccagcatcatgcagtttggttgctttgtgcagctggaaggactaaggaagcggtgggaaggcctggtgcacatctctgagctccggcgggagggtcgtgtggccaatgtagctgatgtcgtgagcaaaggccagagggtcaaagtcaaagtgctgtccttcactgggaccaagaccagcctgagcatgaaggatgtggatcaagagactggagaagatctaaacccaaatagacggcgaaatcttgtcggggagaccaatgaggagacctcaatgcggaatcctgatagacccactcacttgtcccttgtcagtgctcctgaagtagaggacgactcactggaacgcaagcgcctcacccgaatctctgacccagagaagtgggagatcaaacagatgattgctgccaatgtcctttccaaagaagaatttccagactttgatgaagagactggcattctccctaaggtggatgatgaagaagatgaggaccttgagattgaattggttgaggaagagcctccattcctgagagggcacactaagcaaagcatggacatgagccccattaaaattgtcaagaacccagacggctccctctcccaagcagcaatgatgcagagtgccttggccaaagaaaggcgggaactcaaacaggcccagcgggaagctgagatggattctattcccatgggactcaacaaacactgggttgaccctctgcctgatgcggaaggcagacagattgctgccaacatgaggggtattgggatgatgcccaatgatattcctgagtggaagaagcatgcctttgggggcaacaaagcctcttacggaaaaaagacccagatgtcaatccttgagcagagggagagcctgcccatctacaaactgaaggagcaattggtccaggccgtccatgacaatcagatcctgattgtcattggtgagacaggatctggaaagacaacacagatcacccagtacctggcggaggcaggctacacttccaggggcaagattgggtgtacccagcccagaagagtggcagctatgtcggtggccaaaagagtgtcagaggagtttggttgttgcttaggccaagaggtgggctacaccattcgatttgaggactgcactagccctgaaacagtcatcaagtacatgacagatgggatgttgcttagagagtgcttgattgaccctgacctcactcagtacgcgatcatcatgttggacgaggcacatgagaggacaattcacactgatgtgctctttggattgttgaaaaagacagttcagaaacggcaggacatgaagctgattgtcacctcagccaccttggatgcagtgaagttttctcaatacttctatgaagctcccattttcaccatcccaggtcgaacatatccagtggaaatactgtacacaaaggaacctgagacagattatctggatgccagcctgattactgttatgcagattcatttaacagaaccaccaggtgatatcctggtcttcctgactggtcaggaagaaattgatactgcttgtgagatcctgtatgaaagaatgaaatccctgggacctgatgttccagagttaattatcctcccagtgtactctgctcttcccagtgagatgcagacccgaatctttgacccagctccaccaggcagcagaaaggttgtgattgccaccaatatcgcagagacatcgctgactattgatggtatctactatgtggtggacccaggattcgtgaaacagaaagtttacaattccaagacagggattgaccagctcgtggtgacgcctatttctcaggctcaggcaaagcaacgagctggcagagctgggagaacaggcccagggaagtgttacaggttgtacacagaacgtgcctaccgagatgaaatgctgaccaccaacgtgccggaaatccagagaaccaacttagcaagcacagtgctgtcactcaaggccatgggtatcaatgatctgctgtcctttgatttcatggatgccccacctatggaaactttgatcacagccatggagcagctgtacacactgggggccctggatgacgagggcctgctcactcgcttgggccgccggatggcagagttccctctggagccaatgctatgcaaaatgctcatcatgtctgtgcatctgggctgcagtgaggaaatgctgaccattgtatccatgctgtctgtgcagaacgtcttctataggcccaaggataaacaagcccttgcagatcagaagaaggccaaattccaccagactgaaggggaccacctcaccctgctagctgtgtacaactcctggaagaacaacaagttctccaacccatggtgctatgagaactttatccaggctcgttccctgcgccgggcccaggacattcgcaagcagatgttaggcataatggacagacacaagctggatgttgtttcctgtggcaagtccacagtccgagtgcagaaggccatctgcagtgggttcttccgtaatgctgccaagaaagacccgcaggagggttaccggacactgatcgaccagcaggtggtctatatccatccttccagtgccctcttcaacagacagccagaatgggtggtgtaccatgagctggtgctcaccaccaaggaatacatgcgtgaagttaccaccatcgaccctcggtggcttgtggagtttgccccagccttcttcaaggtctcagacccaactaagctaagcaaacagaagaagcaacagcgtcttgaacccttgtacaaccgctatgaggaacccaatgcctggagaatatctcgagctttccgacggcgctgaaaggcaagattgttcctttgcctctccagcagcagtagccagggcttggacttatcgatgacaggctggtcctgaggatacagctgtcccgtgactgactgtcttaactgagcattttctcaactcgactctcatttcttccctgctggtaaaatagaaacagggatttaaacctggctttggcaagagcctgcagcctccatcaccccaagtccttgggcccagttgggagctcatatctaacacagagacacattgcatcaacttcaagaaagggacaatttgtgcagctccaggatgggaaggtggagtgggtgagcatcttgtgcagggacatggtgagtgccctgatgccccagctagcaggagctactgtgctcatctaaagtgtttgccccacttcccaccccgtctccagcccctgtactttggcttgacctcgtggaaatatttattttcttaaggaaacaaaaatggttttctgtgactgttttcttttagccgaaaggttaggatattggcctgggctcagggtgagggagatttagtatctgtgctctggcacacatgatgagaatcccctgaatcccctgaaaccagaacgcagggcctctttgcgctcggaaacgacgtacaacccagacttccagccttgtctttcagcatcagcactagccgggccgtgctgggggatcacccgatgatcaaccatgtcctctccacagagcacttcagtctggaggcctgagtggctacagatggcacatattaaatacagaaggtttccccttgctccctccacctcccacattcgcaatgtgcagcatgtcccatttccttttgaaacatactaagtaacaacacagcttttattttattttgtttttatttttttcccctgaggtcctggatggactttaacaaagggattttatggtcaaaacctccctttccccactccaaacagaaaacaaacataacacctctcctctcagctggtttgtgctgccagtatctgtgctgcagggcttgttcttagtggttttttcctagcacttgcttggagaatagccacctccttgtgccctcctcacagctcctgaggagggttttttttttttcttcccatagagatgggttcccactgtgctgcccaggctgctctccaatccctggcgtcaagcaatcctcctgcctctgcctcccaaagcgctgggattacagttgagagccactgtcctctgcactgaggaggctccttacctggcggaacatcaggcaggtcttgccaggccaggtttcggaacttacggaaagctggtctggatgtagtgcttgtagagaagcttctgagagattgggcacatcctgttacgttgctgcttctcctgtccttatgttattagtaagttctgaagtgatgtaaatgctagaactactgtagaactgtatgccagacactaagagagactatgtaacattccaggatataaaggaatgtatgttgtcactgggcagcaaaccacaccctaaagacaattcagaaagagtccgagggagaggaatataggccaggcaatctgctggctgcagatccctgccccttcattaagctgagtgcctcctgattctgtctgagtattcgcctttgtaagcccaggccagtaatcaaggggcagggcattgttgtgtgttaaccttgaaggccttctggggagagacagtacagggacctcaaatgaaaccaaaggggaaacggggactgggcacccacctccccaatctcgttttgtttttgtttttgttaagacaggatcttgcca

SEQ ID NO: 125648 - DNA, 3809 bp, Homo sapiens
  Payload ID: 4628
  Gene Symbol: DHX8
  Gene Name: DEAH (Asp-Glu-Ala-His) box polypeptide 8
  ENST ID: ENST00000540306
  CDS Start-End: 76-3621
agtgaaagctggaacccggccggagtagctctgagcgccggctgtgaggaaggaggttctgggcaagctatagccatggctgtggctgtagccatggcgggagccttaatcgggtcggagccaggccccgcggaagaacttgccaaactcgagtacctgtctttggtgtcaaaggtttgcactgagctggacaatcacttggggatcaacgacaaggaccttgctgaatttgtgatcagtcttgctgagaaaaataccacctttgatacttttaaggcttctctcgtcaaaaatggtgcagaatttacggattctcttattagtaacttgctgcgtctcatacaaaccatgcggcctccagcgaagccttccactagcaaagatccagttgttaaacctaaaacagaaaaagaaaagctgaaggaactcttcccagtcctttgccaaccggacaacccttctgttcggaccatgttggatgaagatgatgtgaaagttgctgtggatgtcctgaaagaactggaagctttaatgcccagcgcagcaggccaggagaagcaaagagatgctgaacaccgggacaggacaaagaagaagaagcggagtcgaagccgagatcgaaaccgagatcgagacagagatagggaacgaaaccgagatagagaccacaagcggagacaccgatcccgctctcgatcacgttccaggacccgggagaggaataaagtgaagtctagatatcggtccaggagcaggagtcagagtccccccaaagaccggaaggaccgggacaaatatggagagcggaatctggatagatggcgggataagcatgtggaccgccctcctccagaagagcccaccattggtgacatttataatggcaaagttaccagcatcatgcagtttggttgctttgtgcagctggaaggactaaggaagcggtgggaaggcctggtgcacatctctgagctccggcgggagggtcgtgtggccaatgtagctgatgtcgtgagcaaaggccagagggtcaaagtcaaagtgctgtccttcactgggaccaagaccagcctgagcatgaaggatgtggatcaagagactggagaagatctaaacccaaatagacggcgaaatcttgtcggggagaccaatgaggagacctcaatgcggaatcctgatagacccactcacttgtcccttgtcagtgctcctgaagtagaggacgactcactggaacgcaagcgcctcacccgaatctctgacccagagaagtgggagatcaaacagatgattgctgccaatgtcctttccaaagaagaatttccagactttgatgaagagactggcattctccctaaggtggatgatgaagaagatgaggaccttgagattgaattggttgaggaagagcctccattcctgagagggcacactaagcaaagcatggacatgagccccattaaaattgtcaagaacccagacggctccctctcccaagcagcaatgatgcagagtgccttggccaaagaaaggcgggaactcaaacaggcccagcgggaagctgagatggattctattcccatgggactcaacaaacactgggttgaccctctgcctgatgcggaaggcagacagattgctgccaacatgaggggtattgggatgatgcccaatgatattcctgagtggaagaagcatgcctttgggggcaacaaagcctcttacggaaaaaagacccagatgtcaatccttgagcagagggagagcctgcccatctacaaactgaaggagcaattggtccaggccgtccatgacaatcagatcctgattgtcattggtgagacaggatctggaaagacaacacagatcacccagtacctggcggaggcaggctacacttccaggggcaagattgggtgtacccagcccagaagagtggcagctatgtcggtggccaaaagagtgtcagaggagtttggttgttgcttaggccaagaggtgggctacaccattcgatttgaggactgcactagccctgaaacagtcatcaagtacatgacagatgggatgttgcttagagagtgcttgattgaccctgacctcactcagtacgcgatcatcatgttggacgaggcacatgagaggacaattcacactgatgtgctctttggattgttgaaaaagacagttcagaaacggcaggacatgaagctgattgtcacctcagccaccttggatgcagtgaagttttctcaatacttctatgaagctcccattttcaccatcccaggtcgaacatatccagtggaaatactgtacacaaaggaacctgagacagattatctggatgccagcctgattactgttatgcagattcatttaacagaaccaccaggtgatatcctggtcttcctgactggtcaggaagaaattgatactgcttgtgagatcctgtatgaaagaatgaaatccctgggacctgatgttccagagttaattatcctcccagtgtactctgctcttcccagtgagatgcagacccgaatctttgacccagctccaccaggcagcagaaaggttgtgattgccaccaatatcgcagagacatcgctgactattgatggtatctactatgtggtggacccaggattcgtgaaacagaaagtttacaattccaagacagggattgaccagctcgtggtgacgcctatttctcaggctcaggcaaagcaacgagctggcagagctgggagaacaggcccagggaagtgttacaggttgtacacagaacgtgcctaccgagatgaaatgctgaccaccaacgtgccggaaatccagagaaccaacttagcaagcacagtgctgtcactcaaggccatgggtatcaatgatctgctgtcctttgatttcatggatgccccacctatggaaactttgatcacagccatggagcagctgtacacactgggggccctggatgacgagggcctgctcactcgcttgggccgccggatggcagagttccctctggagccaatgctatgcaaaatgctcatcatgtctgtgcatctgggctgcagtgaggaaatgctgaccattgtatccatgctgtctgtgcagaacgtcttctataggcccaaggataaacaagcccttgcagatcagaagaaggccaaattccaccagactgaaggggaccacctcaccctgctagctgtgtacaactcctggaagaacaacaagttctccaacccatggtgctatgagaactttatccaggctcgttccctgcgccgggcccaggacattcgcaagcagatgttaggcataatggacagacacaagctggatgttgtttcctgtggcaagtccacagtccgagtgcagaaggccatctgcagtgggttcttccgtaatgctgccaagaaagacccgcaggagggttaccggacactgatcgaccagcaggtggtctatatccatccttccagtgccctcttcaacagacagccagaatgcccaaagcacttcctccctgtggttgctgtagctgtctcattggagcagtgcctctccaagtttgaggatttgaacaaagaactgggactggtgacttgttaatgaacagttcagagggcagagggccatcatctcagcttgtggagacctttctttccctggatgctgcttctcagctaactccctctctcttcgtgtgtgtactcggccttcagggtttccaccgatttttacaccttcttcccaccacgatagcttggctttaatgtggaattaaattatatattttt

SEQ ID NO: 125649 - DNA, 492 bp, Homo sapiens
  Payload ID: 4628
  Gene Symbol: DHX8
  Gene Name: DEAH (Asp-Glu-Ala-His) box polypeptide 8
  ENST ID: ENST00000587574
  CDS Start-End: 1-100
ttaccggacactgatcgaccagcaggtggtctatatccatccttccagtgccctcttcaacagacagccagaatggaccgtccctatggggcatgtgtgagctccgcagctgggtcaggctcctcggtccaggtttacttcatcccgcctggacgtgatttggctttgactgtctctcctgcagcccaaagcacttcctccctgtggttgctgtagctgtctcattggagcagtgcctctccaagtttgaggatttgaacaaagaactgggactggtgacttgttaatgaacagttcagagggcagagggccatcatctcagcttgtggagacctttctttccctggatgctgcttctcagctaactccctctctcttcgtgtgtgtactcggccttcagggtttccaccgatttttacaccttcttcccaccacgatagcttggctttaatgtggaattaaattatatatttttaaaacctgtttttaaaa

SEQ ID NO: 125650 - DNA, 739 bp, Homo sapiens
  Payload ID: 4628
  Gene Symbol: DHX8
  Gene Name: DEAH (Asp-Glu-Ala-His) box polypeptide 8
  ENST ID: ENST00000589898
  CDS Start-End: 1-417
aaggccaaattccaccagactgaaggggaccacctcaccctgctagctgtgtacaactcctggaagaacaacaagttctccaacccatggtgctatgagaactttatccaggctcgttccctgcgccgggcccaggacattcgcaagcagatgttaggcataatggacagacacaagctggatgttgtttcctgtggcaagtccacagtccgagtgcagaaggccatctgcagtgggttcttccgtaatgctgccaagaaagacccgcaggagggttaccggacactgatcgaccagcaggtggtctatatccatccttccagtgccctcttcaacagacagccagaatgggacctctactcacggttttctgaatggaaatcaggaacaaactgctcatcactgtctggtacctgagctgcagagagaagtcagagccccaccagcgacaccctcaggccccaccaaaacgcactgaagaatccaaccaggaaacctcctgaacacaccacttccccatcagacccagccacggacccagccacggaccccaccccagccagctcacagctaactccccagcacacaggaaggggggaatttgcctggaggcagaggtattcaagcgggatggaagagggaggaacacttgctattagaattacaatcaaggctatttggggagggagccctgggctctctgtgccaaaggactgccgaaaagaattatttaaacttt

SEQ ID NO: 125651 - DNA, 590 bp, Homo sapiens
  Payload ID: 4628
  Gene Symbol: DHX8
  Gene Name: DEAH (Asp-Glu-Ala-His) box polypeptide 8
  ENST ID: ENST00000592258
  CDS Start-End: 174-335
acttcctgtttgatctctatgatccatcctgttgggacttgattcgttcctcaaattttcaatttaccgtaaacaaaggggacgcgcgctgacccggaagtgaaagctggaacccggccggagtagctctgagcgccggctgtgaggaaggaggttctgggcaagctatagccatggctgtggctgtagccatggcgggagccttaatcgggtcggagccaggccccgcggaagaacttgccaaactcgagtacctgtctttggtgtcaaaggtttgcactgagctggacaatcacttggggatcaacgacaaggaccttggattctcttattagtaacttgctgcgtctcatacaaaccatgcggcctccagcgaagccttccactagcaaagatccagttgttaaacctaaaacagaaaaagaaaagctgaaggaactcttcccagtcctttgccaaccggacaacccttctgttcggaccatgttggatgaagatgatgtgaaagttgctgtggatgtcctgaaagaactggaagctttaatgcccagcgcagcaggccaggagaagcaaagagatgctgaacaccg

SEQ ID NO: 125652 - DNA, 2540 bp, Homo sapiens
  Payload ID: 4629
  Gene Symbol: DQX1
  Gene Name: DEAQ box RNA-dependent ATPase 1
  Uniprot ID: Q8TE96
  ENST ID: ENST00000393951
  CDS Start-End: 72-2225
gactacgtgggtctggagctgactgccgtcctgacacgtcctagagctgcaagtcctgccagagagccaccatgacctctcagcctctcaggctagcagaagagtatggcccaagtcctggggagtctgaactggctgtgaacccctttgatgggcttcccttctcttcccgctactatgagctgctgaagcagcgccaagccttgcccatctgggctgctcgctttaccttcttggagcagttggagagtaaccccactggagtggtgctggtgtctggggagcctggttctggcaagagcacccagatccctcagtggtgtgcagagtttgcgctggccagagggttccagaaaggacaggttactgttactcagccctaccctcttgcagcccggagcctggctctgcgggttgctgatgagatggacctgaccctgggtcatgaggttggatacagcatcccccaggaggactgcacggggcccaacaccctgctcaggttctgctgggacaggctgcttctgcaggaggtggcctcgacccgaggcactggagcctggggcgtgctggtactagatgaggctcaggagcggtcggtggcatcagattcactccaggggctactgcaagatgccaggctggaaaaacttccgggggacctcagagtggttgtggttactgacccagcccttgaacctaagctccgagctttctggggcaatcctcctattgtgcatatacccagagagcctggtgagagaccttcccccatctactgggacaccatcccacctgatcgggtggaagctgcctgccaagcagtgcttgaattgtgtcggaaggagcttccaggagatgtgctagtgttcctgcccagtgaggaggaaatttccctgtgctgtgaatccttgtccagggaggtagagtccttgcttctccaagggcttccaccacgagtactgccccttcacccagactgtggacgagccgttcaggctgtgtatgaggacatggatgcccgaaaggttgtggtcactcactggctggctgacttctccttctccctcccttccatccaacatgtcatcgactcaggactggagctccgaagtgtttacaatcctaggatccgagcagaattccaagtgttgaggccaatcagcaagtgtcaggcagaggcaagacgattgcgagcaagagggttcccaccaggatcctgcctctgcctgtatcctaagtccttcttagaactagaagctccaccattgccacaacccagggtgtgtgaggagaatctgagctccctggtgttactactaaaaaggagacagattgcagagccaggggagtgtcacttcctggaccagcctgctccagaagcactgatgcaagccctggaagatttagactatctggcagccctggatgatgatggggacctgtcagatctgggtgtcatactatcagaattccctctggcccctgagctggccaaagccctgctggcctcatgcgagtttgactgtgtggacgagatgctcaccctggctgccatgctcacagctgcccctgggtttacccgtcctccactcagtgcagaagaagctgccctgcgtcgggccctggaacacacggatggtgaccacagttctctgatccaggtgtatgaagcctttatacaaagtggagcagatgaggcttggtgccaggctcgaggtctgaattgggcagcattgtgccaagcccataaacttcggggagaactcctagaactcatgcaacgaattgaacttcccttgtccctaccagcctttggctctgagcagaatcgcagagaccttcagaaagcactggtgtcaggatactttctcaaggtggccagagacacagacgggactggaaattaccttctcctaacccataagcatgtggcccagctctcctcatactgctgctaccgaagccgcagagctcctgccagacccccaccatgggtgctctaccacaatttcaccatatccaaagacaactgcctttccattgtttctgagattcaaccacagatgctggtggaattggcccctccatacttcctgagtaacttgcctcccagtgagagcagagaccttctgaaccagctaagggaaggaatggcagattctacagcagggagcaaatcatcctcagcccaggagttcagagatccctgtgtcctgcagtgacctgcctgcctatggaatggagctgggttcatctcatcacattagattatccctcagggtgacaccaaagcacccagacagatttagaagcccaaagtttagggtcaaatgtaaaccctggaacctgagtcccaagaaatggtagactgggaatggaaagaatggggtaaaccacagtctacatagggaaggactctttccttagccttctcttattgattggagagggactgacatgctcctcattctcttaactttgccaaacccattcttgtactcccttgtgatctataaaagatttttctatgatgccaa

SEQ ID NO: 125653 - DNA, 2689 bp, Homo sapiens
  Payload ID: 4629
  Gene Symbol: DQX1
  Gene Name: DEAQ box RNA-dependent ATPase 1
  Uniprot ID: Q8TE96
  ENST ID: ENST00000404568
  CDS Start-End: 221-2374
gttttccataggttcctgactaggttaaataaggtggagcaaatagccccaccccaaaagcaggcttcaggatttgaagtttgagcccatccctgaggtagagccggaatttacctttgtacttcacacggtcagggttggtggtgactacgtgggtctggagctgactgccgtcctgacacgtcctagagctgcaagcaggtcctgccagagagccaccatgacctctcagcctctcaggctagcagaagagtatggcccaagtcctggggagtctgaactggctgtgaacccctttgatgggcttcccttctcttcccgctactatgagctgctgaagcagcgccaagccttgcccatctgggctgctcgctttaccttcttggagcagttggagagtaaccccactggagtggtgctggtgtctggggagcctggttctggcaagagcacccagatccctcagtggtgtgcagagtttgcgctggccagagggttccagaaaggacaggttactgttactcagccctaccctcttgcagcccggagcctggctctgcgggttgctgatgagatggacctgaccctgggtcatgaggttggatacagcatcccccaggaggactgcacggggcccaacaccctgctcaggttctgctgggacaggctgcttctgcaggaggtggcctcgacccgaggcactggagcctggggcgtgctggtactagatgaggctcaggagcggtcggtggcatcagattcactccaggggctactgcaagatgccaggctggaaaaacttccgggggacctcagagtggttgtggttactgacccagcccttgaacctaagctccgagctttctggggcaatcctcctattgtgcatatacccagagagcctggtgagagaccttcccccatctactgggacaccatcccacctgatcgggtggaagctgcctgccaagcagtgcttgaattgtgtcggaaggagcttccaggagatgtgctagtgttcctgcccagtgaggaggaaatttccctgtgctgtgaatccttgtccagggaggtagagtccttgcttctccaagggcttccaccacgagtactgccccttcacccagactgtggacgagccgttcaggctgtgtatgaggacatggatgcccgaaaggttgtggtcactcactggctggctgacttctccttctccctcccttccatccaacatgtcatcgactcaggactggagctccgaagtgtttacaatcctaggatccgagcagaattccaagtgttgaggccaatcagcaagtgtcaggcagaggcaagacgattgcgagcaagagggttcccaccaggatcctgcctctgcctgtatcctaagtccttcttagaactagaagctccaccattgccacaacccagggtgtgtgaggagaatctgagctccctggtgttactactaaaaaggagacagattgcagagccaggggagtgtcacttcctggaccagcctgctccagaagcactgatgcaagccctggaagatttagactatctggcagccctggatgatgatggggacctgtcagatctgggtgtcatactatcagaattccctctggcccctgagctggccaaagccctgctggcctcatgcgagtttgactgtgtggacgagatgctcaccctggctgccatgctcacagctgcccctgggtttacccgtcctccactcagtgcagaagaagctgccctgcgtcgggccctggaacacacggatggtgaccacagttctctgatccaggtgtatgaagcctttatacaaagtggagcagatgaggcttggtgccaggctcgaggtctgaattgggcagcattgtgccaagcccataaacttcggggagaactcctagaactcatgcaacgaattgaacttcccttgtccctaccagcctttggctctgagcagaatcgcagagaccttcagaaagcactggtgtcaggatactttctcaaggtggccagagacacagacgggactggaaattaccttctcctaacccataagcatgtggcccagctctcctcatactgctgctaccgaagccgcagagctcctgccagacccccaccatgggtgctctaccacaatttcaccatatccaaagacaactgcctttccattgtttctgagattcaaccacagatgctggtggaattggcccctccatacttcctgagtaacttgcctcccagtgagagcagagaccttctgaaccagctaagggaaggaatggcagattctacagcagggagcaaatcatcctcagcccaggagttcagagatccctgtgtcctgcagtgacctgcctgcctatggaatggagctgggttcatctcatcacattagattatccctcagggtgacaccaaagcacccagacagatttagaagcccaaagtttagggtcaaatgtaaaccctggaacctgagtcccaagaaatggtagactgggaatggaaagaatggggtaaaccacagtctacatagggaaggactctttccttagccttctcttattgattggagagggactgacatgctcctcattctcttaactttgccaaacccattcttgtactcccttgtgatctataaaagatttttctatgatgccaa

SEQ ID NO: 125654 - DNA, 1688 bp, Homo sapiens
  Payload ID: 4629
  Gene Symbol: DQX1
  Gene Name: DEAQ box RNA-dependent ATPase 1
  ENST ID: ENST00000418139
  CDS Start-End: 1-399
gaggaaatttccctgtgctgtgaatccttgtccagggaggtagagtccttgcttctccaagggcttccaccacgagtactgccccttcacccagactgtggacgagccgttcaggctgtgtatgaggacatggatgcccgaaaggttgtggtcactcactggctggctgacttctccttctccctcccttccatccaacatgtcatcgactcaggactggagctccgaagtgtttacaatcctaggatccgagcagaattccaagtgttgaggccaatcagcaagtgtcaggcagaggcaagacgattgcgagcaagagggttcccaccagtggtcttctttcccaggtctttttcccctcaggatcctgcctctgcctgtatcctaagtccttcttagaactagaagctccaccattgccacaacccagggtgtgtgaggagaatctgagctccctggtgttactactaaaaaggagacagattgcagagccaggggagtgtcacttcctggaccagcctgctccagaagcactgatgcaagccctggaagatttagactatctggcagccctggatgatgatggggacctgtcagatctgggtgtcatactatcagaattccctctggcccctgagctggccaaagccctgctggcctcatgcgagtttgactgtgtggacgagatgctcaccctggctgccatgctcacagctgcccctgggtttacccgtcctccactcagtgcagaagaagctgccctgcgtcgggccctggaacacacggatggtgaccacagttctctgatccaggtgtatgaagcctttatacaaagtggagcagatgaggcttggtgccaggctcgaggtctgaattgggcagcattgtgccaagcccataaacttcggggagaactcctagaactcatgcaacgaattgaacttcccttgtccctaccagcctttggctctgagcagaatcgcagagaccttcagaaagcactggtgtcaggatactttctcaaggtggccagagacacagacgggactggaaattaccttctcctaacccataagcatgtggcccagctctcctcatactgctgctaccgaagccgcagagctcctgccagacccccaccatgggtgctctaccacaatttcaccatatccaaagacaactgcctttccattgtttctgagattcaaccacagatgctggtggaattggcccctccatacttcctgagtaacttgcctcccagtgagagcagagaccttctgaaccagctaagggaaggaatggcagattctacagcagggagcaaatcatcctcagcccaggagttcagagatccctgtgtcctgcagtgacctgcctgcctatggaatggagctgggttcatctcatcacattagattatccctcagggtgacaccaaagcacccagacagatttagaagcccaaagtttagggtcaaatgtaaaccctggaacctgagtcccaagaaatggtagactgggaatggaaagaatggggtaaaccacagtctacatagggaaggactctttccttagccttctcttattgattggagagggactgacatgctcctcattctcttaactttgccaaacccattcttgtactcccttgtgatctataaaagatttttctatgatgccaa

SEQ ID NO: 125655 - DNA, 555 bp, Homo sapiens
  Payload ID: 4629
  Gene Symbol: DQX1
  Gene Name: DEAQ box RNA-dependent ATPase 1
  ENST ID: ENST00000451518
  CDS Start-End: 199-555
acttcacacggtcagggttggtggtgactacgtgggtctggagctgactgccgtcctgacacgtcctagagctgcaagcagatccctcagtggtgtgcagagtttgcgctggccagagggttccagaaaggacaggttactgttactcagccctaccctcttgcagcccggagcctggctctgcgggttgctgatgagatggacctgaccctgggtcatgaggttggatacagcatcccccaggaggactgcacggggcccaacaccctgctcaggttctgctgggacaggctgcttctgcaggaggtggcctcgacccgaggcactggagcctggggcgtgctggtactagatgaggctcaggagcggtcggtggcatcagattcactccaggggctactgcaagatgccaggctggaaaaacttccgggggacctcagagtggttgtggttactgacccagcccttgaacctaagctccgagctttctggggcaatcctcctattgtgcatatacccagagagcctggtgagagaccttcccccatctactgg

SEQ ID NO: 125656 - DNA, 1649 bp, Homo sapiens
  Payload ID: 4630
  Gene Symbol: DAP3
  Gene Name: death associated protein 3
  Uniprot ID: P51398
  ENST ID: ENST00000343043
  CDS Start-End: 169-1365
ccttttttgcagtctcaggacgggcgctttggagccggccccaggcagcgtgtgtcggtcgcctagtctggagaactagtcctcgactcacggtgagggaatggaccgacacgggtattgtaccgctgagggaaaggagcgggactccggacctccaggagtgcaaggatgatgctgaaaggaataacaaggcttatctctaggatccataagttggaccctgggcgttttttacacatggggacccaggctcgccaaagcattgctgctcacctagataaccaggttccagttgagagtccgagagctatttcccgcaccaatgagaatgacccggccaagcatggggatcagcacgagggtcagcactacaacatctccccccaggatttggagactgtatttccccatggccttcctcctcgctttgtgatgcaggtgaagacattcagtgaagcttgcctgatggtaaggaaaccagccctagaacttctgcattacctgaaaaacaccagttttgcttatccagctatacgatatcttctgtatggagagaagggaacaggaaaaaccctaagtctttgccatgttattcatttctgtgcaaaacaggactggctgatactacatattccagatgctcatctttgggtgaaaaattgtcgggatcttctgcagtccagctacaacaaacagcgctttgatcaacctttagaggcttcaacctggctgaagaatttcaaaactacaaatgagcgcttcctgaaccagataaaagttcaagagaagtatgtctggaataagagagaaagcactgagaaagggagtcctctgggagaagtggttgaacagggcataacacgggtgaggaacgccacagatgcagttggaattgtgctgaaagagctaaagaggcaaagttctttgggtatgtttcacctcctagtggccgtggatggaatcaatgctctttggggaagaaccactctgaaaagagaagataaaagcccgattgcccccgaggaattagcacttgttcacaacttgaggaaaatgatgaaaaatgattggcatggaggcgccattgtgtcggctttgagccagactgggtctctctttaagccccggaaagcctatctgccccaggagttgctgggaaaggaaggatttgatgccctggatccctttattcccatcctggtttccaactataacccaaaggaatttgaaagttgtattcagtattatttggaaaacaattggcttcaacatgagaaagctcctacagaagaagggaaaaaagagctgctgttcctaagtaacgcgaacccctcgctgctggagcggcactgtgcctacctctaagccaagatcacagcatgtgaggaagacagtggacatctgctttatgctggacccagtaagatgaggaagtcgggcagtacacaggaagaggagccaggcccttgtacctatgggattggacaggactgcagttggctctggacctgcattaaaatgggtttcactgtgaatgcgtgacaataagatattcccttgttcctaaaactttatatcagtttattggatgtggtttttcacatttaagataattatggctcttttcctaaaaaataaaatatctttct

SEQ ID NO: 125657 - DNA, 2089 bp, Homo sapiens
  Payload ID: 4630
  Gene Symbol: DAP3
  Gene Name: death associated protein 3
  Uniprot ID: P51398
  ENST ID: ENST00000368336
  CDS Start-End: 125-1321
gtcgtttcctgccggatgacccgacccttttttgcagtctcaggacgggcgctttggagccggccccaggcagcgtgtgtcggtcgcctagtctggagaactagtcctcgactcacgtgcaaggatgatgctgaaaggaataacaaggcttatctctaggatccataagttggaccctgggcgttttttacacatggggacccaggctcgccaaagcattgctgctcacctagataaccaggttccagttgagagtccgagagctatttcccgcaccaatgagaatgacccggccaagcatggggatcagcacgagggtcagcactacaacatctccccccaggatttggagactgtatttccccatggccttcctcctcgctttgtgatgcaggtgaagacattcagtgaagcttgcctgatggtaaggaaaccagccctagaacttctgcattacctgaaaaacaccagttttgcttatccagctatacgatatcttctgtatggagagaagggaacaggaaaaaccctaagtctttgccatgttattcatttctgtgcaaaacaggactggctgatactacatattccagatgctcatctttgggtgaaaaattgtcgggatcttctgcagtccagctacaacaaacagcgctttgatcaacctttagaggcttcaacctggctgaagaatttcaaaactacaaatgagcgcttcctgaaccagataaaagttcaagagaagtatgtctggaataagagagaaagcactgagaaagggagtcctctgggagaagtggttgaacagggcataacacgggtgaggaacgccacagatgcagttggaattgtgctgaaagagctaaagaggcaaagttctttgggtatgtttcacctcctagtggccgtggatggaatcaatgctctttggggaagaaccactctgaaaagagaagataaaagcccgattgcccccgaggaattagcacttgttcacaacttgaggaaaatgatgaaaaatgattggcatggaggcgccattgtgtcggctttgagccagactgggtctctctttaagccccggaaagcctatctgccccaggagttgctgggaaaggaaggatttgatgccctggatccctttattcccatcctggtttccaactataacccaaaggaatttgaaagttgtattcagtattatttggaaaacaattggcttcaacatgagaaagctcctacagaagaagggaaaaaagagctgctgttcctaagtaacgcgaacccctcgctgctggagcggcactgtgcctacctctaagccaagatcacagcatgtgaggaagacagtggacatctgctttatgctggacccagtaagatgaggaagtcgggcagtacacaggaagaggagccaggcccttgtacctatgggattggacaggactgcagttggctctggacctgcattaaaatgggtttcactgtgaatgcgtgacaataagatattcccttgttcctaaaactttatatcagtttattggatgtggtttttcacatttaagataattatggctcttttcctaaaaaataaaatatctttctaaagtgttgtgttagattaataatatggaaggagtctttagattggccaaattgcatttctctgatattcctcttgttgcaggtcagaagagatcaattctacagaaatttccagtggttctgttgaggctttatggaattcagcatgtcaaaattcacagctggctgggcacagtggctcatgcctgtaatcccagcactttggaagcccaaggcgggcagactgcttgagttcaggagtttgcaaccagcctgggcaacatggtgaaaacctgtctctactaaaaatacaaaaattagccgggcacggtggcatgcgcctgtaatccaagctacttgggaggctgaggcaggagaattgcttcaacttgggaggcggatgttgcagtgagccaaaattgcaccactgcactccagcctgggcagcagagcaagactccgtctcaaaataaataaataaataaataaataaataaataataaa

SEQ ID NO: 125658 - DNA, 1470 bp, Homo sapiens
  Payload ID: 4630
  Gene Symbol: DAP3
  Gene Name: death associated protein 3
  Uniprot ID: P51398
  ENST ID: ENST00000421487
  CDS Start-End: 92-1186
gcagtctcaggacgggcgctttggagccggccccaggcagcgtgtgtcggtcgcctagtctggagaactagtcctcgactcacgtgcaaggatgatgctgaaaggaataacaaggcttatctctaggatccataagttggaccctgggcgttttttacacatggggacccaggctcgccaaagcattgctgctcacctagataaccaggttccagttgagagtccgagagctatttcccgcaccaatgagaatgacccggtgaagacattcagtgaagcttgcctgatggtaaggaaaccagccctagaacttctgcattacctgaaaaacaccagttttgcttatccagctatacgatatcttctgtatggagagaagggaacaggaaaaaccctaagtctttgccatgttattcatttctgtgcaaaacaggactggctgatactacatattccagatgctcatctttgggtgaaaaattgtcgggatcttctgcagtccagctacaacaaacagcgctttgatcaacctttagaggcttcaacctggctgaagaatttcaaaactacaaatgagcgcttcctgaaccagataaaagttcaagagaagtatgtctggaataagagagaaagcactgagaaagggagtcctctgggagaagtggttgaacagggcataacacgggtgaggaacgccacagatgcagttggaattgtgctgaaagagctaaagaggcaaagttctttgggtatgtttcacctcctagtggccgtggatggaatcaatgctctttggggaagaaccactctgaaaagagaagataaaagcccgattgcccccgaggaattagcacttgttcacaacttgaggaaaatgatgaaaaatgattggcatggaggcgccattgtgtcggctttgagccagactgggtctctctttaagccccggaaagcctatctgccccaggagttgctgggaaaggaaggatttgatgccctggatccctttattcccatcctggtttccaactataacccaaaggaatttgaaagttgtattcagtattatttggaaaacaattggcttcaacatgagaaagctcctacagaagaagggaaaaaagagctgctgttcctaagtaacgcgaacccctcgctgctggagcggcactgtgcctacctctaagccaagatcacagcatgtgaggaagacagtggacatctgctttatgctggacccagtaagatgaggaagtcgggcagtacacaggaagaggagccaggcccttgtacctatgggattggacaggactgcagttggctctggacctgcattaaaatgggtttcactgtgaatgcgtgacaataagatattcccttgttcctaaaactttatatcagtttattggatgtggtttttcacatttaagataattatggctcttttcctaaaaaataaaatatctttct

SEQ ID NO: 125659 - DNA, 1894 bp, Homo sapiens
  Payload ID: 4630
  Gene Symbol: DAP3
  Gene Name: death associated protein 3
  Uniprot ID: P51398
  ENST ID: ENST00000535183
  CDS Start-End: 92-1165
gcagtctcaggacgggcgctttggagccggccccaggcagcgtgtgtcggtcgcctagtctggagaactagtcctcgactcacgtgcaaggatgatgctgaaaggaataacaaggcttatctctaggatccataaggccaagcatggggatcagcacgagggtcagcactacaacatctccccccaggatttggagactgtatttccccatggccttcctcctcgctttgtgatgcaggtgaagacattcagtgaagcttgcctgatggtaaggaaaccagccctagaacttctgcattacctgaaaaacaccagttttgcttatccagctatacgatatcttctgtatggagagaagggaacaggaaaaaccctaagtctttgccatgttattcatttctgtgcaaaacaggactggctgatactacatattccagatgctcatctttgggtgaaaaattgtcgggatcttctgcagtccagctacaacaaacagcgctttgatcaacctttagaggcttcaacctggctgaagaatttcaaaactacaaatgagcgcttcctgaaccagataaaagttcaagagaagtatgtctggaataagagagaaagcactgagaaagggagtcctctgggagaagtggttgaacagggcataacacgggtgaggaacgccacagatgcagttggaattgtgctgaaagagctaaagaggcaaagttctttgggtatgtttcacctcctagtggccgtggatggaatcaatgctctttggggaagaaccactctgaaaagagaagataaaagcccgattgcccccgaggaattagcacttgttcacaacttgaggaaaatgatgaaaaatgattggcatggaggcgccattgtgtcggctttgagccagactgggtctctctttaagccccggaaagcctatctgccccaggagttgctgggaaaggaaggatttgatgccctggatccctttattcccatcctggtttccaactataacccaaaggaatttgaaagttgtattcagtattatttggaaaacaattggcttcaacatgagaaagctcctacagaagaagggaaaaaagagctgctgttcctaagtaacgcgaacccctcgctgctggagcggcactgtgcctacctctaagccaagatcacagcatgtgaggaagacagtggacatctgctttatgctggacccagtaagatgaggaagtcgggcagtacacaggaagaggagccaggcccttgtacctatgggattggacaggactgcagttggctctggacctgcattaaaatgggtttcactgtgaatgcgtgacaataagatattcccttgttcctaaaactttatatcagtttattggatgtggtttttcacatttaagataattatggctcttttcctaaaaaataaaatatctttctaaagtgttgtgttagattaataatatggaaggagtctttagattggccaaattgcatttctctgatattcctcttgttgcaggtcagaagagatcaattctacagaaatttccagtggttctgttgaggctttatggaattcagcatgtcaaaattcacagctggctgggcacagtggctcatgcctgtaatcccagcactttggaagcccaaggcgggcagactgcttgagttcaggagtttgcaaccagcctgggcaacatggtgaaaacctgtctctactaaaaatacaaaaattagccgggcacggtggcatgcgcctgtaatccaagctacttgggaggctgaggcaggagaattgcttcaacttgggaggcggatgttgcagtgagccaaaattgcaccactgcactccagcctgggcagcagagcaagactccgtctc

SEQ ID NO: 125660 - DNA, 550 bp, Homo sapiens
  Payload ID: 4630
  Gene Symbol: DAP3
  Gene Name: death associated protein 3
  ENST ID: ENST00000463575
  CDS Start-End: 8-550
tgcaaggatgatgctgaaaggaataacaaggcttatctctaggatccataagttggaccctgggcgttttttacacatggggacccaggctcgccaaagcattgctgctcacctagataaccaggttccagttgagagtccgagagctatttcccgcaccaatgagaatgacccggccaagcatggggatcagcacgagggtcagcactacaacatctccccccaggatttggagactgtatttccccatggccttcctcctcgctttgtgatgcaggtgaagacattcagtgaagcttgcctgatggactggctgatactacatattccagatgctcatctttgggtgaaaaattgtcgggatcttctgcagtccagctacaacaaacagcgctttgatcaacctttagaggcttcaacctggctgaagaatttcaaaactacaaatgagcgcttcctgaaccagggcataacacgggtgaggaacgccacagatgcagttggaattgtgctgaaagagctaaagaggcaaagttctttgggtatgttt

SEQ ID NO: 125661 - DNA, 816 bp, Homo sapiens
  Payload ID: 4630
  Gene Symbol: DAP3
  Gene Name: death associated protein 3
  ENST ID: ENST00000477394
  CDS Start-End: 1-632
aagggagtcctctgggagaagtggttgaacagggcataacacgggtgaggaacgccacagatgcagttggaattgtgctgaaagagctaaagaggcaaagttctttgggtatgtttcacctcctagtggccgtggatggaatcaatgctctttggggaagaaccactctgaaaagagaagataaaagcccgattgcccccgaggaattagcacttgttcacaacttgaggaaaatgatgaaaaatgattggcatggaggcgccattgtgtcggctttgagccagactgggtctctctttaagccccggaaagcctatctgccccaggagttgctgggaaagggttttaccacatggcccaggctcgtctggaactcctgggctcaagcaatatgcccatctcagcctcccaaggtgctgggattacaggaaggatttgatgccctggatccctttattcccatcctggtttccaactataacccaaaggaatttgaaagttgtattcagtattatttggaaaacaattggcttcaacatgagaaagctcctacagaagaagggaaaaaagagctgctgttcctaagtaacgcgaacccctcgctgctggagcggcactgtgcctacctctaagccaagatcacagcatgtgaggaagacagtggacatctgctttatgctggacccagtaagatgaggaagtcgggcagtacacaggaagaggagccaggcccttgtacctatgggattggacaggactgcagttggctctggacctgcattaaaatgggtttcactgtgaatgcgtgacaataag

SEQ ID NO: 125662 - DNA, 1671 bp, Homo sapiens
  Payload ID: 4630
  Gene Symbol: DAP3
  Gene Name: death associated protein 3
  Uniprot ID: P51398
  ENST ID: ENST00000471642
  CDS Start-End: 314-1387
cagaggtccaggtccgggagatgacagtggctcccagaaagcccaggattcaatcgctgagagagtgcttaggcccgaatgccggcccaaatcgttctactcaccgtgtcggaggccgagagcgatgagagtacagggaagtgaggaagagggggtggccgccaggctcctccgcttccctgggtccaccgcggatccctcccgcttgtcaggaggcggccagcggtctcaggacgggcgctttggagccggccccaggcagcgtgtgtcggtcgcctagtctggagaactagtcctcgactcacgtgcaaggatgatgctgaaaggaataacaaggcttatctctaggatccataaggccaagcatggggatcagcacgagggtcagcactacaacatctccccccaggatttggagactgtatttccccatggccttcctcctcgctttgtgatgcaggtgaagacattcagtgaagcttgcctgatggtaaggaaaccagccctagaacttctgcattacctgaaaaacaccagttttgcttatccagctatacgatatcttctgtatggagagaagggaacaggaaaaaccctaagtctttgccatgttattcatttctgtgcaaaacaggactggctgatactacatattccagatgctcatctttgggtgaaaaattgtcgggatcttctgcagtccagctacaacaaacagcgctttgatcaacctttagaggcttcaacctggctgaagaatttcaaaactacaaatgagcgcttcctgaaccagataaaagttcaagagaagtatgtctggaataagagagaaagcactgagaaagggagtcctctgggagaagtggttgaacagggcataacacgggtgaggaacgccacagatgcagttggaattgtgctgaaagagctaaagaggcaaagttctttgggtatgtttcacctcctagtggccgtggatggaatcaatgctctttggggaagaaccactctgaaaagagaagataaaagcccgattgcccccgaggaattagcacttgttcacaacttgaggaaaatgatgaaaaatgattggcatggaggcgccattgtgtcggctttgagccagactgggtctctctttaagccccggaaagcctatctgccccaggagttgctgggaaaggaaggatttgatgccctggatccctttattcccatcctggtttccaactataacccaaaggaatttgaaagttgtattcagtattatttggaaaacaattggcttcaacatgagaaagctcctacagaagaagggaaaaaagagctgctgttcctaagtaacgcgaacccctcgctgctggagcggcactgtgcctacctctaagccaagatcacagcatgtgaggaagacagtggacatctgctttatgctggacccagtaagatgaggaagtcgggcagtacacaggaagaggagccaggcccttgtacctatgggattggacaggactgcagttggctctggacctgcattaaaatgggtttcactgtgaatgcgtgacaataagatattcccttgttcctaaaactttatatcagtttattggatgtggtttttcacatttaagataattatggctcttttcctaaaaaataaaatatctttct

SEQ ID NO: 125663 - DNA, 682 bp, Homo sapiens
  Payload ID: 4630
  Gene Symbol: DAP3
  Gene Name: death associated protein 3
  ENST ID: ENST00000475056
  CDS Start-End: 1-348
ggcataacacgggtgaggaacgccacagatgcagttggaattgtgctgaaagagctaaagaggcaaagttctttgggtatgtttcacctcctagtggccgtggatggaatcaatgctctttggggaagaaccactctgaaaagagaagataaaagcccgattgcccccgaggaattagcacttgttcacaacttgaggaaaatgatgaaaaatgattggcatggaggcgccattgtgtcggctttgagccagactgggtctctctttaagccccggaaagcctatctgccccaggagttgctgggaaagctcctacagaagaagggaaaaaagagctgctgttcctaagtaacgcgaacccctcgctgctggagcggcactgtgcctacctctaagccaagatcacagcatgtgaggaagacagtggacatctgctttatgctggacccagtaagatgaggaagtcgggcagtacacaggaagaggagccaggcccttgtacctatgggattggacaggactgcagttggctctggacctgcattaaaatgggtttcactgtgaatgcgtgacaataagatattcccttgttcctaaaactttatatcagtttattggatgtggtttttcacatttaagataattatggctcttttcctaaaaaataaaatatctttctaaa

SEQ ID NO: 125664 - DNA, 556 bp, Homo sapiens
  Payload ID: 4630
  Gene Symbol: DAP3
  Gene Name: death associated protein 3
  ENST ID: ENST00000491777
  CDS Start-End: 1-138
gaaagttgtattcagtattatttggaaaacaattggcttcaacatgagaaagctcctacagaagaagggaaaaaagagctgctgttcctaagtaacgcgaacccctcgctgctggagcggcactgtgcctacctctaagccaagatcacagcatgtcagaagagatcaattctacagaaatttccagtggttctgttgaggctttatggaattcagcatgtcaaaattcacagctggctgggcacagtggctcatgcctgtaatcccagcactttggaagcccaaggcgggcagactgcttgagttcaggagtttgcaaccagcctgggcaacatggtgaaaacctgtctctactaaaaatacaaaaattagccgggcacggtggcatgcgcctgtaatccaagctacttgggaggctgaggcaggagaattgcttcaacttgggaggcggatgttgcagtgagccaaaattgcaccactgcactccagcctgggcagcagagcaagactccgtctcaaaataaataaataaataaataaataaataaataataaa

SEQ ID NO: 125665 - DNA, 439 bp, Homo sapiens
  Payload ID: 4630
  Gene Symbol: DAP3
  Gene Name: death associated protein 3
  ENST ID: ENST00000470830
  CDS Start-End: 81-439
acgggcgctttggagccggccccaggcagcgtgtgtcggtcgcctagtctggagaactagtcctcgactcacgtgcaaggatgatgctgaaaggaataacaaggcttatctctaggatccataaggccaagcatggggatcagcacgagggtcagcactacaacatctccccccaggatttggagactgtatttccccatggccttcctcctcgctttgtgatgcaggtgaagacattcagtgaagcttgcctgatggactggctgatactacatattccagatgctcatctttgggtgaaaaattgtcgggatcttctgcagtccagctacaacaaacagcgctttgatcaacctttagaggcttcaacctggctgaagaatttcaaaactacaaatgagcgcttcctgaaccagataaaagttcaagagaagtatgt

SEQ ID NO: 125666 - DNA, 807 bp, Homo sapiens
  Payload ID: 4630
  Gene Symbol: DAP3
  Gene Name: death associated protein 3
  ENST ID: ENST00000497826
  CDS Start-End: 8-807
tgcaaggatgatgctgaaaggaataacaaggcttatctctaggatccataagttggaccctgggcgttttttacacatggggacccaggctcgccaaagcattgctgctcacctagataaccaggttccagttgagagtccgagagctatttcccgcaccaatgagaatgacccggccaagcatggggatcagcacgagggtcagcactacaacatctccccccaggatttggagactgtatttccccatggccttcctcctcgctttgtgatgcaggactggctgatactacatattccagatgctcatctttgggtgaaaaattgtcgggatcttctgcagtccagctacaacaaacagcgctttgatcaacctttagaggcttcaacctggctgaagaatttcaaaactacaaatgagcgcttcctgaaccagataaaagttcaagagaagtatgtctggaataagagagaaagcactgagaaagggagtcctctgggagaagtggttgaacagggcataacacgggtgaggaacgccacagatgcagttggaattgtgctgaaagagctaaagaggcaaagttctttgggtatgtttcacctcctagtggccgtggatggaatcaatgctctttggggaagaaccactctgaaaagagaagataaaagcccgattgcccccgaggaattagcacttgttcacaacttgaggaaaatgatgaaaaatgattggcatggaggcgccattgtgtcggctttgagccagactgggtctctctttaagccccggaaagcctatctgcc

SEQ ID NO: 125667 - DNA, 729 bp, Homo sapiens
  Payload ID: 4630
  Gene Symbol: DAP3
  Gene Name: death associated protein 3
  ENST ID: ENST00000465375
  CDS Start-End: 89-430
gtctcaggacgggcgctttggagccggccccaggcagcgtgtgtcggtcgcctagtctggagaactagtcctcgactcacgtgcaaggatgatgctgaaaggaataacaaggcttatctctaggatccataagttggaccctgggcgttttttacacatggggacccaggctcgccaaagcattgctgctcacctagataaccaggttccagttgagagtccgagagctatttcccgcaccaatgagaatgacccggccaagcatggggatcagcacgagggtcagcactacaacatctccccccaggatttggagactgtatttccccatggccttcctcctcgctttgtgatgcaggtgctcaagacagggaatggaattggagggagcccagaatacaagctgctgctagcaaaggggtggggctaaatgagaagaaaatttaaaaagatgaaatttaatctgaaaaacagaaattcatgtgttgattaccttttgtgactagtacaattactttaagctcatgtttaaacaatattgatgttttcctccttgtatagcccaagaagattccagtaatttcagcatcaaataactgttttaaatgaacttaaaatttgccttggcaaaatatcatgaaaatagttaatatgctgcacaaaagcaaaatcatagtacactcctgagctaaatagaagcaatattttgattagatgcattggttttta

SEQ ID NO: 125668 - DNA, 1287 bp, Homo sapiens
  Payload ID: 4630
  Gene Symbol: DAP3
  Gene Name: death associated protein 3
  ENST ID: ENST00000471214
  CDS Start-End: 389-1287
agatgacagtggctcccagaaagcccaggattcaatcgctgagagagtgcttaggcccgaatgccggcccaaatcgttctactcaccgtgtcggaggccgagagcgatgagagtacagggaagtgaggaagagggggtggccgccaggctcctccgcttccctgggtccaccgcggatccctcccgcttgtcaggaggcggccagcggtctcaggacgggcgctttggagccggccccaggcagcgtgtgtcggtcgcctagtctggagaactagtcctcgactcacgagatgaagttttaccatgttggccaggctggtctcgaattcctgacctcaagtgatctgcccaccttgacctcccaaagtgctgggattacagtgcaaggatgatgctgaaaggaataacaaggcttatctctaggatccataagttggaccctgggcgttttttacacatggggacccaggctcgccaaagcattgctgctcacctagataaccaggttccagttgagagtccgagagctatttcccgcaccaatgagaatgacccggccaagcatggggatcagcacgagggtcagcactacaacatctccccccaggatttggagactgtatttccccatggccttcctcctcgctttgtgatgcaggtgaagacattcagtgaagcttgcctgatggtaaggaaaccagccctagaacttctgcattacctgaaaaacaccagttttgcttatccagctatacgatatcttctgtatggagagaagggaacaggaaaaaccctaagtctttgccatgttattcatttctgtgcaaaacaggactggctgatactacatattccagatgctcatctttgggtgaaaaattgtcgggatcttctgcagtccagctacaacaaacagcgctttgatcaacctttagaggcttcaacctggctgaagaatttcaaaactacaaatgagcgcttcctgaaccagataaaagttcaagagaagtatgtctggaataagagagaaagcactgagaaagggagtcctctgggagaagtggttgaacagggcataacacgggtgaggaacgccacagatgcagttggaattgtgctgaaagagctaaagaggcaaagttctttgggtatgtttcacctcctagtggccgtggatggaatcaatgctctttggggaagaaccactctgaaaagagaagataaaagcccgattgcccccgaggaattagcacttgttcacaacttgaggaaaatgatgaaaaatga

SEQ ID NO: 125669 - DNA, 384 bp, Homo sapiens
  Payload ID: 4630
  Gene Symbol: DAP3
  Gene Name: death associated protein 3
  ENST ID: ENST00000608852
  CDS Start-End: 1-198
aggcttatctctaggatccataaggccaagcatggggatcagcacgagggtcagcactacaacatctccccccaggatttggagactgtatttccccatggccttcctcctcgctttgtgatgcaggtgctcaagacagggaatggaattggagggagcccagaatacaagctgctgctagcaaaggggtggggctaaatgagaagaaaatttaaaaagatgaaatttaatctgaaaaacagaaattcatgtgttgattaccttttgtgactagtacaattactttaagctcatgtttaaacaatattgatgttttcctccttgtatagcccaagaagattccagtaatttcagcatcaaataactgttttaaatgaacttaaa

SEQ ID NO: 125670 - DNA, 710 bp, Homo sapiens
  Payload ID: 4630
  Gene Symbol: DAP3
  Gene Name: death associated protein 3
  ENST ID: ENST00000490249
  CDS Start-End: 1-423
ggcataacacgggtgaggaacgccacagatgcagttggaattgtgctgaaagagctaaagaggcaaagttctttgggtatgtttcacctcctagtggccgtggatggaatcaatgctctttggggaagaaccactctgaaaagagaagataaaagcccgattgcccccgaggaattagcacttgttcacaacttgaggaaaatgatgaaaaatgattgggaaggatttgatgccctggatccctttattcccatcctggtttccaactataacccaaaggaatttgaaagttgtattcagtattatttggaaaacaattggcttcaacatgagaaagctcctacagaagaagggaaaaaagagctgctgttcctaagtaacgcgaacccctcgctgctggagcggcactgtgcctacctctaagccaagatcacagcatgtgaggaagacagtggacatctgctttatgctggacccagtaagatgaggaagtcgggcagtacacaggaagaggagccaggcccttgtacctatgggattggacaggactgcagttggctctggacctgcattaaaatgggtttcactgtgaatgcgtgacaataagatattcccttgttcctaaaactttatatcagtttattggatgtggtttttcacatttaagataattatggctcttttcctaaaaaataaaatatctttctaaa

SEQ ID NO: 125671 - DNA, 725 bp, Homo sapiens
  Payload ID: 4630
  Gene Symbol: DAP3
  Gene Name: death associated protein 3
  ENST ID: ENST00000479151
  CDS Start-End: 1-725
acgagggtcagcactacaacatctccccccaggatttggagactgtatttccccatggccttcctcctcgctttgtgatgcaggtgaagacattcagtgaagcttgcctgatggtaaggaaaccagccctagaacttctgcattacctgaaaaacaccagttttgcttatccagctatacgatatcttctgtatggagagaagggaacaggaaaaaccctaagtctttgccatgttattcatttctgtgcaaaacaggactggctgatactacatattccagatgctcatctttgggtgaaaaattgtcgggatcttctgcagtccagctacaacaaacagcgctttgatcaacctttagaggcttcaacctggctgaagaatttcaaaactacaaatgagcgcttcctgaaccagggcataacacgggtgaggaacgccacagatgcagttggaattgtgctgaaagagctaaagaggcaaagttctttgggtatgtttcacctcctagtggccgtggatggaatcaatgctctttggggaagaaccactctgaaaagagaagataaaagcccgattgcccccgaggaattagcacttgttcacaacttgaggaaaatgatgaaaaatgattggcatggaggcgccattgtgtcggctttgagccagactgggtctctctttaagccccggaaagcctatctgccccaggagttgctgggaaag

SEQ ID NO: 125672 - DNA, 607 bp, Homo sapiens
  Payload ID: 4630
  Gene Symbol: DAP3
  Gene Name: death associated protein 3
  ENST ID: ENST00000463295
  CDS Start-End: 1-320
ctctgaaaagagaagataaaagcccgattgcccccgaggaattagcacttgttcacaacttgaggaaaatgatgaaaaatgattggcatggaggcgccattgtgtcggctttgagccagactgggtctctctttaagccccggaaagcctatctgccccaggagttgctgggaaaggaatttgaaagttgtattcagtattatttggaaaacaattggcttcaacatgagaaagctcctacagaagaagggaaaaaagagctgctgttcctaagtaacgcgaacccctcgctgctggagcggcactgtgcctacctctaagccaagatcacagcatgtgaggaagacagtggacatctgctttatgctggacccagtaagatgaggaagtcgggcagtacacaggaagaggagccaggcccttgtacctatgggattggacaggactgcagttggctctggacctgcattaaaatgggtttcactgtgaatgcgtgacaataagatattcccttgttcctaaaactttatatcagtttattggatgtggtttttcacatttaagataattatggctcttttcctaaaaaataaaatatctttctaaa

SEQ ID NO: 125673 - DNA, 552 bp, Homo sapiens
  Payload ID: 4631
  Gene Symbol: DAPL1
  Gene Name: death associated protein-like 1
  Uniprot ID: A0PJW8
  ENST ID: ENST00000309950
  CDS Start-End: 57-380
acagctggcattcagcctccagagcaccagcactggcactggcactggcacacgctatggcaaatgaagtgcaagacctgctctcccctcggaaagggggacatcctcctgcagtaaaagctggaggaatgagaatttccaaaaaacaagaaattggcaccttggaaagacataccaaaaaaacaggattcgagaaaacaagtgccattgcaaatgttgccaaaatacagacactggatgccctgaatgacgcactggagaagctcaactataaatttccagcaacagtgcacatggcgcatcaaaaacccacacctgctctggaaaaggttgttccactgaaaaggatctacattattcagcagcctcgaaaatgttaagcctggatttaaaacacagccgtctggccagctgcctcgaatatctgacagcttagcaaaaagggccaaagctttccataggcgtgctgcacttgcttggtaaattaagcagcttttgtatcttcccctttgactttaggtaataaagcatccaaacttgtaaatctgacac

SEQ ID NO: 125674 - DNA, 598 bp, Homo sapiens
  Payload ID: 4631
  Gene Symbol: DAPL1
  Gene Name: death associated protein-like 1
  ENST ID: ENST00000343761
  CDS Start-End: 1-523
gagaatttccaaaaaacaagaaattggcaccttggaaagacataccaaaaaaacaggattcgagaaaacaagtgccattgcaaatgttgccaaaatacagacactggatgccctgaatgacgcactggagaaggaacaagttcagctgggagtgaggaatgaaaggcaggtccagccttttcaccatggttgcagctggaaggaaacaagtggatttgacacaagctcagaggatccagaacggctgttcctgtccatgtgcctggtcacggtgctggggaacctgctcatcatcctggccgtcacccctgactcccacctccacatccccatgtacttcttcctctccaacctgtccttgcctgacatcggtttcacctccaccacggtccccaagatgattgtggacatccagtctcacagcagagtcatctcctatgcaggctgcctgactcagatgtctctctttgccatttttggaggcatggaagagagacatgctcctgagtgtgatggcctatgaccggtttgtagccatctgtcaccctctatgtcattcagccatcacgaacccgtgtttctgtggctttctagtttt

SEQ ID NO: 125675 - DNA, 544 bp, Homo sapiens
  Payload ID: 4631
  Gene Symbol: DAPL1
  Gene Name: death associated protein-like 1
  ENST ID: ENST00000409042
  CDS Start-End: 57-398
acagctggcattcagcctccagagcaccagcactggcactggcactggcacacgctatggcaaatgaagtgcaagacctgctctcccctcggaaagggggacatcctcctgcagtaaaagctggaggaatgagaatttccaaaaaacaagaaattggcaccttggaaagacataccaaaaaaacaggattcgagaaaacaagtgccattgcaaatgttgccaaaatacagacactggatgccctgaatgacgcactggagaaggaacaagttcagctgggagtgaggaatgaaaggcaggtccagccttttcaccatggttgcagctggaaggaaacaagtggatttgacacaaggtgtccaagacacacggagccacggaatctcacaggtgtctgagaattcctcctcctgggactctcagaggatccagaactgctgccggtcctcgctttgctgtccctgtccctgtccatgtatctggtcatggtgctgaggaacctgctcagcatcctggctgtcagctctgactcccctccacaccc

SEQ ID NO: 125676 - DNA, 867 bp, Homo sapiens
  Payload ID: 4631
  Gene Symbol: DAPL1
  Gene Name: death associated protein-like 1
  ENST ID: ENST00000619477
  CDS Start-End: 16-615
gcactggcacacgctatggcaaatgaagtgcaagacctgctctcccctcggaaagggggacatcctcctgcagtaaaagctggaggaatgagaatttccaaaaaacaagaaattggcaccttggaaagacataccaaaaaaacaggattcgagaaaacaagtgccattgcaaatgttgccaaaatacagacactggatgccctgaatgacgcactggagaaggaacaagttcagctgggagtgaggaatgaaaggcaggtccagccttttcaccatggttgcagctggaaggaaacaagtggatttgacacaagaagctcagaggatccagaacggctgttcctgtccatgtgcctggtcacggtgctggggaacctgctcatcatcctggccgtcacccctgactcccacctccacatccccatgtacttcttcctctccaacctgtccttgcctgacatcggtttcacctccaccacggtccccaagatgattgtggacatccagtctcacagcagagtcatctcctatgcaggctgcctgactcagatgtctctctttgccatttttggaggcatggaagagagacatgctcctgagtgtgatggcctatgaccggtttgtagccatctgtcaccctctatgtcattcagccatcacgaacccgtgtttctgtggctttctagttttgttgtcttttttttttctcagtcttttagacgcccagctgcacaacttgattgccttacaaaggacctgcttcaaggatgtggaaattcctaatttcttctgtgacccttctcaattccccgtcttgcatgttgtggcaccttcaccaataacataatcatgtatttccctgctgcc

SEQ ID NO: 125677 - DNA, 671 bp, Homo sapiens
  Payload ID: 4631
  Gene Symbol: DAPL1
  Gene Name: death associated protein-like 1
  ENST ID: ENST00000621326
  CDS Start-End: 57-461
acagctggcattcagcctccagagcaccagcactggcactggcactggcacacgctatggcaaatgaagtgcaagacctgctctcccctcggaaagggggacatcctcctgcagtaaaagctggaggaatgagaatttccaaaaaacaagaaattggcaccttggaaagacataccaaaaaaacaggattcgagaaaacaagtgccattgcaaatgttgccaaaatacagacactggatgccctgaatgacgcactggagaagagtttcgctctttttgcccaggctggaaagcaatggagcgatctcagctcactgcaacctccacctcccgggttcaagtggttctcctgcctcagcctcccgagtagctgggattacagctcaactataaatttccagcaacagtgcacatggcgcatcaaaaacccacacctgctctggaaaaggttgttccactgaaaaggatctacattattcagcagcctcgaaaatgttaagcctggatttaaaacacagccgtctggccagctgcctcgaatatctgacagcttagcaaaaagggccaaagctttccataggcgtgctgcacttgcttggtaaattaagcagcttttgtatcttcccctttgactttaggtaataaagcatccaaacttgtaaatctgacac

SEQ ID NO: 125678 - DNA, 3203 bp, Homo sapiens
  Payload ID: 4632
  Gene Symbol: DTHD1
  Gene Name: death domain containing 1
  Uniprot ID: Q6ZMT9
  ENST ID: ENST00000357504
  CDS Start-End: 392-2242
atgttgtgagaaagtgctgggctagctgactcggatcatctcctagagtttaggagaaataacaatcacaaagtttgaatttgcaaaacctttaggctttgctggcaggagagaaaataccacttttggatcataaaatggatatggaatacatgggctcaggtaaactgggccaaatattgaagcagatttggagacaaaaccagatgctaaagcaggcactcttgggtgatgacctttgtgagggggctggtggggccacttggatggccactgtggtctttctgggtcaggaactcagcagtgcccttcaccagctgctggagcacacctcaggcaccctgcgttccacctgccagcagctgcatgtgctgcttgacaaagagaatcaatgtgtctcgagaaaaggtatcttgatgtgctgagtgatgttactggcccccaagtgtcttgttatattacagcaccatcatatgttctacaacaactagaatgccggataataaatcacatgagttctttaatagtgggtgataatgaagagttagttagcaacgtcataactattgaatgctcagataaggaaaagagagttccatttccaataggcattgcaattccatttactgcacgttacagaggaaattacagagatatcatggtgaaagtgtgtgacataaaccttcaatcaagttacctaaacccaaattcactagaaggaatgaagggaggttataaggggacctgtgcttcagtaaaagtttacaaattgggtatcttttctgttgtgtcttgtttaaagaaagagtcgttcacagtaacaaagaaaggcctcgctcttaagtcaagcatggattcccgaatatccttaaattaccctccaggagtttttacctctccagtgctggtgcagttaaagatccaaccagttgacccagctctggtggcacatttaaaagcacagcaagatactttctactcagtccaatccacaagccctctgattcacattcagcacccatcaacttatccttttcagaagccagtcactttgtttttaccttgttctccataccttgataaaaacaaccttggttctgagatagatcataaaagaagagcaagtgccacaataaataggattacaccttcgtatttcaaccggacaaaaattgcctccataagaaaacctaggaaaaatgccagtgaatgtttgaaattactgggattcagaagccaagacagtggttggtgtgggcttgatgatgttgtgaaaaccatacagagcggcttggtatcagttgaattgtatgaacatttggagaggtttattgtacttcacctctcttccaccatggacaatagtcatttggttacttttgtgaaatctttagaggaagccatgctcagcaccactgcctgcatagtactgtctcaccagaaggacaatccacatagaatagctgttttagtggtgccttccaaagatttaagccaggtgcttaaggacctgcacttggaagggtttggaggacctccagagccatctcgtcatttccaagttcgagaaggagaacaacttcttttaagatttactggaaacatatttgcttcaagcaacgggaaggattatggaaaagactacacacttatttttcacttgcaaagaaaacctaggctggaactccaaatcaaagaagtggacgaatttggaaactatagttgccctcattacaaaggcaccattgtcgtttataaagtacctaaaggaaagatagtccccaacttgaatcaatctctcgtaattaatgaaaaccattctcagttgccaatttgcaaattaccattgaaattgccaaagcataagaaattaatcaaccgtccacagagtaccaaaagagtttctaaggatcctgtagaagccctttgggataacttgctccattggctggctgaggagctctcagaagaaaatgctgagtctctttcctcaactctccctctgcgccgtagcaccattcagctcatcaaactcaagaaccctgatgatctcacagaacagatccacgagtttctttgcttctggaaaaaatcgcttccaactttcaccgacaaacttcgcctcctggctcgacatctccgcaagattggcaggagtgatcttgcagaagagctcaaattcaagtgggaaaataaagtgttcactgaaccacagcagtgttttgatgtagcccctgagtaaaagcctgatctctcttcctttacccctaggaaaaggcacacggtgggtttttgtttctgtcaacattttcctggaagtttccgaatgatattatttgaagtcagtctatttaatgatgtgctatttaatgatgtgagacaaagggagaagcacggatcagataatagaaagcattcctgggtgtgagcgctcctctctggttgagtgattatgttttgcaaccatgactgtcttgagtttggcctcacttaatagcatttgcaattgagtttgacttgttcacattttaaaagctaagtgtgaagaaaagatctgatatatgtaattacttattaattggtatctacataaaattaaactagttttctgtgacttcaagtgtgagcccaaaaatatctgagacagttctcaatcaatttagaaagattattttgccaaggttaaggacaggcccgtaacagcctcagaagatcctgatgacatatgcccaaggtgttcggggtagagcttgcttttatgcattttagggagttataatatatcaatcaatacatgtaaggtgtacattggctcaatctggaaaggtaggacaactcaaagcaggggcttccagatcacaggtagatttaaagattcttgattggcattgattgaacagttattatctaaagacctggaatcaataggaaggaaatgcctgggctatgataagaagttatggagaccaaagttttataatgcagatgaagcctccaggtagcagactttagagggaatagattgtaaatatttctgatcagtcctaaggtctgttgaaatttatgctggccagcttttcctgaattccaaaagagaggagggtattatggagtcatgtccaacctccccttcccagcatggcctaaactagtttttcaggataactttgaaatgcccttggctgagagaaggggcttgttca

SEQ ID NO: 125679 - DNA, 3365 bp, Homo sapiens
  Payload ID: 4632
  Gene Symbol: DTHD1
  Gene Name: death domain containing 1
  Uniprot ID: Q6ZMT9
  ENST ID: ENST00000456874
  CDS Start-End: 59-2404
ggggagcactgctgcacttctaaagaaagaagaaaaggagatttgtaatttatgcggcatgcatgatgaatgtactccacagcagacaatgtcctccattcaagataccaaagcagcagacattgctgcaagaggggaactaaatgtcatagaaacagctactgtttctcccacaaatggagaggaaagtcattacacaaaccaggtccagttagaaaaaaataaaacacatatgagttcagcattagtggaaaaagaaaacaatacatcactgaatggacgtgtactggggcaagaagagtcacagaataaaatgttcccagataatgcagaaaatgaagatgataaacaaatagaacacatgactgttgagaacataaatggcaacagggaagagactcatggcataattcagacaacagagacagaaattcaagagacttcagaaagcccaagagaagagatgaccacatcctcaataatatgtgatatctccaagaaatatataaatagtactcttcccaatgattcagagaatataaagcacaagaataacataatggaaaaggagtatcttgatgtgctgagtgatgttactggcccccaagtgtcttgttatattacagcaccatcatatgttctacaacaactagaatgccggataataaatcacatgagttctttaatagtgggtgataatgaagagttagttagcaacgtcataactattgaatgctcagataaggaaaagagagttccatttccaataggcattgcaattccatttactgcacgttacagaggaaattacagagatatcatggtgaaagtgtgtgacataaaccttcaatcaagttacctaaacccaaattcactagaaggaatgaagggaggttataaggggacctgtgcttcagtaaaagtttacaaattgggtatcttttctgttgtgtcttgtttaaagaaagagtcgttcacagtaacaaagaaaggcctcgctcttaagtcaagcatggattcccgaatatccttaaattaccctccaggagtttttacctctccagtgctggtgcagttaaagatccaaccagttgacccagctctggtggcacatttaaaagcacagcaagatactttctactcagtccaatccacaagccctctgattcacattcagcacccatcaacttatccttttcagaagccagtcactttgtttttaccttgttctccataccttgataaaaacaaccttggttctgagatagatcataaaagaagagcaagtgccacaataaataggattacaccttcgtatttcaaccggacaaaaattgcctccataagaaaacctaggaaaaatgccagtgaatgtttgaaattactgggattcagaagccaagacagtggttggtgtgggcttgatgatgttgtgaaaaccatacagagcggcttggtatcagttgaattgtatgaacatttggagaggtttattgtacttcacctctcttccaccatggacaatagtcatttggttacttttgtgaaatctttagaggaagccatgctcagcaccactgcctgcatagtactgtctcaccagaaggacaatccacatagaatagctgttttagtggtgccttccaaagatttaagccaggtgcttaaggacctgcacttggaagggtttggaggacctccagagccatctcgtcatttccaagttcgagaaggagaacaacttcttttaagatttactggaaacatatttgcttcaagcaacgggaaggattatggaaaagactacacacttatttttcacttgcaaagaaaacctaggctggaactccaaatcaaagaagtggacgaatttggaaactatagttgccctcattacaaaggcaccattgtcgtttataaagtacctaaaggaaagatagtccccaacttgaatcaatctctcgtaattaatgaaaaccattctcagttgccaatttgcaaattaccattgaaattgccaaagcataagaaattaatcaaccgtccacagagtaccaaaagagtttctaaggatcctgtagaagccctttgggataacttgctccattggctggctgaggagctctcagaagaaaatgctgagtctctttcctcaactctccctctgcgccgtagcaccattcagctcatcaaactcaagaaccctgatgatctcacagaacagatccacgagtttctttgcttctggaaaaaatcgcttccaactttcaccgacaaacttcgcctcctggctcgacatctccgcaagattggcaggagtgatcttgcagaagagctcaaattcaagtgggaaaataaagtgttcactgaaccacagcagtgttttgatgtagcccctgagtaaaagcctgatctctcttcctttacccctaggaaaaggcacacggtgggtttttgtttctgtcaacattttcctggaagtttccgaatgatattatttgaagtcagtctatttaatgatgtgctatttaatgatgtgagacaaagggagaagcacggatcagataatagaaagcattcctgggtgtgagcgctcctctctggttgagtgattatgttttgcaaccatgactgtcttgagtttggcctcacttaatagcatttgcaattgagtttgacttgttcacattttaaaagctaagtgtgaagaaaagatctgatatatgtaattacttattaattggtatctacataaaattaaactagttttctgtgacttcaagtgtgagcccaaaaatatctgagacagttctcaatcaatttagaaagattattttgccaaggttaaggacaggcccgtaacagcctcagaagatcctgatgacatatgcccaaggtgttcggggtagagcttgcttttatgcattttagggagttataatatatcaatcaatacatgtaaggtgtacattggctcaatctggaaaggtaggacaactcaaagcaggggcttccagatcacaggtagatttaaagattcttgattggcattgattgaacagttattatctaaagacctggaatcaataggaaggaaatgcctgggctatgataagaagttatggagaccaaagttttataatgcagatgaagcctccaggtagcagactttagagggaatagattgtaaatatttctgatcagtcctaaggtctgttgaaatttatgctggccagcttttcctgaattccaaaagagaggagggtattatggagtcatgtccaacctccccttcccagcatggcctaaactagtttttcaggataactttgaaatgcccttggctgagagaaggggcttgttca

SEQ ID NO: 125680 - DNA, 2606 bp, Homo sapiens
  Payload ID: 4632
  Gene Symbol: DTHD1
  Gene Name: death domain containing 1
  ENST ID: ENST00000507598
  CDS Start-End: 99-2564
ggtctttgtaggtttctaaaattatcttgccatgtttcattagatgtcagtgcagaaacataatttggtttagttttgtatttattctttgtgtgtccatgtatgtgtgtgtagaaatcattactttcatagactgcctcataaaaataactgaacatttggggagcactgctgcacttctaaagaaagaagaaaaggagatttgtaatttatgcggcatgcatgatgaatgtactccacagcagacaatgtcctccattcaagataccaaagcagcagacattgctgcaagaggggaactaaatgtcatagaaacagctactgtttctcccacaaatggagaggaaagtcattacacaaaccaggtccagttagaaaaaaataaaacacatatgagttcagcattagtggaaaaagaaaacaatacatcactgaatggacgtgtactggggcaagaagagtcacagaataaaatgttcccagataatgcagaaaatgaagatgataaacaaatagaacacatgactgttgagaacataaatggcaacagggaagagactcatggcataattcagacaacagagacagaaattcaagagacttcagaaagcccaagagaagagatgaccacatcctcaataatatgtgatatctccaagaaatatataaatagtactcttcccaatgattcagagaatataaagcacaagaataacataatggaaaaggagtatcttgatgtgctgagtgatgttactggcccccaagtgtcttgttatattacagcaccatcatatgttctacaacaactagaatgccggataataaatcacatgagttctttaatagtgggtgataatgaagagttagttagcaacgtcataactattgaatgctcagataaggaaaagagagttccatttccaataggcattgcaattccatttactgcacgttacagaggaaattacagagatatcatggtgaaagtgtgtgacataaaccttcaatcaagttacctaaacccaaattcactagaaggaatgaagggaggttataaggggacctgtgcttcagtaaaagtttacaaattgggtatcttttctgttgtgtcttgtttaaagaaagagtcgttcacagtaacaaagaaaggcctcgctcttaagtcaagcatggattcccgaatatccttaaattaccctccaggagtttttacctctccagtgctggtgcagttaaagatccaaccagttgacccagctctggtggcacatttaaaagcacagcaagatactttctactcagtccaatccacaagccctctgattcacattcagcacccatcaacttatccttttcagaagccagtcactttgtttttaccttgttctccataccttgataaaaacaaccttggttctgagatagatcataaaagaagagcaagtgccacaataaataggattacaccttcgtatttcaaccggacaaaaattgcctccataagaaaacctaggaaaaatgccagtgaatgtttgaaattactgggattcagaagccaagacagtggttggtgtgggcttgatgatgttgtgaaaaccatacagagcggcttggtatcagttgaattgtatgaacatttggagaggtttattgtacttcacctctcttccaccatggacaatagtcatttggttacttttgtgaaatctttagaggaagccatgctcagcaccactgcctgcatagtactgtctcaccagaaggacaatccacatagaatagctgttttagtggtgccttccaaagatttaagccaggtgcttaaggacctgcacttggaagggtttggaggacctccagagccatctcgtcatttccaagttcgagaaggagaacaacttcttttaagatttactggaaacatatttgcttcaagcaacgggaaggattatggaaaagactacacacttatttttcacttgcaaagaaaacctaggctggaactccaaatcaaagaagtggacgaatttggaaactatagttgccctcattacaaaggcaccattgtcgtttataaagtacctaaaggaaagatagtccccaacttgaatcaatctctcgtaattaatgaaaaccattctcagttgccaatttgcaaattaccattgaaattgccaaagcataagaaattaatcaaccgtccacagagtaccaaaagagtttctaaggatcctgtagaagccctttgggataacttgctccattggctggctgaggagctctcagaagaaaatgctgagtctctttcctcaactctccctctgcgccgtagcaccattcagctcatcaaactcaagaaccctgatgatctcacagaacagatccacgagtttctttgcttctggaaaaaatcgcttccaactttcaccgacaaacttcgcctcctggctcgacatctccgcaagattggcaggagtgatcttgcagaagagctcaaattcaagtgggaaaataaagtgttcactgaaccacagcagtgttttgatgtagcccctgagtaaaagcctgatctctcttcctttacccctaggaaaaggcacacg

SEQ ID NO: 125681 - DNA, 1256 bp, Homo sapiens
  Payload ID: 4633
  Gene Symbol: DEDD
  Gene Name: death effector domain containing
  ENST ID: ENST00000368005
  CDS Start-End: 88-1134
gggaaattaagtttcttgcggagtacggtggggattgcagctgctgagcagggattctggaaagcattgcgtacctgagcccccagcatggcgggcctaaagcggcgggcaagccaggtgtggccagaagagcatggtgagcaggaacatgggctgtacagcctgcaccgcatgtttgacatcgtgggcactcatctgacacacagagatgtgcgcgtgctttctttcctctttgttgatgtcattgatgaccacgagcgtggactcatccgaaatggacgtgacttcttattggcactggagcgccagggccgctgtgatgaaagtaactttcgccaggtgctgcagctgctgcgcatcatcactcgccacgacctgctgccctacgtcaccctcaagaggagacgggctgtgtgccctgatcttgtagacaagtatctggaggagacatcaattcgctatgtgacccccagagccctcagtgatccagaaccaaggcctccccagccctctaaaacagtgcctccccactatcctgtggtgtgttgccccacttcgggtcctcagatgtgtagcaagcggccagcccgagggagagccacacttgggagccagcgaaaacgccggaagtcagtgacaccagatcccaaggagaagcagacatgtggtgaggaagttcaagggttccagagatggagcagacttgaaggagaatataaagaactgctgggacactgggcagtttatgctattcagtacatcagactgcgggttcgggctgaatactgccagcatgagactgctctgcagggcaatgtcttctctaacaagcaggacccacttgagcgccagtttgagcgctttaaccaggccaacaccatcctcaagtcccgggacctgggctccatcatctgtgacatcaagttctctgagctcacctacctcgatgcattctggcgtgactacatcaatggctctttattagaggcacttaaaggtgtcttcatcacagactccctcaagcaagctgtgggccatgaagccatcaagctgctggtaaatgtagacgaggaggactatgagctgggccgacagaaactcctgaggaacttgatgctgcaagcattgccctgacctattccctcttctcactttggggactgttcccatcacccacctctggagcttacactgttctggggtttgttctctacccttccaaccaatcacacccctgccttttttttttttttttt

SEQ ID NO: 125682 - DNA, 2345 bp, Homo sapiens
  Payload ID: 4633
  Gene Symbol: DEDD
  Gene Name: death effector domain containing
  Uniprot ID: O75618
  ENST ID: ENST00000368006
  CDS Start-End: 216-1172
cacggccgcggcggcggcggcggcggcggctgctggagcccggatgcggcgccgtgaggcaggcccgggagagcggcgcggatggatccaacatggcggcgccgagcctgagccgagagaagagacctgggaaattaagtttcttgcggagtacggtggggattgcagctgctgagcagggattctggaaagcattgcgtacctgagcccccagcatggcgggcctaaagcggcgggcaagccaggtgtggccagaagagcatggtgagcaggaacatgggctgtacagcctgcaccgcatgtttgacatcgtgggcactcatctgacacacagagatgtgcgcgtgctttctttcctctttgttgatgtcattgatgaccacgagcgtggactcatccgaaatggacgtgacttcttattggcactggagcgccagggccgctgtgatgaaagtaactttcgccaggtgctgcagctgctgcgcatcatcactcgccacgacctgctgccctacgtcaccctcaagaggagacgggctgtgtgccctgatcttgtagacaagtatctggaggagacatcaattcgctatgtgacccccagagccctcagtgatccagaaccaaggcctccccagccctctaaaacagtgcctccccactatcctgtggtgtgttgccccacttcgggtcctcagatgtgtagcaagcggccagcccgagggagagccacacttgggagccagcgaaaacgccggaagtcagtgacaccagatcccaaggagaagcagacatgtgacatcagactgcgggttcgggctgaatactgccagcatgagactgctctgcagggcaatgtcttctctaacaagcaggacccacttgagcgccagtttgagcgctttaaccaggccaacaccatcctcaagtcccgggacctgggctccatcatctgtgacatcaagttctctgagctcacctacctcgatgcattctggcgtgactacatcaatggctctttattagaggcacttaaaggtgtcttcatcacagactccctcaagcaagctgtgggccatgaagccatcaagctgctggtaaatgtagacgaggaggactatgagctgggccgacagaaactcctgaggaacttgatgctgcaagcattgccctgacctattccctcttctcactttggggactgttcccatcacccacctctggagcttacactgttctggggtttgttctctacccttccaaccaatcacacccctgcctttttttttttttttttaaagaaaaagacaaaagaaagtggaagtggtattccccacccctccctgcacccatgtgcctgggcttcccctttatttcccttttccatttaccccgtaatgtgtctctacagctaccttaccactgagccgtaagacaaatgtataggaagaagcaaagtctacagcacatagtctttgtaagggattgatgtgaacacttttttttggatgcactaaggagttatcaatacttctggctttatgagagctcttaaattttgtctaaaaaaccaaagggctgtgagtaagggagctatgtggaaagtgggactctgaagtgtattttgaaaattaatcgccaccctcttccaaattatagaattttttaaaaacaagctgtggccctttccactctctcctggcctctggtgctgctcctctctgccgcctttcctccattccatggcttgaaacctctgcctgatgtggctccttcctttttcccatttgtcaaaccctcttcaaaggaggaacagataagactgggtcagcctagtcatgcctcccaactgtggtggtatatgtgtacacacatacacagggtggatggagaagaggttgctgattaaaatacactccccctataaaggggaagggggagtgtgacactttctttccatgttcaagtgaaaataaataatgtaccctgcagcccttttcccctttgctttcttctggcttgggcaaagggcatcataggtgtaagtgaagtaattcctttttccttccccctcctccactcctacgcccactcccatgcttgggagaatggggctgggacatgcactgagtgttgcacttttatttaggtagggaggcatgttgaatgagccaggaggtctagaactggagcttagtccagctggtacaataccaactccccttctagttcccaaaggcgatgtccagacacagactttatgattattatatttttcaatgccagtgctgctcagccctcagcagaacttcagtttccatgaaataaacaatgactatataaaattc

SEQ ID NO: 125683 - DNA, 2300 bp, Homo sapiens
  Payload ID: 4633
  Gene Symbol: DEDD
  Gene Name: death effector domain containing
  Uniprot ID: O75618
  ENST ID: ENST00000458050
  CDS Start-End: 174-1130
aggaaagtggagggggaggcggtggcgacgtccagcctgagaacctcaagagagggaggtgacgggacgctgagaggaagagacctgggaaattaagtttcttgcggagtacggtggggattgcagctgctgagcagggattctggaaagcattgcgtacctgagcccccagcatggcgggcctaaagcggcgggcaagccaggtgtggccagaagagcatggtgagcaggaacatgggctgtacagcctgcaccgcatgtttgacatcgtgggcactcatctgacacacagagatgtgcgcgtgctttctttcctctttgttgatgtcattgatgaccacgagcgtggactcatccgaaatggacgtgacttcttattggcactggagcgccagggccgctgtgatgaaagtaactttcgccaggtgctgcagctgctgcgcatcatcactcgccacgacctgctgccctacgtcaccctcaagaggagacgggctgtgtgccctgatcttgtagacaagtatctggaggagacatcaattcgctatgtgacccccagagccctcagtgatccagaaccaaggcctccccagccctctaaaacagtgcctccccactatcctgtggtgtgttgccccacttcgggtcctcagatgtgtagcaagcggccagcccgagggagagccacacttgggagccagcgaaaacgccggaagtcagtgacaccagatcccaaggagaagcagacatgtgacatcagactgcgggttcgggctgaatactgccagcatgagactgctctgcagggcaatgtcttctctaacaagcaggacccacttgagcgccagtttgagcgctttaaccaggccaacaccatcctcaagtcccgggacctgggctccatcatctgtgacatcaagttctctgagctcacctacctcgatgcattctggcgtgactacatcaatggctctttattagaggcacttaaaggtgtcttcatcacagactccctcaagcaagctgtgggccatgaagccatcaagctgctggtaaatgtagacgaggaggactatgagctgggccgacagaaactcctgaggaacttgatgctgcaagcattgccctgacctattccctcttctcactttggggactgttcccatcacccacctctggagcttacactgttctggggtttgttctctacccttccaaccaatcacacccctgcctttttttttttttttttaaagaaaaagacaaaagaaagtggaagtggtattccccacccctccctgcacccatgtgcctgggcttcccctttatttcccttttccatttaccccgtaatgtgtctctacagctaccttaccactgagccgtaagacaaatgtataggaagaagcaaagtctacagcacatagtctttgtaagggattgatgtgaacacttttttttggatgcactaaggagttatcaatacttctggctttatgagagctcttaaattttgtctaaaaaaccaaagggctgtgagtaagggagctatgtggaaagtgggactctgaagtgtattttgaaaattaatcgccaccctcttccaaattatagaattttttaaaaacaagctgtggccctttccactctctcctggcctctggtgctgctcctctctgccgcctttcctccattccatggcttgaaacctctgcctgatgtggctccttcctttttcccatttgtcaaaccctcttcaaaggaggaacagataagactgggtcagcctagtcatgcctcccaactgtggtggtatatgtgtacacacatacacagggtggatggagaagaggttgctgattaaaatacactccccctataaaggggaagggggagtgtgacactttctttccatgttcaagtgaaaataaataatgtaccctgcagcccttttcccctttgctttcttctggcttgggcaaagggcatcataggtgtaagtgaagtaattcctttttccttccccctcctccactcctacgcccactcccatgcttgggagaatggggctgggacatgcactgagtgttgcacttttatttaggtagggaggcatgttgaatgagccaggaggtctagaactggagcttagtccagctggtacaataccaactccccttctagttcccaaaggcgatgtccagacacagactttatgattattatatttttcaatgccagtgctgctcagccctcagcagaacttcagtttccatgaaataaacaatgactatataaaa

SEQ ID NO: 125684 - DNA, 2329 bp, Homo sapiens
  Payload ID: 4633
  Gene Symbol: DEDD
  Gene Name: death effector domain containing
  Uniprot ID: O75618
  ENST ID: ENST00000545495
  CDS Start-End: 203-1159
cgcccgcctgtcccctcccccacggccgcggcggcggcggcggcggcggctgctggagcccggatgcggcgccgtgaggcaggcccgggagagcggcgcggatggatccaacatggcggcgccgagcctgagccgagatacggtggggattgcagctgctgagcagggattctggaaagcattgcgtacctgagcccccagcatggcgggcctaaagcggcgggcaagccaggtgtggccagaagagcatggtgagcaggaacatgggctgtacagcctgcaccgcatgtttgacatcgtgggcactcatctgacacacagagatgtgcgcgtgctttctttcctctttgttgatgtcattgatgaccacgagcgtggactcatccgaaatggacgtgacttcttattggcactggagcgccagggccgctgtgatgaaagtaactttcgccaggtgctgcagctgctgcgcatcatcactcgccacgacctgctgccctacgtcaccctcaagaggagacgggctgtgtgccctgatcttgtagacaagtatctggaggagacatcaattcgctatgtgacccccagagccctcagtgatccagaaccaaggcctccccagccctctaaaacagtgcctccccactatcctgtggtgtgttgccccacttcgggtcctcagatgtgtagcaagcggccagcccgagggagagccacacttgggagccagcgaaaacgccggaagtcagtgacaccagatcccaaggagaagcagacatgtgacatcagactgcgggttcgggctgaatactgccagcatgagactgctctgcagggcaatgtcttctctaacaagcaggacccacttgagcgccagtttgagcgctttaaccaggccaacaccatcctcaagtcccgggacctgggctccatcatctgtgacatcaagttctctgagctcacctacctcgatgcattctggcgtgactacatcaatggctctttattagaggcacttaaaggtgtcttcatcacagactccctcaagcaagctgtgggccatgaagccatcaagctgctggtaaatgtagacgaggaggactatgagctgggccgacagaaactcctgaggaacttgatgctgcaagcattgccctgacctattccctcttctcactttggggactgttcccatcacccacctctggagcttacactgttctggggtttgttctctacccttccaaccaatcacacccctgcctttttttttttttttttaaagaaaaagacaaaagaaagtggaagtggtattccccacccctccctgcacccatgtgcctgggcttcccctttatttcccttttccatttaccccgtaatgtgtctctacagctaccttaccactgagccgtaagacaaatgtataggaagaagcaaagtctacagcacatagtctttgtaagggattgatgtgaacacttttttttggatgcactaaggagttatcaatacttctggctttatgagagctcttaaattttgtctaaaaaaccaaagggctgtgagtaagggagctatgtggaaagtgggactctgaagtgtattttgaaaattaatcgccaccctcttccaaattatagaattttttaaaaacaagctgtggccctttccactctctcctggcctctggtgctgctcctctctgccgcctttcctccattccatggcttgaaacctctgcctgatgtggctccttcctttttcccatttgtcaaaccctcttcaaaggaggaacagataagactgggtcagcctagtcatgcctcccaactgtggtggtatatgtgtacacacatacacagggtggatggagaagaggttgctgattaaaatacactccccctataaaggggaagggggagtgtgacactttctttccatgttcaagtgaaaataaataatgtaccctgcagcccttttcccctttgctttcttctggcttgggcaaagggcatcataggtgtaagtgaagtaattcctttttccttccccctcctccactcctacgcccactcccatgcttgggagaatggggctgggacatgcactgagtgttgcacttttatttaggtagggaggcatgttgaatgagccaggaggtctagaactggagcttagtccagctggtacaataccaactccccttctagttcccaaaggcgatgtccagacacagactttatgattattatatttttcaatgccagtgctgctcagccctcagcagaacttcagtttccatgaaataaacaatgactatataaaa

SEQ ID NO: 125685 - DNA, 964 bp, Homo sapiens
  Payload ID: 4633
  Gene Symbol: DEDD
  Gene Name: death effector domain containing
  ENST ID: ENST00000464113
  CDS Start-End: 103-964
gatggatccaacatggcggcgccgagcctgagccgagatacggtggggattgcagctgctgagcagggattctggaaagcattgcgtacctgagcccccagcatggcgggcctaaagcggcgggcaagccaggtgtggccagaagagcatggtgagcaggaacatgggctgtacagcctgcaccgcatgtttgacatcgtgggcactcatctgacacacagagatgtgcgcgtgctttctttcctctttgttgatgtcattgatgaccacgagcgtggactcatccgaaatggacgtgacttcttattggcactggagcgccagggccgctgtgatgaaagtaactttcgccaggtgctgcagctgctgcgcatcatcactcgccacgacctgctgccctacgtcaccctcaagaggagacgggctgtgtgccctgatcttgtagacaagtatctggaggagacatcaattcgctatgtgacccccagagccctcagtgatccagaaccaaggcctccccagccctctaaaacagtgcctccccactatcctgtggtgtgttgccccacttcgggtcctcagatgtgtagcaagcggccagcccgagggagagccacacttgggagccagcgaaaacgccggaagtcagtgacaccagatcccaaggagaagcagacatgtgacatcagactgcgggttcgggctgaatactgccagcatgagactgctctgcagggcaatgtcttctctaacaagcaggacccacttgagcgccagtttgagcgctttaaccaggccaacaccatcctcaagtcccgggacctgggctccatcatctgtgacatcaagttctctgagctcacctacctcgatgcattctggcgtgactacatcaatggctctttattagaggcacttaaaggtgtcttcatcacagactccctcaagcaagctgtgggccatg

SEQ ID NO: 125686 - DNA, 1527 bp, Homo sapiens
  Payload ID: 4633
  Gene Symbol: DEDD
  Gene Name: death effector domain containing
  Uniprot ID: O75618
  ENST ID: ENST00000490843
  CDS Start-End: 211-1167
acggccgcggcggcggcggcggcggcggctgctggagcccggatgcggcgccgtgaggcaggcccgggagagcggcgcggatggatccaacatggcggcgccgagcctgagccgagaagacctgggaaattaagtttcttgcggagtacggtggggattgcagctgctgagcagggattctggaaagcattgcgtacctgagcccccagcatggcgggcctaaagcggcgggcaagccaggtgtggccagaagagcatggtgagcaggaacatgggctgtacagcctgcaccgcatgtttgacatcgtgggcactcatctgacacacagagatgtgcgcgtgctttctttcctctttgttgatgtcattgatgaccacgagcgtggactcatccgaaatggacgtgacttcttattggcactggagcgccagggccgctgtgatgaaagtaactttcgccaggtgctgcagctgctgcgcatcatcactcgccacgacctgctgccctacgtcaccctcaagaggagacgggctgtgtgccctgatcttgtagacaagtatctggaggagacatcaattcgctatgtgacccccagagccctcagtgatccagaaccaaggcctccccagccctctaaaacagtgcctccccactatcctgtggtgtgttgccccacttcgggtcctcagatgtgtagcaagcggccagcccgagggagagccacacttgggagccagcgaaaacgccggaagtcagtgacaccagatcccaaggagaagcagacatgtgacatcagactgcgggttcgggctgaatactgccagcatgagactgctctgcagggcaatgtcttctctaacaagcaggacccacttgagcgccagtttgagcgctttaaccaggccaacaccatcctcaagtcccgggacctgggctccatcatctgtgacatcaagttctctgagctcacctacctcgatgcattctggcgtgactacatcaatggctctttattagaggcacttaaaggtgtcttcatcacagactccctcaagcaagctgtgggccatgaagccatcaagctgctggtaaatgtagacgaggaggactatgagctgggccgacagaaactcctgaggaacttgatgctgcaagcattgccctgacctattccctcttctcactttggggactgttcccatcacccacctctggagcttacactgttctggggtttgttctctacccttccaaccaatcacacccctgcctttttttttttttttttaaagaaaaagacaaaagaaagtggaagtggtattccccacccctccctgcacccatgtgcctgggcttcccctttatttcccttttccatttaccccgtaatgtgtctctacagctaccttaccactgagccgtaagacaaatgtataggaagaagcaaagtctacagcacatagtctttgtaagggattgatgtgaacacttttttttggatgcactaaggagttatcaatacttct

SEQ ID NO: 125687 - DNA, 1882 bp, Homo sapiens
  Payload ID: 4634
  Gene Symbol: DEDD2
  Gene Name: death effector domain containing 2
  Uniprot ID: Q8WXF8
  ENST ID: ENST00000336034
  CDS Start-End: 77-1042
gcggccgtcgcccaggagtcatcggacgccagaatctggccgggttctgagcttgttccgcctccctcccccgggaatggcgctatccgggtcgaccccggccccgtgctgggaggaggatgagtgcctggactactacgggatgctgtcgcttcaccgtatgttcgaggtggtgggcgggcaactgaccgagtgcgagctggagctcctggcctttctgctggatgaggctcctggcgccgccggaggcttagcccgggcccgcagcggcctagagctcctgctggagctggagcgccgcgggcagtgcgacgagagcaacctgcggctgctggggcaactcctgcgcgtgctggcccgccacgacctgctgccgcacctggcgcgcaagcggcgccggccagtgtctccagaacgctatagctatggcacctccagctcttcaaagaggacagagggtagctgccgtcgccgtcggcagtcaagcagttctgcaaattctcagcagggctcccccccaaccaagcggcagcggcggagtcggggccggcccagtggtggtgccagacggcggcggagaggggccccagccgcaccccagcagcagtcagagcccgccagaccttcctctgaaggcaaagtgacctgtgacatccggctccgggttcgagcagagtactgcgagcatgggccagccttggagcagggcgtggcatcccggcggccccaggcgctggcgcggcagctggacgtgtttgggcaggccaccgcagtgctgcgctcaagggacctgggctctgtggtttgtgacatcaagttctcagagctctcctatctggacgccttctggggcgactacctgagtggcgccctgctgcaggccctgcggggcgtgttcctgactgaggccctgcgagaggctgtgggccgggaggctgttcgcctgctggtcagtgtggatgaggctgactatgaggctggccggcgccgcctgttgctgatggaggaggaaggggggcggcgcccgacagaggcctcctgatccaggactggcaggattgatcccacctccaagtctccgggccaccttctcctgggaggacgaccatctctacccctagaggactgtcactctagcatctttgaggactgcgacaggaccgggacagcaggccccttgacagcccctcccacaggatgtgggctctgaggcctaaaccatttccagctgagtttccttcccagactcctcctacccccaggtgtgcccccttagcctccggaggcgggggctgggcctgtatctcagaagggaggggcacagctacacactcaccaaaggcccccctgcacattgtatctctgatcttgggctgtctgcactgtcacaggtgcacacactcgctcatgctcacactgcccctgctgagatcttccctgggcctctgccctggcctgcttcccagcacacacttctttggcctaagggcttctctctcaggacctctaatttgaccacaaccaacctgggcttcagccacatcagtgggcactggagctggggtgcacatggggcctgctcaccttgcccacacatctccagccagccagggccctgcccagcttcaatttacagacctgactctcctcaccttcccccctgctgtccagagctgaacatagacttgcacttggatgtcacctggagtgtcacatgggagtgttatggcagcatcataccaaggcctactgttgcacatggggccaaaaccagtaaacagccaccttcttggaaagggaatgcaaaggctttgggggtgatggaaaagaccttttacaaatgataccaattaaactgccctggaaagggcataggtgggca

SEQ ID NO: 125688 - DNA, 1037 bp, Homo sapiens
  Payload ID: 4634
  Gene Symbol: DEDD2
  Gene Name: death effector domain containing 2
  ENST ID: ENST00000598727
  CDS Start-End: 90-704
aaaacaagtggctgcggccgtcgcccaggagtcatcggacgccagaatctggccgggttctgagcttgttccgcctccctcccccgggaatggcgctatccgggtcgaccccggccccgtgctgggaggaggatgagtgcctggactactacgggatgctgtcgcttcaccgtatgttcgaggtggtgggcgggcaactgaccgagtgcgagctggagctcctggcctttctgctggatgaggctcctggcgccgccggaggcttagcccgggcccgcagcggcctagagctcctgctggagctggagcgccgcgggcagtgcgacgagagcaacctgcggctgctggggcaactcctgcgcgtgctggcccgccacgacctgctgccgcacctggcgcgcaagcggcgccggccagtgtctccagaacgctatagctatggcacctccagctcttcaaagaggacagagggtagctgccgtcgccgtcggcagtcaagcagttctgcaaattctcagcagggtcagtgggagacaggctcccccccaaccaagcggcagcggcggagtcggggccggcccagtggtggtgccagacggcggcggagaggggccccagccgcaccccagcagcagtcagagcccgccagaccttcctctgaaggcaaagtgacctgtgatggggaaacaggctcagagaggtaaggtcacatgcccaaggccccacagcttagagagtggcagagctgggactcacctcaaggtctgttggactccgccacctggccctgcctctgtggccaaccactcctgggtggcctggaagaggtgctgctcctcccagccccctgctctcccacccacattgattgaggtcatggccagttgcttactggagtcaaggatgcagtcaaggatctggtcgtctgggtagagacagctgggtctgaatgccatgggagggcctgggggctgaggctgggcaggcttccctgggcgttgggtggagaggatggggttcccctagagccagaaaga

SEQ ID NO: 125689 - DNA, 465 bp, Homo sapiens
  Payload ID: 4634
  Gene Symbol: DEDD2
  Gene Name: death effector domain containing 2
  ENST ID: ENST00000598200
  CDS Start-End: 113-465
aaacaagtggctgcggccgtcgcccaggagtcatcggacgccagaatctggtgaggatccagagaggcctaatggccgggttctgagcttgttccgcctccctcccccgggaatggcgctatccgggtcgaccccggccccgtgctgggaggaggatgagtgcctggactactacgggatgctgtcgcttcaccgtatgttcgaggtggtgggcgggcaactgaccgagtgcgagctggagctcctggcctttctgctggatgaggctcctggcgccgccggaggcttagcccgggcccgcagcggcctagagctcctgctggagctggagcgccgcgggcagtgcgacgagagcaacctgcggctgctggggcaactcctgcgcgtgctggcccgccacgacctgctgccgcacctggcgcgcaagcggcgccggccagtgtctccagaacgctatagctatgg

SEQ ID NO: 125690 - DNA, 1894 bp, Homo sapiens
  Payload ID: 4634
  Gene Symbol: DEDD2
  Gene Name: death effector domain containing 2
  Uniprot ID: Q8WXF8
  ENST ID: ENST00000595337
  CDS Start-End: 89-1069
tcccgggctaagcgtcggcaagttctgtagagaaactcgggcaacctttggccgggttctgagcttgttccgcctccctcccccgggaatggcgctatccgggtcgaccccggccccgtgctgggaggaggatgagtgcctggactactacgggatgctgtcgcttcaccgtatgttcgaggtggtgggcgggcaactgaccgagtgcgagctggagctcctggcctttctgctggatgaggctcctggcgccgccggaggcttagcccgggcccgcagcggcctagagctcctgctggagctggagcgccgcgggcagtgcgacgagagcaacctgcggctgctggggcaactcctgcgcgtgctggcccgccacgacctgctgccgcacctggcgcgcaagcggcgccggccagtgtctccagaacgctatagctatggcacctccagctcttcaaagaggacagagggtagctgccgtcgccgtcggcagtcaagcagttctgcaaattctcagcagggtcagtgggagacaggctcccccccaaccaagcggcagcggcggagtcggggccggcccagtggtggtgccagacggcggcggagaggggccccagccgcaccccagcagcagtcagagcccgccagaccttcctctgaaggcaaagtgacctgtgacatccggctccgggttcgagcagagtactgcgagcatgggccagccttggagcagggcgtggcatcccggcggccccaggcgctggcgcggcagctggacgtgtttgggcaggccaccgcagtgctgcgctcaagggacctgggctctgtggtttgtgacatcaagttctcagagctctcctatctggacgccttctggggcgactacctgagtggcgccctgctgcaggccctgcggggcgtgttcctgactgaggccctgcgagaggctgtgggccgggaggctgttcgcctgctggtcagtgtggatgaggctgactatgaggctggccggcgccgcctgttgctgatggaggaggaaggggggcggcgcccgacagaggcctcctgatccaggactggcaggattgatcccacctccaagtctccgggccaccttctcctgggaggacgaccatctctacccctagaggactgtcactctagcatctttgaggactgcgacaggaccgggacagcaggccccttgacagcccctcccacaggatgtgggctctgaggcctaaaccatttccagctgagtttccttcccagactcctcctacccccaggtgtgcccccttagcctccggaggcgggggctgggcctgtatctcagaagggaggggcacagctacacactcaccaaaggcccccctgcacattgtatctctgatcttgggctgtctgcactgtcacaggtgcacacactcgctcatgctcacactgcccctgctgagatcttccctgggcctctgccctggcctgcttcccagcacacacttctttggcctaagggcttctctctcaggacctctaatttgaccacaaccaacctgggcttcagccacatcagtgggcactggagctggggtgcacatggggcctgctcaccttgcccacacatctccagccagccagggccctgcccagcttcaatttacagacctgactctcctcaccttcccccctgctgtccagagctgaacatagacttgcacttggatgtcacctggagtgtcacatgggagtgttatggcagcatcataccaaggcctactgttgcacatggggccaaaaccagtaaacagccaccttcttggaaagggaatgcaaaggctttgggggtgatggaaaagaccttttacaaatgataccaattaaactgccctggaaa

SEQ ID NO: 125691 - DNA, 1183 bp, Homo sapiens
  Payload ID: 4634
  Gene Symbol: DEDD2
  Gene Name: death effector domain containing 2
  Uniprot ID: Q8WXF8
  ENST ID: ENST00000596251
  CDS Start-End: 124-1104
aggcgtaataatagagaaggtgccagaaagatccaaaacaagtggctgcggccgtcgcccaggagtcatcggacgccagaatctggccgggttctgagcttgttccgcctccctcccccgggaatggcgctatccgggtcgaccccggccccgtgctgggaggaggatgagtgcctggactactacgggatgctgtcgcttcaccgtatgttcgaggtggtgggcgggcaactgaccgagtgcgagctggagctcctggcctttctgctggatgaggctcctggcgccgccggaggcttagcccgggcccgcagcggcctagagctcctgctggagctggagcgccgcgggcagtgcgacgagagcaacctgcggctgctggggcaactcctgcgcgtgctggcccgccacgacctgctgccgcacctggcgcgcaagcggcgccggccagtgtctccagaacgctatagctatggcacctccagctcttcaaagaggacagagggtagctgccgtcgccgtcggcagtcaagcagttctgcaaattctcagcagggtcagtgggagacaggctcccccccaaccaagcggcagcggcggagtcggggccggcccagtggtggtgccagacggcggcggagaggggccccagccgcaccccagcagcagtcagagcccgccagaccttcctctgaaggcaaagtgacctgtgacatccggctccgggttcgagcagagtactgcgagcatgggccagccttggagcagggcgtggcatcccggcggccccaggcgctggcgcggcagctggacgtgtttgggcaggccaccgcagtgctgcgctcaagggacctgggctctgtggtttgtgacatcaagttctcagagctctcctatctggacgccttctggggcgactacctgagtggcgccctgctgcaggccctgcggggcgtgttcctgactgaggccctgcgagaggctgtgggccgggaggctgttcgcctgctggtcagtgtggatgaggctgactatgaggctggccggcgccgcctgttgctgatggaggaggaaggggggcggcgcccgacagaggcctcctgatccaggactggcaggattgatcccacctccaagtctccgggccaccttctcctgggaggacgaccatctctacccctag

SEQ ID NO: 125692 - DNA, 8574 bp, Homo sapiens
  Payload ID: 4635
  Gene Symbol: DIDO1
  Gene Name: death inducer-obliterator 1
  Uniprot ID: Q9BTC0
  ENST ID: ENST00000266070
  CDS Start-End: 357-7079
gtacttgcgcagaactcccctcgcggcgaccacgcactacgggttggcgccagagtcaaaaggcgtcggccctctggcaagatggctgctgcggaggcgttggagcgcggaaatctggaaccgggatggcgacgtctacactgagtcggaggcgaaggagcttactccacgggaacagcctctagataatctgagttgttgaaaatacgaagcctgttactcgtgaacagtggctgacaacagtgttgttgtgagcctggctgtctgcttggacccagaggtttcgtctgccagggtttttggttgtatttaggatttcagggaaaagtgtccaagctttcagtgttggagcaggtatggacgacaaaggcgacccgagcaatgaggaggcacctaaggccatcaaacccaccagcaaagagttcaggaaaacatggggttttcgaaggaccactatcgccaagcgagagggcgcaggggacgcggaggctgacccactggagccgccacccccacagcagcagctgggcctgtccctgcggcgcagtgggaggcagcccaagcgcactgagcgcgtggagcagttcctgaccattgcgcggcgccgcggcaggaggagcatgcctgtctccctggaggattctggtgagcccacgtcctgccccgccacagacgccgagacagcctccgagggcagcgtggaaagcgcttctgagaccagaagcggcccccagtctgcttccacagctgtgaaggaacgaccagcctcttctgaaaaggtgaaaggaggggatgaccacgatgacacctccgatagtgacagcgatggcctgaccttgaaagagcttcagaatcgccttcgcaggaagcgggaacaggagcccactgagaggcccctgaaagggatccagagtcgcctgcggaagaagcgccgggaggagggtcccgccgagactgtgggctccgaggccagtgacactgtggagggcgtcctgcccagtaagcaggagcccgagaacgatcagggggttgtgtcccaggctgggaaagatgacagagagagtaagttggagggaaaggcggctcaggacatcaaagatgaggagcctggagacttgggccgaccgaagcctgaatgtgagggttacgaccccaacgccctgtattgcatttgccgccagcctcacaacaacaggtttatgatttgctgtgaccgctgtgaagaatggtttcatggcgattgtgtgggcatttctgaggctcgagggaggcttttggaaaggaatggggaagactatatctgcccaaactgcaccattctgcaagtgcaggatgagactcattcagaaacggcagatcagcaggaagctaaatggagacctggagatgctgatggcaccgattgtacaagtataggaacaatagagcagaagtctagcgaagaccaagggataaagggtagaattgagaaagctgcaaatccaagtggcaagaagaaactcaagatcttccagcctgtgatagaggcgcctggtgcctcaaaatgtattggccccgggtgctgtcacgtggcgcagcccgactcggtgtactgcagtaatgactgtatcctcaaacacgccgcagcgacaatgaagtttctaagctcaggtaaagaacagaagccaaagcctaaagaaaagatgaagatgaagccagagaagcccagtcttccgaaatgcggtgctcaggcaggtattaaaatctcttctgtgcacaagagaccagctccagaaaaaaaagagaccacagtgaagaaggcagtggtggtccctgcgcggagtgaagcactcgggaaggaagcagcttgtgagagcagcacgccgtcgtgggcgagcgatcacaattacaatgcagtaaagccagaaaagactgctgctccctcgccgtcactgttgtataaatccacgaaggaagacaggaggtccgaggagaaagcggcagccatggcagcctcaaagaaaacagcccctccaggctccgcggtgggcaagcagcctgcacctagaaacctcgtgccaaagaagtcttcttttgctaatgtggcagcagccacaccagccattaaaaagccaccctcaggtttcaagggcaccatccccaagaggccatggctctccgctaccccatcgagtggtgcttcagctgccaggcaggccggaccggcacctgcagcggcaacggctgcctccaagaagttccctggctccgctgctttggtgggagccgtaaggaagccagtggtaccttctgttccaatggcctcgccagccccaggacgccttggggctatgagtgctgcaccatcgcagccaaattcacaaattcggcaaaatatcagacgctccttaaaagagattttgtggaaaagagtcaatgacagcgatgacttaatcatgacagaaaacgaagtaggaaaaattgccctccatattgagaaggagatgtttaacttgtttcaagttacagataatcgctacaagagtaaatatcgcagcatcatgttcaacctgaaggaccctaaaaatcagggactcttccatcgtgttctgcgtgaggaaatctctttggcgaaacttgtgagactgaagccagaagaacttgtatctaaagagctttccacgtggaaagagaggccagcgagatctgtgatggagtccagaactaaactgcacaatgaaagcaagaagacggcccccaggcaggaggccatccccgatctggaggactctccgccagtgtcggattcagaggaacagcaagagtcagcacgtgctgtccctgagaagagcacagcgccgcttctcgacgtcttcagcagcatgttgaaagacaccaccagtcagcaccgcgcacacctcttcgatctcaactgtaaaatttgcacaggccaggttccctccgcagaagatgagccagctccgaaaaaacaaaaattgtcagcttctgttaagaaagaagacttaaaatcaaagcatgacagctctgcacctgacccagctccggattcagctgatgaggtgatgccggaggctgtgcctgaagttgcctctgagccaggcctagaaagtgcttctcatccaaatgtggacagaacgtatttccctgggcctccaggagatggccatcccgagccctccccgctggaagacctgtccccctgcccagcctcctgtgggagcggggtggtcaccaccgtcacagtgtccggccgggaccccaggaccgctccaagcagttcatgcacagccgtggcctccgcagcatcccgcccagacagcacccacatggtggaagccagacaggatgtgccgaagcctgtcttgacttctgtgatggtgcccaagtccatactagctaagccatcctcatctcctgacccaagatacctgtcagttcctccgtcaccaaatatcagcacttcagaatcacgttcccctccagagggagacacgaccctctttttgtctcgactcagcaccatttggaaaggatttattaacatgcagagtgtggcaaaatttgtcactaaggcgtatcctgtctctgggtgttttgattacctcagtgaggatttgcctgacacaattcacattggtgggaggatcgcaccgaagacagtttgggattatgttggcaaactcaagtcttctgtgtctaaggagctctgtctgatccgcttccaccccgccacagaggaagaggaggtcgcctatatctctctctactcctatttcagcagccgtggccgctttggtgttgtagctaataacaacaggcacgtcaaggacctctacctgatcccgctgagcgcccaggaccctgttccatccaaactcttgccctttgagggaccaggtcttgagtcaccacgtccgaatataattcttgggttagtaatctgccaaaaaatcaaacgtcccgcaaacagtggagagttagacaagatggacgaaaagcggacccgacttcaaccggaagaagcggacgttccggcctatccaaaagtagccacagtcccgcagtcggaaaagaagccctccaagtatccactctgctctgcagacgcggctgtcagcaccacacctcctgggtcgccgccgcctccgccccctcttccagaaccaccggtgctaaaagtgctgtcatccctcaaacctgcagcccccagcccagccacagcagccacaacagcagcggcagcctccacggcagcttcctccaccgcttcgtctgcttccaaaacagcatcaccgctggagcacatcctgcagactctctttggaaagaagaaatcattcgacccgtccgccagagagcctcccgggtccaccgcaggtctcccccaggagcccaaaaccacagcagaggacggggtgccggcacctccgttgttagatccgatcgtccagcagttcggtcagttctcaaaagataaggctctagaggaagaggaggacgacaggccatacgaccctgaggaggagtacgacccggagagggccttcgacactcagcttgtggagcgagggcggcgccacgaggtggaaagggctcctgaagcagctgcagccgagcgggaagaggtggcctatgaccccgaggatgagaccatcttagaagaagcgaaagtgactgttgatgacctgcccaacaggatgtgtgccgacgtgagaaggaactccgtggagaggcctgccgagccggtggccggggctgcgacgccctccctggtggagcaacagaagatgctagaagagctgaacaaacagatcgaggagcagaagagacagctggaggagcaagaagaagctctcaggcagcagagggccgccgtcggggtctccatggcccacttctcggtgtcggacgccttgatgtctccaccaccaaagtcgtccttgcccaaggcagagctgttccagcaagagcagcagtctgcagacaagcccgcctcactgccccccgccagccaggcgtcaaaccacagggacccccggcaggcgaggcgcctggccactgagaccggtgagggggagggggagcctctctccaggctctcggcacgtggtgcccagggtgccctgcccgagagagatgcttccaggggtggcctcgtgggccaggcgcccatgccagtcccggaggaaaaagagccagcctcttccccctgggcttcgggcgaaaagcccccagcggggtccgagcaggacggctggaaggcagagcctggggagggcacccgccccgccacggttggagacagctcggccaggcctgcccggagggtgctgctgcccacaccgccttgcggcgccctgcagcccggcttcccgctgcagcacgacggtgagagggaccctttcacctgcccggggttcgcgtcgcaggacaaggctctcggctcagcccagtatgaggacccaagaaatcttcattctgctggaaggagcagcagccctgcaggtgaaacagagggggacagagagccacaggccagacccggcgagggcaccgccccgctccccccaccaggacagaaagtggggggctctcagcccccgtttcagggtcagcgggaacctggacctcatgctttggggatgtcagggcttcacggccccaatttcccgggaccaagggggccagcccctccgtttccagaagagaatatcgcttctaacgatgggccacgagggcctccgccagccagattcggagcccagaaggggcccatcccttccttattctcggggcaacatgggccacctccttatggggacagcagaggcccctcaccctcttaccttggtggaccacgaggagtggcaccatcccaatttgaagaacgcaaggatccccatggggagaagagggagttccaggacgccccgtataacgaggtgacgggcgcccccgcccagtttgaagggacagagcaagccccatttctgggaagcagaggcggcgcgcctttccagttcggaggccagagaaggccactgctgtctcagctgaaaggcccccgaggcggcccccctccctctcagtttggaggtcagagaggaccaccccctggtcatttcgtgggcccaagagggccccatcctagtcagtttgaaactgcccggggccctcatcccaaccagtttgaaggacccagaggccaagcgcctaactttatgccaggtcccaggggcattcagcctcagcagttcgaagaccagagggtccattcaccaccaagattcacaaaccaaagggcgcctgcacccctgcagtttggtggactacgggggtccgcacccttttctgaaaaaaatgagcagaccccttcgcgatttcacttccagggccaggccccgcaggtgatgaagccgggccccaggcccctgctggagcttcccagccaccccccgcagcaccggaaggaccgctgggaggaggccgggccgccctccgcgctctcctccagtgcgcccggacagggccccgaggccgacggacagtgggcatcggccgacttccgagaggggaaaggccacgaatacagaaaccagactttcgaagggaggcagagagagcggtttgacgtggggcccaaagagaagccgctggaggagcccgacgcccagggccgggcgtccgaggacaggaggagagagcgcgagcgcggccgaaactggagccgagagcgggactgggaccggccccgggagtgggaccgacaccgggacaaggactccagccgggactgggacagaaaccgggagaggagcgccaaccgcgaccgagagcgcgaggccgaccggggcaaggagtgggaccgcagccgggagcggagcaggaaccgagagcgcgagcgagaccggaggcgcgaccgggaccggtcccggagcagagagcgggaccgagacaaggccagggacagggagcggggccgcgaccgcaaggaccggagcaagagcaaagagagcgctcgggacccgaagcccgaggcctcgagggcctccgacgctggcaccgcctcgcaggcctagacgccccggccgggcagagaccctttttaaagccacgttcgtaagatgcgttgaacaaatagcttttgaaatagccacgatcttagattcaggatagaatattctggacttaaacattactgtaattttgtgtaaatggtttcttacaagatttcacatctttacaattctgatgcttttttaaaaaaactaaactttaatatttccatttaaaattaaaagaaatgggaaattgcctacggagcatattgcttttcagatcatagttatcttttccaataactttattgtaaattttaagggagtttcgttggaccctagagccataccttcactgacatctcatccgtttgtgtttccaaaagctgcttttacaggtcttagccgccgccccggaggccggtgtgggcgtgacctgcaggcgtccaccctgcggctacgggagaagtcttagtagcttgtatctggagtcttgagaaacacaaaccttacaaatgcatctttcttttgtcataaaattggaattacaattttcaactgggaaacagaaacacatttcttagcgtgctcagattttatatatcaccttatcaattttttccaaaacatgatttaaagcaacatctgtcctagtataattgttgcattttaaataacaatttattgaaaaatgttaagttttaccagcctaaaaaaagtaacaaaccaattaagtgtactttgggggcagggaggagtccttgatttgaataatcaggagttttgttggtccagtttcgccttctgagcagttcttctgtatcccgggaaaagtacgctcggccccaaactggtatttgtcagacgatacatgtaaaagtttgtccttgaacgtggaacaagacttgtgtaaagtctgagacgggaactagtgatcactagctcaagaactgcaaatgagacaggaagctgttcactgtgaaacagtctcttgcttgtcgtgtatttttcgagtacttctgaagtgtgaagtaaaaaaatctggctaatttatttgtacaaatacactttgataattttttatattttcataaacttttacagatgtaaaattaaagaacttcacttgttctttggagtctgttattccattgtacgtcactacagatttttcactttatagcacagattttttaagttaagaaaacattgagaatgtatcagtttgagatgtttggtgttgaaagccaagtgtccataggttaaattacattaaagtaggtgtcacgttccaacatctagtacgatgagaaggttttgtttgtttaacatataaagcaaatttttctaatttaaatacacaaatgtaaaaatcaagtgtgtttctttagtttacttgatagagattcctgtacattgtattttatattgcggaggcttatatcactgtacatgagaacatggaacgacctaggttttgttactcgcagtagaataaacagctacaggaagtttc

SEQ ID NO: 125693 - DNA, 2707 bp, Homo sapiens
  Payload ID: 4635
  Gene Symbol: DIDO1
  Gene Name: death inducer-obliterator 1
  Uniprot ID: Q9BTC0
  ENST ID: ENST00000354665
  CDS Start-End: 238-1926
ggaaatggctgcgagaccctagaggcctgcggcctgcggagcttactccacgggaacagcctctagataatctgagttgttgaaaatacgaagcctgttactcgtgaacagtggctgacaacagtgttgttgtgagcctggctgtctgcttggacccagaggtttcgtctgccagggtttttggttgtatttaggatttcagggaaaagtgtccaagctttcagtgttggagcaggtatggacgacaaaggcgacccgagcaatgaggaggcacctaaggccatcaaacccaccagcaaagagttcaggaaaacatggggttttcgaaggaccactatcgccaagcgagagggcgcaggggacgcggaggctgacccactggagccgccacccccacagcagcagctgggcctgtccctgcggcgcagtgggaggcagcccaagcgcactgagcgcgtggagcagttcctgaccattgcgcggcgccgcggcaggaggagcatgcctgtctccctggaggattctggtgagcccacgtcctgccccgccacagacgccgagacagcctccgagggcagcgtggaaagcgcttctgagaccagaagcggcccccagtctgcttccacagctgtgaaggaacgaccagcctcttctgaaaaggtgaaaggaggggatgaccacgatgacacctccgatagtgacagcgatggcctgaccttgaaagagcttcagaatcgccttcgcaggaagcgggaacaggagcccactgagaggcccctgaaagggatccagagtcgcctgcggaagaagcgccgggaggagggtcccgccgagactgtgggctccgaggccagtgacactgtggagggcgtcctgcccagtaagcaggagcccgagaacgatcagggggttgtgtcccaggctgggaaagatgacagagagagtaagttggagggaaaggcggctcaggacatcaaagatgaggagcctggagacttgggccgaccgaagcctgaatgtgagggttacgaccccaacgccctgtattgcatttgccgccagcctcacaacaacaggtttatgatttgctgtgaccgctgtgaagaatggtttcatggcgattgtgtgggcatttctgaggctcgagggaggcttttggaaaggaatggggaagactatatctgcccaaactgcaccattctgcaagtgcaggatgagactcattcagaaacggcagatcagcaggaagctaaatggagacctggagatgctgatggcaccgattgtacaagtataggaacaatagagcagaagtctagcgaagaccaagggataaagggtagaattgagaaagctgcaaatccaagtggcaagaagaaactcaagatcttccagcctgtgatagaggcgcctggtgcctcaaaatgtattggccccgggtgctgtcacgtggcgcagcccgactcggtgtactgcagtaatgactgtatcctcaaacacgccgcagcgacaatgaagtttctaagctcaggtaaagaacagaagccaaagcctaaagaaaagatgaagatgaagccagagaagcccagtcttccgaaatgcggtgctcaggcaggtattaaaatctcttctgtgcacaagagaccagctccagaaaaaaaagagaccacagtgaagaaggcagtggtggtccctgcgcggagtgaagcactcgggaaggaagcagcttgtgagagcagcacgccgtcgtgggcgagcgatcacaattacaatgcagtaaagccagaaaagactgctgctccctcgccgtcactgttgtataaatgtatgtatcacctaggggttggcctcctggacccctcccgttctttctggatagccatcccctgggcctgtccaggactgggagttgcagctttgtgttaagctgatcacagacaccggctgcaccatcagcgggaagcagagcccatgtccaggatgcctcctgctgccctgtgtccatccctagtctgtcaggacttcctgtcactgttttccaaagctgtaaacctcactggtgaacgttcaccttaatgattgattctttaatctctgttttcactctcaggctctggtaagtattcgtattctcttcatcccagtctgattgcatagccacactgcccggcacgccacatccacccctgtctgcacatgagttgttctgacaacagcgctgtatacgcttcagtttttccacattgtccacggccagcacatgaaagcatcacttcttttttatgttgtgggaatctttgcaagttagtgttgcatctgattttcaggtgtacatttatttttgactgggcagataggggatttttttttttccatgtccgattcacacgctacacacccacatgaacacattcgaacttcgaaggccacacactcctgcttcataggccccacggtaagtgagttcacacctagaacactgtcctgaccgcaggacgcgtgccttggacttggtattctacatgtgactggctttcttgccctcgtctcttgaatgtttagactcttaagatcatatcctgccccaaatttcaaattaatgaaatgaagatatttcaaacagatctttgaaacctcagattctgtggtgcaattttaatgttttcttgtttctcagttttctgctataaaactattttcaattcag

SEQ ID NO: 125694 - DNA, 2383 bp, Homo sapiens
  Payload ID: 4635
  Gene Symbol: DIDO1
  Gene Name: death inducer-obliterator 1
  Uniprot ID: Q9BTC0
  ENST ID: ENST00000370366
  CDS Start-End: 200-1834
gagcttactccacgggaacagcctctagataatctgagttgttgaaaatacgaagcctgttactcgtgaacagtggctgacaacagtgttgttgtgagcctggctgtctgcttggacccagaggtttcgtctgccagggtttttggttgtatttaggatttcagggaaaagtgtccaagctttcagtgttggagcaggtatggacgacaaaggcgacccgagcaatgaggaggcacctaaggccatcaaacccaccagcaaagagttcaggaaaacatggggttttcgaaggaccactatcgccaagcgagagggcgcaggggacgcggaggctgacccactggagccgccacccccacagcagcagctgggcctgtccctgcggcgcagtgggaggcagcccaagcgcactgagcgcgtggagcagttcctgaccattgcgcggcgccgcggcaggaggagcatgcctgtctccctggaggattctggtgagcccacgtcctgccccgccacagacgccgagacagcctccgagggcagcgtggaaagcgcttctgagaccagaagcggcccccagtctgcttccacagctgtgaaggaacgaccagcctcttctgaaaaggtgaaaggaggggatgaccacgatgacacctccgatagtgacagcgatggcctgaccttgaaagagcttcagaatcgccttcgcaggaagcgggaacaggagcccactgagaggcccctgaaagggatccagagtcgcctgcggaagaagcgccgggaggagggtcccgccgagactgtgggctccgaggccagtgacactgtggagggcgtcctgcccagtaagcaggagcccgagaacgatcagggggttgtgtcccaggctgggaaagatgacagagagagtaagttggagggaaaggcggctcaggacatcaaagatgaggagcctggagacttgggccgaccgaagcctgaatgtgagggttacgaccccaacgccctgtattgcatttgccgccagcctcacaacaacaggtttatgatttgctgtgaccgctgtgaagaatggtttcatggcgattgtgtgggcatttctgaggctcgagggaggcttttggaaaggaatggggaagactatatctgcccaaactgcaccattctgcaagtgcaggatgagactcattcagaaacggcagatcagcaggaagctaaatggagacctggagatgctgatggcaccgattgtacaagtataggaacaatagagcagaagtctagcgaagaccaagggataaagggtagaattgagaaagctgcaaatccaagtggcaagaagaaactcaagatcttccagcctgtgatagaggcgcctggtgcctcaaaatgtattggccccgggtgctgtcacgtggcgcagcccgactcggtgtactgcagtaatgactgtatcctcaaacacgccgcagcgacaatgaagtttctaagctcaggtaaagaacagaagccaaagcctaaagaaaagatgaagatgaagccagagaagcccagtcttccgaaatgcggtgctcaggcaggtattaaaatctcttctgtgcacaagagaccagctccagaaaaaaaagagaccacagtgaagaaggcagtggtggtccctgcgcggagtgaagcactcgggaaggaagcagcttgtgagagcagcacgccgtcgtgggcgagcgatcacaattacaatgcagtaaagccagaaaagactgctgctccctcgccgtcactgttgtataaatgctctggtaagtattcgtattctcttcatcccagtctgattgcatagccacactgcccggcacgccacatccacccctgtctgcacatgagttgttctgacaacagcgctgtatacgcttcagtttttccacattgtccacggccagcacatgaaagcatcacttcttttttatgttgtgggaatctttgcaagttagtgttgcatctgattttcaggtgtacatttatttttgactgggcagataggggatttttttttttccatgtccgattcacacgctacacacccacatgaacacattcgaacttcgaaggccacacactcctgcttcataggccccacggtaagtgagttcacacctagaacactgtcctgaccgcaggacgcgtgccttggacttggtattctacatgtgactggctttcttgccctcgtctcttgaatgtttagactcttaagatcatatcctgccccaaatttcaaattaatgaaatgaagatatttcaaacagatctttgaaacctcagattctgtggtgcaattttaatgttttcttgtttctcagttttctgctataaaactattttcaattca

SEQ ID NO: 125695 - DNA, 2704 bp, Homo sapiens
  Payload ID: 4635
  Gene Symbol: DIDO1
  Gene Name: death inducer-obliterator 1
  Uniprot ID: Q9BTC0
  ENST ID: ENST00000370368
  CDS Start-End: 233-1921
ggggaaatggctgcgagaccctagaggcctgcggagcttactccacgggaacagcctctagataatctgagttgttgaaaatacgaagcctgttactcgtgaacagtggctgacaacagtgttgttgtgagcctggctgtctgcttggacccagaggtttcgtctgccagggtttttggttgtatttaggatttcagggaaaagtgtccaagctttcagtgttggagcaggtatggacgacaaaggcgacccgagcaatgaggaggcacctaaggccatcaaacccaccagcaaagagttcaggaaaacatggggttttcgaaggaccactatcgccaagcgagagggcgcaggggacgcggaggctgacccactggagccgccacccccacagcagcagctgggcctgtccctgcggcgcagtgggaggcagcccaagcgcactgagcgcgtggagcagttcctgaccattgcgcggcgccgcggcaggaggagcatgcctgtctccctggaggattctggtgagcccacgtcctgccccgccacagacgccgagacagcctccgagggcagcgtggaaagcgcttctgagaccagaagcggcccccagtctgcttccacagctgtgaaggaacgaccagcctcttctgaaaaggtgaaaggaggggatgaccacgatgacacctccgatagtgacagcgatggcctgaccttgaaagagcttcagaatcgccttcgcaggaagcgggaacaggagcccactgagaggcccctgaaagggatccagagtcgcctgcggaagaagcgccgggaggagggtcccgccgagactgtgggctccgaggccagtgacactgtggagggcgtcctgcccagtaagcaggagcccgagaacgatcagggggttgtgtcccaggctgggaaagatgacagagagagtaagttggagggaaaggcggctcaggacatcaaagatgaggagcctggagacttgggccgaccgaagcctgaatgtgagggttacgaccccaacgccctgtattgcatttgccgccagcctcacaacaacaggtttatgatttgctgtgaccgctgtgaagaatggtttcatggcgattgtgtgggcatttctgaggctcgagggaggcttttggaaaggaatggggaagactatatctgcccaaactgcaccattctgcaagtgcaggatgagactcattcagaaacggcagatcagcaggaagctaaatggagacctggagatgctgatggcaccgattgtacaagtataggaacaatagagcagaagtctagcgaagaccaagggataaagggtagaattgagaaagctgcaaatccaagtggcaagaagaaactcaagatcttccagcctgtgatagaggcgcctggtgcctcaaaatgtattggccccgggtgctgtcacgtggcgcagcccgactcggtgtactgcagtaatgactgtatcctcaaacacgccgcagcgacaatgaagtttctaagctcaggtaaagaacagaagccaaagcctaaagaaaagatgaagatgaagccagagaagcccagtcttccgaaatgcggtgctcaggcaggtattaaaatctcttctgtgcacaagagaccagctccagaaaaaaaagagaccacagtgaagaaggcagtggtggtccctgcgcggagtgaagcactcgggaaggaagcagcttgtgagagcagcacgccgtcgtgggcgagcgatcacaattacaatgcagtaaagccagaaaagactgctgctccctcgccgtcactgttgtataaatgtatgtatcacctaggggttggcctcctggacccctcccgttctttctggatagccatcccctgggcctgtccaggactgggagttgcagctttgtgttaagctgatcacagacaccggctgcaccatcagcgggaagcagagcccatgtccaggatgcctcctgctgccctgtgtccatccctagtctgtcaggacttcctgtcactgttttccaaagctgtaaacctcactggtgaacgttcaccttaatgattgattctttaatctctgttttcactctcaggctctggtaagtattcgtattctcttcatcccagtctgattgcatagccacactgcccggcacgccacatccacccctgtctgcacatgagttgttctgacaacagcgctgtatacgcttcagtttttccacattgtccacggccagcacatgaaagcatcacttcttttttatgttgtgggaatctttgcaagttagtgttgcatctgattttcaggtgtacatttatttttgactgggcagataggggatttttttttttccatgtccgattcacacgctacacacccacatgaacacattcgaacttcgaaggccacacactcctgcttcataggccccacggtaagtgagttcacacctagaacactgtcctgaccgcaggacgcgtgccttggacttggtattctacatgtgactggctttcttgccctcgtctcttgaatgtttagactcttaagatcatatcctgccccaaatttcaaattaatgaaatgaagatatttcaaacagatctttgaaacctcagattctgtggtgcaattttaatgttttcttgtttctcagttttctgctataaaactattttcaattcagtc

SEQ ID NO: 125696 - DNA, 2833 bp, Homo sapiens
  Payload ID: 4635
  Gene Symbol: DIDO1
  Gene Name: death inducer-obliterator 1
  Uniprot ID: Q9BTC0
  ENST ID: ENST00000370371
  CDS Start-End: 357-2045
gtacttgcgcagaactcccctcgcggcgaccacgcactacgggttggcgccagagtcaaaaggcgtcggccctctggcaagatggctgctgcggaggcgttggagcgcggaaatctggaaccgggatggcgacgtctacactgagtcggaggcgaaggagcttactccacgggaacagcctctagataatctgagttgttgaaaatacgaagcctgttactcgtgaacagtggctgacaacagtgttgttgtgagcctggctgtctgcttggacccagaggtttcgtctgccagggtttttggttgtatttaggatttcagggaaaagtgtccaagctttcagtgttggagcaggtatggacgacaaaggcgacccgagcaatgaggaggcacctaaggccatcaaacccaccagcaaagagttcaggaaaacatggggttttcgaaggaccactatcgccaagcgagagggcgcaggggacgcggaggctgacccactggagccgccacccccacagcagcagctgggcctgtccctgcggcgcagtgggaggcagcccaagcgcactgagcgcgtggagcagttcctgaccattgcgcggcgccgcggcaggaggagcatgcctgtctccctggaggattctggtgagcccacgtcctgccccgccacagacgccgagacagcctccgagggcagcgtggaaagcgcttctgagaccagaagcggcccccagtctgcttccacagctgtgaaggaacgaccagcctcttctgaaaaggtgaaaggaggggatgaccacgatgacacctccgatagtgacagcgatggcctgaccttgaaagagcttcagaatcgccttcgcaggaagcgggaacaggagcccactgagaggcccctgaaagggatccagagtcgcctgcggaagaagcgccgggaggagggtcccgccgagactgtgggctccgaggccagtgacactgtggagggcgtcctgcccagtaagcaggagcccgagaacgatcagggggttgtgtcccaggctgggaaagatgacagagagagtaagttggagggaaaggcggctcaggacatcaaagatgaggagcctggagacttgggccgaccgaagcctgaatgtgagggttacgaccccaacgccctgtattgcatttgccgccagcctcacaacaacaggtttatgatttgctgtgaccgctgtgaagaatggtttcatggcgattgtgtgggcatttctgaggctcgagggaggcttttggaaaggaatggggaagactatatctgcccaaactgcaccattctgcaagtgcaggatgagactcattcagaaacggcagatcagcaggaagctaaatggagacctggagatgctgatggcaccgattgtacaagtataggaacaatagagcagaagtctagcgaagaccaagggataaagggtagaattgagaaagctgcaaatccaagtggcaagaagaaactcaagatcttccagcctgtgatagaggcgcctggtgcctcaaaatgtattggccccgggtgctgtcacgtggcgcagcccgactcggtgtactgcagtaatgactgtatcctcaaacacgccgcagcgacaatgaagtttctaagctcaggtaaagaacagaagccaaagcctaaagaaaagatgaagatgaagccagagaagcccagtcttccgaaatgcggtgctcaggcaggtattaaaatctcttctgtgcacaagagaccagctccagaaaaaaaagagaccacagtgaagaaggcagtggtggtccctgcgcggagtgaagcactcgggaaggaagcagcttgtgagagcagcacgccgtcgtgggcgagcgatcacaattacaatgcagtaaagccagaaaagactgctgctccctcgccgtcactgttgtataaatgtatgtatcacctaggggttggcctcctggacccctcccgttctttctggatagccatcccctgggcctgtccaggactgggagttgcagctttgtgttaagctgatcacagacaccggctgcaccatcagcgggaagcagagcccatgtccaggatgcctcctgctgccctgtgtccatccctagtctgtcaggacttcctgtcactgttttccaaagctgtaaacctcactggtgaacgttcaccttaatgattgattctttaatctctgttttcactctcaggctctggtaagtattcgtattctcttcatcccagtctgattgcatagccacactgcccggcacgccacatccacccctgtctgcacatgagttgttctgacaacagcgctgtatacgcttcagtttttccacattgtccacggccagcacatgaaagcatcacttcttttttatgttgtgggaatctttgcaagttagtgttgcatctgattttcaggtgtacatttatttttgactgggcagataggggatttttttttttccatgtccgattcacacgctacacacccacatgaacacattcgaacttcgaaggccacacactcctgcttcataggccccacggtaagtgagttcacacctagaacactgtcctgaccgcaggacgcgtgccttggacttggtattctacatgtgactggctttcttgccctcgtctcttgaatgtttagactcttaagatcatatcctgccccaaatttcaaattaatgaaatgaagatatttcaaacagatctttgaaacctcagattctgtggtgcaattttaatgttttcttgtttctcagttttctgctataaaactattttcaattcagtctttaa

SEQ ID NO: 125697 - DNA, 7551 bp, Homo sapiens
  Payload ID: 4635
  Gene Symbol: DIDO1
  Gene Name: death inducer-obliterator 1
  Uniprot ID: Q9BTC0
  ENST ID: ENST00000395340
  CDS Start-End: 265-3834
ctcggtggccgtccgcccactccgcggcgttcggggaaatggctgcgagaccctagaggcctgcggagcttactccacgggaacagcctctagataatctgagttgttgaaaatacgaagcctgttactcgtgaacagtggctgacaacagtgttgttgtgagcctggctgtctgcttggacccagaggtttcgtctgccagggtttttggttgtatttaggatttcagggaaaagtgtccaagctttcagtgttggagcaggtatggacgacaaaggcgacccgagcaatgaggaggcacctaaggccatcaaacccaccagcaaagagttcaggaaaacatggggttttcgaaggaccactatcgccaagcgagagggcgcaggggacgcggaggctgacccactggagccgccacccccacagcagcagctgggcctgtccctgcggcgcagtgggaggcagcccaagcgcactgagcgcgtggagcagttcctgaccattgcgcggcgccgcggcaggaggagcatgcctgtctccctggaggattctggtgagcccacgtcctgccccgccacagacgccgagacagcctccgagggcagcgtggaaagcgcttctgagaccagaagcggcccccagtctgcttccacagctgtgaaggaacgaccagcctcttctgaaaaggtgaaaggaggggatgaccacgatgacacctccgatagtgacagcgatggcctgaccttgaaagagcttcagaatcgccttcgcaggaagcgggaacaggagcccactgagaggcccctgaaagggatccagagtcgcctgcggaagaagcgccgggaggagggtcccgccgagactgtgggctccgaggccagtgacactgtggagggcgtcctgcccagtaagcaggagcccgagaacgatcagggggttgtgtcccaggctgggaaagatgacagagagagtaagttggagggaaaggcggctcaggacatcaaagatgaggagcctggagacttgggccgaccgaagcctgaatgtgagggttacgaccccaacgccctgtattgcatttgccgccagcctcacaacaacaggtttatgatttgctgtgaccgctgtgaagaatggtttcatggcgattgtgtgggcatttctgaggctcgagggaggcttttggaaaggaatggggaagactatatctgcccaaactgcaccattctgcaagtgcaggatgagactcattcagaaacggcagatcagcaggaagctaaatggagacctggagatgctgatggcaccgattgtacaagtataggaacaatagagcagaagtctagcgaagaccaagggataaagggtagaattgagaaagctgcaaatccaagtggcaagaagaaactcaagatcttccagcctgtgatagaggcgcctggtgcctcaaaatgtattggccccgggtgctgtcacgtggcgcagcccgactcggtgtactgcagtaatgactgtatcctcaaacacgccgcagcgacaatgaagtttctaagctcaggtaaagaacagaagccaaagcctaaagaaaagatgaagatgaagccagagaagcccagtcttccgaaatgcggtgctcaggcaggtattaaaatctcttctgtgcacaagagaccagctccagaaaaaaaagagaccacagtgaagaaggcagtggtggtccctgcgcggagtgaagcactcgggaaggaagcagcttgtgagagcagcacgccgtcgtgggcgagcgatcacaattacaatgcagtaaagccagaaaagactgctgctccctcgccgtcactgttgtataaatccacgaaggaagacaggaggtccgaggagaaagcggcagccatggcagcctcaaagaaaacagcccctccaggctccgcggtgggcaagcagcctgcacctagaaacctcgtgccaaagaagtcttcttttgctaatgtggcagcagccacaccagccattaaaaagccaccctcaggtttcaagggcaccatccccaagaggccatggctctccgctaccccatcgagtggtgcttcagctgccaggcaggccggaccggcacctgcagcggcaacggctgcctccaagaagttccctggctccgctgctttggtgggagccgtaaggaagccagtggtaccttctgttccaatggcctcgccagccccaggacgccttggggctatgagtgctgcaccatcgcagccaaattcacaaattcggcaaaatatcagacgctccttaaaagagattttgtggaaaagagtcaatgacagcgatgacttaatcatgacagaaaacgaagtaggaaaaattgccctccatattgagaaggagatgtttaacttgtttcaagttacagataatcgctacaagagtaaatatcgcagcatcatgttcaacctgaaggaccctaaaaatcagggactcttccatcgtgttctgcgtgaggaaatctctttggcgaaacttgtgagactgaagccagaagaacttgtatctaaagagctttccacgtggaaagagaggccagcgagatctgtgatggagtccagaactaaactgcacaatgaaagcaagaagacggcccccaggcaggaggccatccccgatctggaggactctccgccagtgtcggattcagaggaacagcaagagtcagcacgtgctgtccctgagaagagcacagcgccgcttctcgacgtcttcagcagcatgttgaaagacaccaccagtcagcaccgcgcacacctcttcgatctcaactgtaaaatttgcacaggccaggttccctccgcagaagatgagccagctccgaaaaaacaaaaattgtcagcttctgttaagaaagaagacttaaaatcaaagcatgacagctctgcacctgacccagctccggattcagctgatgaggtgatgccggaggctgtgcctgaagttgcctctgagccaggcctagaaagtgcttctcatccaaatgtggacagaacgtatttccctgggcctccaggagatggccatcccgagccctccccgctggaagacctgtccccctgcccagcctcctgtgggagcggggtggtcaccaccgtcacagtgtccggccgggaccccaggaccgctccaagcagttcatgcacagccgtggcctccgcagcatcccgcccagacagcacccacatggtggaagccagacaggatgtgccgaagcctgtcttgacttctgtgatggtgcccaagtccatactagctaagccatcctcatctcctgacccaagatacctgtcagttcctccgtcaccaaatatcagcacttcagaatcacgttcccctccagagggagacacgaccctctttttgtctcgactcagcaccatttggaaaggatttattaacatgcagagtgtggcaaaatttgtcactaaggcgtatcctgtctctgggtgttttgattacctcagtgaggatttgcctgacacaattcacattggtgggaggatcgcaccgaagacagtttgggattatgttggcaaactcaagtcttctgtgtctaaggagctctgtctgatccgcttccaccccgccacagaggaagaggaggtcgcctatatctctctctactcctatttcagcagccgtggccgctttggtgttgtagctaataacaacaggcacgtcaaggacctctacctgatcccgctgagcgcccaggaccctgttccatccaaactcttgccctttgagggaccaggtaagcgccggctttctgggtggaggtgaggcccacctgcacctgcacccctcctcccactgacatgccctgctgagtcctgaccagcccagggctctctgggagcaggagttaggagcacagacgcagcggttagcaataggattcatctttgagggcgtaggactgtggcacgagaagtacccctgattcacagcataaattgtcttaggagagttttttagagagggaaaaacccacagcctgcaaccagctcatcttggcctcaggtcagagaagactcagtgcccagaagcccaaggctcagccagaaagggaggtgacactcccagcggccctgctctttcctctagacagactcgggagccagcacacaccgggaagtggctccatcagggatcacttctctaacagggatggatttccaggagacttaacaataatgacatagaaaactatttctagaaataattattttaaaatctgcagctcaaattgtaataggttcattcatctttggcaagctattttgtgtttgcacgttccttggaaagtactgtatttaaacgattatttacaaatagcctaaaatacatctttgtcaagggttgagggtgattccaggggccacgtgctctgttagtgaccagctctttcatagccccttagaagaagctgatgtgacttcagttaggggttagtatctgatgcccaactgaagtgtctccgtggccatgcagtccccagaggattggtgttctctcaaagcgggtgtgtggatcacacagtgtcctctgaagtgcttcgtcataaaggcaggtgctgtctggaccctgtgcctcagtgccctctgtccctgtcaccaggcctcggcgggtgttcctgccatagctgtgcagggtgttcccacccacacccctcatgccgcaccctagctagctggggtcctgtaggggccactccacatcttgggcgggacttctgtcgccccaggcacagcccacgttcctactggagcccattcttcacagctggagtgggctcagcctatgcctgtgttgtggaattatatgtccataaagggattggttggtatcagtaatttcagggttaaatatttgctggcgtggtgcattaaattattttagtgccagataaatttttaaaagcaaagtgctttagtgtgtcccctcaaatcctacttgggataaagagatgccacctaatgggtggcagaaaggaccctggtagaggttcttggtgttgcttgtgaagagctctggccagctccacgtgaccagggagaggaaaagcccggccctcctggaggtgaagaccgagaagctggcctctccgcacctgtgaagacccactggtcagttgcaagtgcgacagtgtgtgcactcagtgcagacactgcagcacctcagcacctccctaccggggtggaaagagcactttttctttacagaaacatgattcttagatagcgagcctcccctttttaaaacaattgaggcgatatttcatcctttcttgagcttctctccctgctcatctccaaacttggagctgtcaggtgagcacggttgtagggtgttgagcgagccccggcgcatgccgggcaccgggttccccacactgggcagtgacggggcccagggaggccaccagaggagcggcgcctccattctccccacagcaagggctggctgtgcaggtgcagccccggggcagagggaaaggacaggtctcccagcacctcccggatggcaccgggacaaggagggctgggctggggtcactcaccttgtctgctgagtgcgatggcaccaaccacccacactgtcagctccgcgaccagctgggggaacgtcacactcgcccaccaaggcacttgctgaggccacgacgccgcctgacggggacacacaaaagccccagggactttgatccacgataaagagcagaggcgtctgggtaaagtaacacagggcaagggactttagaaaagtaacagctagtgaaacctttccatacacttcagaaatgttttaacttaagacttcagtataatgttaacttctcctgatgtccttgttgacatgaatgcgtgtgcgtgaaatctcacacacttccatggtcactaaacagccttcaccccgggccaggccatcgggtactcggcccgcttcacgtactgattacttgacttggcgttttctagatataaacatgtacatgtgtgtcctggctttgtggtgtaaatgtgtagtgcgtgtgcatgtgcgcgcgtgtgtgtgtgtaaggctaggtcctggcatgtttcccctgtctcagcggaccctgtcctcacggagatagcccagaagcccttggacagcacaggccacacctgagggtgctgatggtggtgactccacagagctgtggtcaggggtgagcgtgtgctgcgcagcttggagtcacgcccccagaagtgctgggtgagggtctgcaggacccagctccattccacagcctcagttctctgcggcacatgcagcacaggcctgaaggagacctggcgccccagccttgagctgcccgtctgcatcagggcactgatgtgggagcatcttcccctggggatgttaaggagaaggtcctgttgggggtagagattcacgcagaaaagagtgactgactcgtccatgtgcctcagtttataccacacaattgcaggtgtccatgcctcccacacatggggacctagtgggttttgacagcgtggtgtccagtcctagccccctcagtgcttgctgttcacacttaagcaagtgaaggcctgaaggtgcccagctgtgccctcaggggaaacttaagtcacccgccctgtcagcacttggcccttgtcgggcagtgagagtggagctgcccccgcagcaccctcaggagccatgcagttcacagcagtagctggatctccctgaggacatttgtccttgcatatcttaatgatttgtccacagaaacaccgggttgtcttcctctgcccctctgccccgcagtgggggcactctctgtaactcagcatcacggtggggggcagctgggaggcctggttccaggtgaccttctccacctagatgttcaccccactcagttccagctttaccaacagggccccccgcagggacttggggtcgcagagtcccggcctgtctcagggccttgttcatggaagggagatgagtcaggttgaaagctcatcgtgtagggttctgtgcagggcccttacaggactggaccgcagccaagatgcctgcctgttaaccatgcccagcccccgtcatttccgcgtgaagccgcaggcctcggagccttggtctgaaatgcctgtggagtaacctcggtccataaacatgggtgcacagtctgttctccccaagtacagggcaggaggaaacaccgccctctgtagctgctcgaatggaaagggctcttttctctgaggtctttatacattagaaagctcttctgggaagaatgtttgaatccatagtgtctttctgtattcacttttaattgctttctaaattagctgagaaattctgacttgaaatattgtcaggtaagcatttcttcagttttcatgtgtgtatgtaacagtagctttgcatggaaattgtaatcagagtcaaatacagtattgaatggaatgtactgccttctcctcctaaatcaataaacatctttcatggaaa

SEQ ID NO: 125698 - DNA, 8477 bp, Homo sapiens
  Payload ID: 4635
  Gene Symbol: DIDO1
  Gene Name: death inducer-obliterator 1
  Uniprot ID: Q9BTC0
  ENST ID: ENST00000395343
  CDS Start-End: 265-6987
ctcggtggccgtccgcccactccgcggcgttcggggaaatggctgcgagaccctagaggcctgcggagcttactccacgggaacagcctctagataatctgagttgttgaaaatacgaagcctgttactcgtgaacagtggctgacaacagtgttgttgtgagcctggctgtctgcttggacccagaggtttcgtctgccagggtttttggttgtatttaggatttcagggaaaagtgtccaagctttcagtgttggagcaggtatggacgacaaaggcgacccgagcaatgaggaggcacctaaggccatcaaacccaccagcaaagagttcaggaaaacatggggttttcgaaggaccactatcgccaagcgagagggcgcaggggacgcggaggctgacccactggagccgccacccccacagcagcagctgggcctgtccctgcggcgcagtgggaggcagcccaagcgcactgagcgcgtggagcagttcctgaccattgcgcggcgccgcggcaggaggagcatgcctgtctccctggaggattctggtgagcccacgtcctgccccgccacagacgccgagacagcctccgagggcagcgtggaaagcgcttctgagaccagaagcggcccccagtctgcttccacagctgtgaaggaacgaccagcctcttctgaaaaggtgaaaggaggggatgaccacgatgacacctccgatagtgacagcgatggcctgaccttgaaagagcttcagaatcgccttcgcaggaagcgggaacaggagcccactgagaggcccctgaaagggatccagagtcgcctgcggaagaagcgccgggaggagggtcccgccgagactgtgggctccgaggccagtgacactgtggagggcgtcctgcccagtaagcaggagcccgagaacgatcagggggttgtgtcccaggctgggaaagatgacagagagagtaagttggagggaaaggcggctcaggacatcaaagatgaggagcctggagacttgggccgaccgaagcctgaatgtgagggttacgaccccaacgccctgtattgcatttgccgccagcctcacaacaacaggtttatgatttgctgtgaccgctgtgaagaatggtttcatggcgattgtgtgggcatttctgaggctcgagggaggcttttggaaaggaatggggaagactatatctgcccaaactgcaccattctgcaagtgcaggatgagactcattcagaaacggcagatcagcaggaagctaaatggagacctggagatgctgatggcaccgattgtacaagtataggaacaatagagcagaagtctagcgaagaccaagggataaagggtagaattgagaaagctgcaaatccaagtggcaagaagaaactcaagatcttccagcctgtgatagaggcgcctggtgcctcaaaatgtattggccccgggtgctgtcacgtggcgcagcccgactcggtgtactgcagtaatgactgtatcctcaaacacgccgcagcgacaatgaagtttctaagctcaggtaaagaacagaagccaaagcctaaagaaaagatgaagatgaagccagagaagcccagtcttccgaaatgcggtgctcaggcaggtattaaaatctcttctgtgcacaagagaccagctccagaaaaaaaagagaccacagtgaagaaggcagtggtggtccctgcgcggagtgaagcactcgggaaggaagcagcttgtgagagcagcacgccgtcgtgggcgagcgatcacaattacaatgcagtaaagccagaaaagactgctgctccctcgccgtcactgttgtataaatccacgaaggaagacaggaggtccgaggagaaagcggcagccatggcagcctcaaagaaaacagcccctccaggctccgcggtgggcaagcagcctgcacctagaaacctcgtgccaaagaagtcttcttttgctaatgtggcagcagccacaccagccattaaaaagccaccctcaggtttcaagggcaccatccccaagaggccatggctctccgctaccccatcgagtggtgcttcagctgccaggcaggccggaccggcacctgcagcggcaacggctgcctccaagaagttccctggctccgctgctttggtgggagccgtaaggaagccagtggtaccttctgttccaatggcctcgccagccccaggacgccttggggctatgagtgctgcaccatcgcagccaaattcacaaattcggcaaaatatcagacgctccttaaaagagattttgtggaaaagagtcaatgacagcgatgacttaatcatgacagaaaacgaagtaggaaaaattgccctccatattgagaaggagatgtttaacttgtttcaagttacagataatcgctacaagagtaaatatcgcagcatcatgttcaacctgaaggaccctaaaaatcagggactcttccatcgtgttctgcgtgaggaaatctctttggcgaaacttgtgagactgaagccagaagaacttgtatctaaagagctttccacgtggaaagagaggccagcgagatctgtgatggagtccagaactaaactgcacaatgaaagcaagaagacggcccccaggcaggaggccatccccgatctggaggactctccgccagtgtcggattcagaggaacagcaagagtcagcacgtgctgtccctgagaagagcacagcgccgcttctcgacgtcttcagcagcatgttgaaagacaccaccagtcagcaccgcgcacacctcttcgatctcaactgtaaaatttgcacaggccaggttccctccgcagaagatgagccagctccgaaaaaacaaaaattgtcagcttctgttaagaaagaagacttaaaatcaaagcatgacagctctgcacctgacccagctccggattcagctgatgaggtgatgccggaggctgtgcctgaagttgcctctgagccaggcctagaaagtgcttctcatccaaatgtggacagaacgtatttccctgggcctccaggagatggccatcccgagccctccccgctggaagacctgtccccctgcccagcctcctgtgggagcggggtggtcaccaccgtcacagtgtccggccgggaccccaggaccgctccaagcagttcatgcacagccgtggcctccgcagcatcccgcccagacagcacccacatggtggaagccagacaggatgtgccgaagcctgtcttgacttctgtgatggtgcccaagtccatactagctaagccatcctcatctcctgacccaagatacctgtcagttcctccgtcaccaaatatcagcacttcagaatcacgttcccctccagagggagacacgaccctctttttgtctcgactcagcaccatttggaaaggatttattaacatgcagagtgtggcaaaatttgtcactaaggcgtatcctgtctctgggtgttttgattacctcagtgaggatttgcctgacacaattcacattggtgggaggatcgcaccgaagacagtttgggattatgttggcaaactcaagtcttctgtgtctaaggagctctgtctgatccgcttccaccccgccacagaggaagaggaggtcgcctatatctctctctactcctatttcagcagccgtggccgctttggtgttgtagctaataacaacaggcacgtcaaggacctctacctgatcccgctgagcgcccaggaccctgttccatccaaactcttgccctttgagggaccaggtcttgagtcaccacgtccgaatataattcttgggttagtaatctgccaaaaaatcaaacgtcccgcaaacagtggagagttagacaagatggacgaaaagcggacccgacttcaaccggaagaagcggacgttccggcctatccaaaagtagccacagtcccgcagtcggaaaagaagccctccaagtatccactctgctctgcagacgcggctgtcagcaccacacctcctgggtcgccgccgcctccgccccctcttccagaaccaccggtgctaaaagtgctgtcatccctcaaacctgcagcccccagcccagccacagcagccacaacagcagcggcagcctccacggcagcttcctccaccgcttcgtctgcttccaaaacagcatcaccgctggagcacatcctgcagactctctttggaaagaagaaatcattcgacccgtccgccagagagcctcccgggtccaccgcaggtctcccccaggagcccaaaaccacagcagaggacggggtgccggcacctccgttgttagatccgatcgtccagcagttcggtcagttctcaaaagataaggctctagaggaagaggaggacgacaggccatacgaccctgaggaggagtacgacccggagagggccttcgacactcagcttgtggagcgagggcggcgccacgaggtggaaagggctcctgaagcagctgcagccgagcgggaagaggtggcctatgaccccgaggatgagaccatcttagaagaagcgaaagtgactgttgatgacctgcccaacaggatgtgtgccgacgtgagaaggaactccgtggagaggcctgccgagccggtggccggggctgcgacgccctccctggtggagcaacagaagatgctagaagagctgaacaaacagatcgaggagcagaagagacagctggaggagcaagaagaagctctcaggcagcagagggccgccgtcggggtctccatggcccacttctcggtgtcggacgccttgatgtctccaccaccaaagtcgtccttgcccaaggcagagctgttccagcaagagcagcagtctgcagacaagcccgcctcactgccccccgccagccaggcgtcaaaccacagggacccccggcaggcgaggcgcctggccactgagaccggtgagggggagggggagcctctctccaggctctcggcacgtggtgcccagggtgccctgcccgagagagatgcttccaggggtggcctcgtgggccaggcgcccatgccagtcccggaggaaaaagagccagcctcttccccctgggcttcgggcgaaaagcccccagcggggtccgagcaggacggctggaaggcagagcctggggagggcacccgccccgccacggttggagacagctcggccaggcctgcccggagggtgctgctgcccacaccgccttgcggcgccctgcagcccggcttcccgctgcagcacgacggtgagagggaccctttcacctgcccggggttcgcgtcgcaggacaaggctctcggctcagcccagtatgaggacccaagaaatcttcattctgctggaaggagcagcagccctgcaggtgaaacagagggggacagagagccacaggccagacccggcgagggcaccgccccgctccccccaccaggacagaaagtggggggctctcagcccccgtttcagggtcagcgggaacctggacctcatgctttggggatgtcagggcttcacggccccaatttcccgggaccaagggggccagcccctccgtttccagaagagaatatcgcttctaacgatgggccacgagggcctccgccagccagattcggagcccagaaggggcccatcccttccttattctcggggcaacatgggccacctccttatggggacagcagaggcccctcaccctcttaccttggtggaccacgaggagtggcaccatcccaatttgaagaacgcaaggatccccatggggagaagagggagttccaggacgccccgtataacgaggtgacgggcgcccccgcccagtttgaagggacagagcaagccccatttctgggaagcagaggcggcgcgcctttccagttcggaggccagagaaggccactgctgtctcagctgaaaggcccccgaggcggcccccctccctctcagtttggaggtcagagaggaccaccccctggtcatttcgtgggcccaagagggccccatcctagtcagtttgaaactgcccggggccctcatcccaaccagtttgaaggacccagaggccaagcgcctaactttatgccaggtcccaggggcattcagcctcagcagttcgaagaccagagggtccattcaccaccaagattcacaaaccaaagggcgcctgcacccctgcagtttggtggactacgggggtccgcacccttttctgaaaaaaatgagcagaccccttcgcgatttcacttccagggccaggccccgcaggtgatgaagccgggccccaggcccctgctggagcttcccagccaccccccgcagcaccggaaggaccgctgggaggaggccgggccgccctccgcgctctcctccagtgcgcccggacagggccccgaggccgacggacagtgggcatcggccgacttccgagaggggaaaggccacgaatacagaaaccagactttcgaagggaggcagagagagcggtttgacgtggggcccaaagagaagccgctggaggagcccgacgcccagggccgggcgtccgaggacaggaggagagagcgcgagcgcggccgaaactggagccgagagcgggactgggaccggccccgggagtgggaccgacaccgggacaaggactccagccgggactgggacagaaaccgggagaggagcgccaaccgcgaccgagagcgcgaggccgaccggggcaaggagtgggaccgcagccgggagcggagcaggaaccgagagcgcgagcgagaccggaggcgcgaccgggaccggtcccggagcagagagcgggaccgagacaaggccagggacagggagcggggccgcgaccgcaaggaccggagcaagagcaaagagagcgctcgggacccgaagcccgaggcctcgagggcctccgacgctggcaccgcctcgcaggcctagacgccccggccgggcagagaccctttttaaagccacgttcgtaagatgcgttgaacaaatagcttttgaaatagccacgatcttagattcaggatagaatattctggacttaaacattactgtaattttgtgtaaatggtttcttacaagatttcacatctttacaattctgatgcttttttaaaaaaactaaactttaatatttccatttaaaattaaaagaaatgggaaattgcctacggagcatattgcttttcagatcatagttatcttttccaataactttattgtaaattttaagggagtttcgttggaccctagagccataccttcactgacatctcatccgtttgtgtttccaaaagctgcttttacaggtcttagccgccgccccggaggccggtgtgggcgtgacctgcaggcgtccaccctgcggctacgggagaagtcttagtagcttgtatctggagtcttgagaaacacaaaccttacaaatgcatctttcttttgtcataaaattggaattacaattttcaactgggaaacagaaacacatttcttagcgtgctcagattttatatatcaccttatcaattttttccaaaacatgatttaaagcaacatctgtcctagtataattgttgcattttaaataacaatttattgaaaaatgttaagttttaccagcctaaaaaaagtaacaaaccaattaagtgtactttgggggcagggaggagtccttgatttgaataatcaggagttttgttggtccagtttcgccttctgagcagttcttctgtatcccgggaaaagtacgctcggccccaaactggtatttgtcagacgatacatgtaaaagtttgtccttgaacgtggaacaagacttgtgtaaagtctgagacgggaactagtgatcactagctcaagaactgcaaatgagacaggaagctgttcactgtgaaacagtctcttgcttgtcgtgtatttttcgagtacttctgaagtgtgaagtaaaaaaatctggctaatttatttgtacaaatacactttgataattttttatattttcataaacttttacagatgtaaaattaaagaacttcacttgttctttggagtctgttattccattgtacgtcactacagatttttcactttatagcacagattttttaagttaagaaaacattgagaatgtatcagtttgagatgtttggtgttgaaagccaagtgtccataggttaaattacattaaagtaggtgtcacgttccaacatctagtacgatgagaaggttttgtttgtttaacatataaagcaaatttttctaatttaaatacacaaatgtaaaaatcaagtgtgtttctttagtttacttgatagagattcctgtacattgtattttatattgcggaggcttatatcactgtacatgagaacatggaacgacctaggttttgttactcgcagtagaataaacagctacaggaa

SEQ ID NO: 125699 - DNA, 2339 bp, Homo sapiens
  Payload ID: 4636
  Gene Symbol: DAP
  Gene Name: death-associated protein
  Uniprot ID: P51397
  ENST ID: ENST00000230895
  CDS Start-End: 205-513
ggctgcgccacgtcggcgcgcggcggccgcgcccccttaacggcagtggcactcacccggctcgcgcggccccggcgccccacgcgcgcgcgtcgttctcccgcccgctcgctccccggcgctcacacctgagctcactcgcgcacgcccgcccggcccgagaaccgcgccgccgcctcggccccgcggaagccccgccgcgtcatgtcttcgcctcccgaagggaaactagagactaaagctggacacccgcccgccgtgaaagctggtggaatgcgaattgtgcagaaacacccacatacaggagacaccaaagaagagaaagacaaggatgaccaggaatgggaaagccccagtccacctaaacccactgtgttcatctctggggtcatcgcccggggtgacaaagatttccccccggcggctgcgcaggtggctcaccagaagccgcatgcctccatggacaagcatccttccccaagaacccagcacatccagcagccacgcaagtgagcctggagtccaccagcctgccccatggccccggctctgctgcacttggtatttccctgacagagagaaccagcagtttcgcccaaatcctactctgctgggaaatctaaggcaaaaccaagtgctctgtcctttgccttacatttccatatttaaaactagaaacagctccagcccaaaccttgtttatggggagtctggttggatgtcatttgaggatcattgtgcccctagaggtgccattagcagaatttgccaagatccgagaaaaattttagctttagttctatttcagcagtcacctgacgtccttgtctatggtcttaaaaacaagaaggcacacatttgagaagatgagattaaggttaggagaaaacctcagtcattgcatgctttttagtatgggccaataaaatctcaacacctgtgggagagtaagaactaagggaatgagtttgggcggcccctcataaaggaccttagaggcagggaacagcaatgccaaatttccctctctcgtgagatgggggatcctgtgcaggctgatgaggcacccatgagaaaagccgaaaaagcatgcatcttagaaatagcccctcaattccaggagtcaacatgccaaagaatgaggctggagacaggtagctccgagggaggacttctggcatgagatctcggcacggcaagcccagcatcgcctcagcccagacaggctccaccaggagatcaagcaagggctgcctttcaggagtcacctcctgagccacttcagagttctggaagtgaccacggaccagggtggaggaatagacttctagttcattctgggacacttgagccagagagttgaaagcttggaaagaccagataagaaacctgccctttgtctccctagggacatgagacaccacattccatttgtgctagaaaaacctatccactgatgagtctaactgttccaaacgcctcccacctggtgtgcacagctgcctgggtccattgtcacttgggtgcatcaggttgtcctccgatttttagatgagtttcctgtctagagatgtcctagtctgctcactggctggtggcagtagggtaccctgcgtcctcgaaaagccagagggttcacctagtcagacgaaactccagaacagtgcttgtggagggcctgactgtcctgctcacccacagccgatctgctgcaggtcagcaactgtgtcgtgagcagctgccaaccaccagcctttctggtgctgttctccagttcacgtctgccagctggtgagggcagaggcagacctggtcagacccagcgcccctcctccctgagggagcatggcacagcctcacacttgaaagacggtgtttggtttcccatctaatcaacttaagggaagccggcatgtacccttcaaggccctgtcaccacctatttcctgatcagttggtataaactgagggtggcttttagagacccagacttggttggcagcgctgccatggaacaccccagcaagcacctcccagcctgcctttcggagcagcacccaggaggggatgccgcgctccagcaacaccaggtcaggcctgtgcagacccctgccctgccgctgcagaaatccagaagcatccttaatgcttctcagtcttcagccagagggagggctgttatttccagaggtgcgctttttatgtacttttagctagatgtggcatgcatctgtgagctttagatcattaaatccaaaatgtttgcctaaatgagtttatcagttgttaacttcaagaatattaaatgatttataataaagctcctgcatttctctcca

SEQ ID NO: 125700 - DNA, 1048 bp, Homo sapiens
  Payload ID: 4636
  Gene Symbol: DAP
  Gene Name: death-associated protein
  ENST ID: ENST00000432074
  CDS Start-End: 161-775
agtggcactcacccggctcgcgcggccccggcgccccacgcgcgcgcgtcgttctcccgcccgctcgctccccggcgctcacacctgagctcactcgcgcacgcccgcccggcccgagaaccgcgccgccgcctcggccccgcggaagccccgccgcgtcatgtcttcgcctcccgaagggaaactagagactaaagctggacacccgcccgccgtgaaagctggtggaatgcgaattgtgcagaaacacccacatacaggagacaccaaagaagagaaagacaaggatgaccaggaatgggaaagccccagggtgacaaagatttccccccggcggctgcgcaggtggctcaccagaagccgcatgcctccatggacaagcatccttccccaagaacccagcacatccagcagccacgcaagtgagcctggagtccaccagcctgccccatggccccggctctgctgcacttggtatttccctgacagagagaaccagcagtttcgcccaaatcctactctgctgggaaatctaaggcaaaaccaagtgctctgtcctttgccttacatttccatatttaaaactagaaacagctccagcccaaaccttgtttatggggagtctggttggatgtcatttgaggatcattgtgcccctagaggtgccattagcagaatttgccaagatccgagaaaaattttagctttagttctatttcagcagtcacctgacgtccttgtctatggtcttaaaaacaagaaggcacacatttgagaagatgagattaaggttaggagaaaacctcagtcattgcatgctttttagtatgggccaataaaatctcaacacctgtgggagagtaagaactaagggaatgagtttgggcggcccctcataaaggaccttagaggcagggaacagcaatgccaaatttccctctctcgtgagatgggggatcctgtgcaggctgatgaggcacccatgagaaaagccgaaaaagcatgcatcttagaaatagcccctcaattccaggagtcaacatgccaa

SEQ ID NO: 125701 - DNA, 5743 bp, Homo sapiens
  Payload ID: 4637
  Gene Symbol: DAPK1
  Gene Name: death-associated protein kinase 1
  Uniprot ID: P53355
  ENST ID: ENST00000358077
  CDS Start-End: 184-4476
cttcagattgcaaaccttcttgccttcaagcctcggctccaacaccagtccggcagaggaacccagtctaatgaggactggagactgatgcatgagggggctacggaggcgcaggagcggtggtgatggtctgggaagcggagctgaagtgccctgggctttggtgaggcgtgacagtttatcatgaccgtgttcaggcaggaaaacgtggatgattactacgacaccggcgaggaacttggcagtggacagtttgcggttgtgaagaaatgccgtgagaaaagcaccggcctccagtatgccgccaaattcatcaagaaaaggaggactaagtccagccggcggggtgtgagccgcgaggacatcgagcgggaggtcagcatcctgaaggagatccagcaccccaatgtcatcaccctgcacgaggtctatgagaacaagacggacgtcatcctgatcttggaactcgttgcaggtggcgagctgtttgacttcttagctgaaaaggaatctttaactgaagaggaagcaactgaatttctcaaacaaattcttaatggtgtttactacctgcactcccttcaaatcgcccactttgatcttaagcctgagaacataatgcttttggatagaaatgtccccaaacctcggatcaagatcattgactttgggttggcccataaaattgactttggaaatgaatttaaaaacatatttgggactccagagtttgtcgctcctgagatagtcaactatgaacctcttggtcttgaggcagatatgtggagtatcggggtaataacctatatcctcctaagtggggcctccccatttcttggagacactaagcaagaaacgttagcaaatgtatccgctgtcaactacgaatttgaggatgaatacttcagtaataccagtgccctagccaaagatttcataagaagacttctggtcaaggatccaaagaagagaatgacaattcaagatagtttgcagcatccctggatcaagcctaaagatacacaacaggcacttagtagaaaagcatcagcagtaaacatggagaaattcaagaagtttgcagcccggaaaaaatggaaacaatccgttcgcttgatatcactgtgccaaagattatccaggtcattcctgtccagaagtaacatgagtgttgccagaagcgatgatactctggatgaggaagactcctttgtgatgaaagccatcatccatgccatcaacgatgacaatgtcccaggcctgcagcaccttctgggctcattatccaactatgatgttaaccaacccaacaagcacgggacacctccattactcattgctgctggctgtgggaatattcaaatactacagttgctcattaaaagaggctcgagaatcgatgtccaggataagggcgggtccaatgccgtctactgggctgctcggcatggccacgtcgataccttgaaatttctcagtgagaacaaatgccctttggatgtgaaagacaagtctggagagatggccctccacgtggcagctcgctatggccatgctgacgtggctcagttactgtgcagcttcggctcaaatcccaatatccaggacaaggaagaagaaacccccctgcactgtgctgcttggcacggctattactctgtggccaaagccctttgtgaagccggctgtaacgtgaacatcaagaaccgagaaggagagacgcccctcctgacagcctctgccaggggctaccacgacatcgtggagtgtctggccgaacatggagccgaccttaatgcttgcgacaaggacggacacattgcccttcatctggctgtaagacggtgtcagatggaggtaatcaagactctcctcagccaagggtgtttcgtcgattatcaagacaggcacggcaatactcccctccatgtggcatgtaaagatggcaacatgcctatcgtggtggccctctgtgaagcaaactgcaatttggacatctccaacaagtatgggcgaacgcctctgcaccttgcggccaacaacggaatcctagacgtggtccggtatctctgtctgatgggagccagcgttgaggcgctgaccacggacggaaagacggcagaagatcttgctagatcggaacagcacgagcacgtagcaggtctccttgcaagacttcgaaaggatacgcaccgaggactcttcatccagcagctccgacccacacagaacctgcagccaagaattaagctcaagctgtttggccactcgggatccgggaaaaccacccttgtagaatctctcaagtgtgggctgctgaggagctttttcagaaggcgtcggcccagactgtcttccaccaactccagcaggttcccaccttcacccctggcttctaagcccacagtctcagtgagcatcaacaacctgtacccaggctgcgagaacgtgagtgtgaggagccgcagcatgatgttcgagccgggtcttaccaaagggatgctggaggtgtttgtggccccgacccaccacccgcactgctcggccgatgaccagtccaccaaggccatcgacatccagaacgcttatttgaatggagttggcgatttcagcgtgtgggagttctctggaaatcctgtgtatttctgctgttatgactattttgctgcaaatgatcccacgtcaatccatgttgttgtctttagtctagaagagccctatgagatccagctgaaccaagtgattttctggctcagtttcctgaagtcccttgtcccagttgaagaacccatagccttcggtggcaagctgaagaacccactccaagttgtcctggtggccacccacgctgacatcatgaatgttcctcgaccggctggaggcgagtttggatatgacaaagacacatcgttgctgaaagagattaggaacaggtttggaaatgatcttcacatttcaaataagctgtttgttctggatgctggggcttctgggtcaaaggacatgaaggtacttcgaaatcatctgcaagaaatacgaagccagattgtttcggtctgtcctcccatgactcacctgtgtgagaaaatcatctccacgctgccttcctggaggaagctcaatggacccaaccagctgatgtcgctgcagcagtttgtgtacgacgtgcaggaccagctgaaccccctggccagcgaggaggacctcaggcgcattgctcagcagctccacagcacaggcgagatcaacatcatgcaaagtgaaacagttcaggacgtgctgctcctggacccccgctggctctgcacaaacgtcctggggaagttgctgtccgtggagaccccacgggcgctgcaccactaccggggccgctacaccgtggaggacatccagcgcctggtgcccgacagcgacgtggaggagctgctgcagatcctcgatgccatggacatctgcgcccgggacctgagcagcgggaccatggtggacgtcccagccctgatcaagacagacaacctgcaccgctcctgggctgatgaggaggacgaggtgatggtgtatggtggcgtgcgcatcgtgcccgtggaacacctcacccccttcccatgtggcatctttcacaaggtccaggtgaacctgtgccggtggatccaccagcaaagcacagagggcgacgcggacatccgcctgtgggtgaatggctgcaagctggccaaccgtggggccgagctgctggtgctgctggtcaaccacggccagggcattgaggtccaggtccgcggcctggagacggagaagatcaagtgctgcctgctgctggactcggtgtgcagcaccattgagaacgtcatggccaccacgctgccagggctcctgaccgtgaagcattacctgagcccccagcagctgcgggagcaccatgagcccgtcatgatctaccagccacgggacttcttccgggcacagactctgaaggaaacctcactgaccaacaccatgggggggtacaaggaaagcttcagcagcatcatgtgcttcgggtgtcacgacgtctactcacaggccagcctcggcatggacatccatgcatcagacctgaacctcctcactcggaggaaactgagtcgcctgctggacccgcccgaccccctggggaaggactggtgccttctcgccatgaacttaggcctccctgacctcgtggcaaagtacaacaccagtaacggggctcccaaggatttcctccccagccccctccacgccctgctgcgggaatggaccacctaccctgagagcacagtgggcaccctcatgtccaaactgagggagctgggtcgccgggatgccgcagactttttgctgaaggcatcctctgtgttcaaaatcaacctggatggcaatggccaggaggcctatgcctcgagctgcaacagcggcacctcttacaattccattagctctgttgtatcccggtgagggcagcctctggcttgggcagggtctgtttggactgcagaagcaagggggtgatgtagcccatccttccctttggagatgctgagggtgtttcttcctgcacccacagccagggggatgccactcctccctccggcttgacctgtttctctgccgctacctccctccccgtctcattccgttgtctgtggatggtcattgcagtttaagagcagaacagatcttttactttggccgcttgaaaagctagtgtacctcctctcagtgttttggactccatctctcatcctccagtaccttgcttcttactgataattttgctggaattcctaacttttcaatgacattttttttaactactatattgattgtcctttaaaaaagaaaagtgcatatttatccaaaatgtgtatttcttatacgcttttctttgttataccatttcctcagcttatctcttttatatttgtaggagaaactcccatgtatggaatcccactgtatgatttataaacagacaatatgtgagtgccttttgcagaagagggtgtgtttgaaatcatcggagtcagccaggagctgtcaccaaggaaacgctacctctctgtcccttgctgtatgctgatcatcgccagaggtgcttcaccctgagttttgttttgtattgttttctgacagtttttctgttttgtttggcaaggaaaggggagaagggaatcctcctccagggtgattttatgatcagtgttgttgctctaggaagacatttttccgtttgcttttgttccaatgtcaatgtgaacgtccacatgaaacctacacactgtcatgcttcatcattccctctcatctcaggtagaaggttgacacagttgtagggttacagagacctatgtaagaattcagaagacccctgactcatcatttgtggcagtcccttataattggtgcatagcagatggtttccacatttagatcctggtttcataacttcctgtacttgaagtctaaaagcagaaaataaaggaagcaagttttcttccatgattttaaattgtgatcgagttttaaattgataggagggaacatgtcctaattcttctgtcctgagaagcatgtaatgttaatgttatatcatatgtatatatatatatgcactatgtatatacatatatattaatactggtatttttacttaatctataaaatgtcgttaaaaagttgtttgtttttttctttttttataaataaactgttgctcgttgca

SEQ ID NO: 125702 - DNA, 5892 bp, Homo sapiens
  Payload ID: 4637
  Gene Symbol: DAPK1
  Gene Name: death-associated protein kinase 1
  Uniprot ID: P53355
  ENST ID: ENST00000408954
  CDS Start-End: 336-4628
ggaggacagccggaccgagccaacgccggggactttgttccctccgcggaggggactcggcaactcgcagcggcagggtctggggccggcgcctgggagggatctgcgccccccactcactccctagctgtgttcccgccgccgccccggctagtctccggcgctggcgcctatggtcggcctccgacagcgctccggagggaccgggggagctcccaggcgcccgggactggagactgatgcatgagggggctacggaggcgcaggagcggtggtgatggtctgggaagcggagctgaagtgccctgggctttggtgaggcgtgacagtttatcatgaccgtgttcaggcaggaaaacgtggatgattactacgacaccggcgaggaacttggcagtggacagtttgcggttgtgaagaaatgccgtgagaaaagcaccggcctccagtatgccgccaaattcatcaagaaaaggaggactaagtccagccggcggggtgtgagccgcgaggacatcgagcgggaggtcagcatcctgaaggagatccagcaccccaatgtcatcaccctgcacgaggtctatgagaacaagacggacgtcatcctgatcttggaactcgttgcaggtggcgagctgtttgacttcttagctgaaaaggaatctttaactgaagaggaagcaactgaatttctcaaacaaattcttaatggtgtttactacctgcactcccttcaaatcgcccactttgatcttaagcctgagaacataatgcttttggatagaaatgtccccaaacctcggatcaagatcattgactttgggttggcccataaaattgactttggaaatgaatttaaaaacatatttgggactccagagtttgtcgctcctgagatagtcaactatgaacctcttggtcttgaggcagatatgtggagtatcggggtaataacctatatcctcctaagtggggcctccccatttcttggagacactaagcaagaaacgttagcaaatgtatccgctgtcaactacgaatttgaggatgaatacttcagtaataccagtgccctagccaaagatttcataagaagacttctggtcaaggatccaaagaagagaatgacaattcaagatagtttgcagcatccctggatcaagcctaaagatacacaacaggcacttagtagaaaagcatcagcagtaaacatggagaaattcaagaagtttgcagcccggaaaaaatggaaacaatccgttcgcttgatatcactgtgccaaagattatccaggtcattcctgtccagaagtaacatgagtgttgccagaagcgatgatactctggatgaggaagactcctttgtgatgaaagccatcatccatgccatcaacgatgacaatgtcccaggcctgcagcaccttctgggctcattatccaactatgatgttaaccaacccaacaagcacgggacacctccattactcattgctgctggctgtgggaatattcaaatactacagttgctcattaaaagaggctcgagaatcgatgtccaggataagggcgggtccaatgccgtctactgggctgctcggcatggccacgtcgataccttgaaatttctcagtgagaacaaatgccctttggatgtgaaagacaagtctggagagatggccctccacgtggcagctcgctatggccatgctgacgtggctcagttactgtgcagcttcggctcaaatcccaatatccaggacaaggaagaagaaacccccctgcactgtgctgcttggcacggctattactctgtggccaaagccctttgtgaagccggctgtaacgtgaacatcaagaaccgagaaggagagacgcccctcctgacagcctctgccaggggctaccacgacatcgtggagtgtctggccgaacatggagccgaccttaatgcttgcgacaaggacggacacattgcccttcatctggctgtaagacggtgtcagatggaggtaatcaagactctcctcagccaagggtgtttcgtcgattatcaagacaggcacggcaatactcccctccatgtggcatgtaaagatggcaacatgcctatcgtggtggccctctgtgaagcaaactgcaatttggacatctccaacaagtatgggcgaacgcctctgcaccttgcggccaacaacggaatcctagacgtggtccggtatctctgtctgatgggagccagcgttgaggcgctgaccacggacggaaagacggcagaagatcttgctagatcggaacagcacgagcacgtagcaggtctccttgcaagacttcgaaaggatacgcaccgaggactcttcatccagcagctccgacccacacagaacctgcagccaagaattaagctcaagctgtttggccactcgggatccgggaaaaccacccttgtagaatctctcaagtgtgggctgctgaggagctttttcagaaggcgtcggcccagactgtcttccaccaactccagcaggttcccaccttcacccctggcttctaagcccacagtctcagtgagcatcaacaacctgtacccaggctgcgagaacgtgagtgtgaggagccgcagcatgatgttcgagccgggtcttaccaaagggatgctggaggtgtttgtggccccgacccaccacccgcactgctcggccgatgaccagtccaccaaggccatcgacatccagaacgcttatttgaatggagttggcgatttcagcgtgtgggagttctctggaaatcctgtgtatttctgctgttatgactattttgctgcaaatgatcccacgtcaatccatgttgttgtctttagtctagaagagccctatgagatccagctgaaccaagtgattttctggctcagtttcctgaagtcccttgtcccagttgaagaacccatagccttcggtggcaagctgaagaacccactccaagttgtcctggtggccacccacgctgacatcatgaatgttcctcgaccggctggaggcgagtttggatatgacaaagacacatcgttgctgaaagagattaggaacaggtttggaaatgatcttcacatttcaaataagctgtttgttctggatgctggggcttctgggtcaaaggacatgaaggtacttcgaaatcatctgcaagaaatacgaagccagattgtttcggtctgtcctcccatgactcacctgtgtgagaaaatcatctccacgctgccttcctggaggaagctcaatggacccaaccagctgatgtcgctgcagcagtttgtgtacgacgtgcaggaccagctgaaccccctggccagcgaggaggacctcaggcgcattgctcagcagctccacagcacaggcgagatcaacatcatgcaaagtgaaacagttcaggacgtgctgctcctggacccccgctggctctgcacaaacgtcctggggaagttgctgtccgtggagaccccacgggcgctgcaccactaccggggccgctacaccgtggaggacatccagcgcctggtgcccgacagcgacgtggaggagctgctgcagatcctcgatgccatggacatctgcgcccgggacctgagcagcgggaccatggtggacgtcccagccctgatcaagacagacaacctgcaccgctcctgggctgatgaggaggacgaggtgatggtgtatggtggcgtgcgcatcgtgcccgtggaacacctcacccccttcccatgtggcatctttcacaaggtccaggtgaacctgtgccggtggatccaccagcaaagcacagagggcgacgcggacatccgcctgtgggtgaatggctgcaagctggccaaccgtggggccgagctgctggtgctgctggtcaaccacggccagggcattgaggtccaggtccgcggcctggagacggagaagatcaagtgctgcctgctgctggactcggtgtgcagcaccattgagaacgtcatggccaccacgctgccagggctcctgaccgtgaagcattacctgagcccccagcagctgcgggagcaccatgagcccgtcatgatctaccagccacgggacttcttccgggcacagactctgaaggaaacctcactgaccaacaccatgggggggtacaaggaaagcttcagcagcatcatgtgcttcgggtgtcacgacgtctactcacaggccagcctcggcatggacatccatgcatcagacctgaacctcctcactcggaggaaactgagtcgcctgctggacccgcccgaccccctggggaaggactggtgccttctcgccatgaacttaggcctccctgacctcgtggcaaagtacaacaccagtaacggggctcccaaggatttcctccccagccccctccacgccctgctgcgggaatggaccacctaccctgagagcacagtgggcaccctcatgtccaaactgagggagctgggtcgccgggatgccgcagactttttgctgaaggcatcctctgtgttcaaaatcaacctggatggcaatggccaggaggcctatgcctcgagctgcaacagcggcacctcttacaattccattagctctgttgtatcccggtgagggcagcctctggcttgggcagggtctgtttggactgcagaagcaagggggtgatgtagcccatccttccctttggagatgctgagggtgtttcttcctgcacccacagccagggggatgccactcctccctccggcttgacctgtttctctgccgctacctccctccccgtctcattccgttgtctgtggatggtcattgcagtttaagagcagaacagatcttttactttggccgcttgaaaagctagtgtacctcctctcagtgttttggactccatctctcatcctccagtaccttgcttcttactgataattttgctggaattcctaacttttcaatgacattttttttaactactatattgattgtcctttaaaaaagaaaagtgcatatttatccaaaatgtgtatttcttatacgcttttctttgttataccatttcctcagcttatctcttttatatttgtaggagaaactcccatgtatggaatcccactgtatgatttataaacagacaatatgtgagtgccttttgcagaagagggtgtgtttgaaatcatcggagtcagccaggagctgtcaccaaggaaacgctacctctctgtcccttgctgtatgctgatcatcgccagaggtgcttcaccctgagttttgttttgtattgttttctgacagtttttctgttttgtttggcaaggaaaggggagaagggaatcctcctccagggtgattttatgatcagtgttgttgctctaggaagacatttttccgtttgcttttgttccaatgtcaatgtgaacgtccacatgaaacctacacactgtcatgcttcatcattccctctcatctcaggtagaaggttgacacagttgtagggttacagagacctatgtaagaattcagaagacccctgactcatcatttgtggcagtcccttataattggtgcatagcagatggtttccacatttagatcctggtttcataacttcctgtacttgaagtctaaaagcagaaaataaaggaagcaagttttcttccatgattttaaattgtgatcgagttttaaattgataggagggaacatgtcctaattcttctgtcctgagaagcatgtaatgttaatgttatatcatatgtatatatatatatgcactatgtatatacatatatattaatactggtatttttacttaatctataaaatgtcgttaaaaagttgtttgtttttttctttttttataaataaactgttgctcgtt

SEQ ID NO: 125703 - DNA, 5759 bp, Homo sapiens
  Payload ID: 4637
  Gene Symbol: DAPK1
  Gene Name: death-associated protein kinase 1
  Uniprot ID: P53355
  ENST ID: ENST00000472284
  CDS Start-End: 201-4493
agagcgcgccagcgagcccggagcgcggagctgggaggagcagcgagcgccgcgcagaacccgcagcgccggcctggcagggcagctcggaggactggagactgatgcatgagggggctacggaggcgcaggagcggtggtgatggtctgggaagcggagctgaagtgccctgggctttggtgaggcgtgacagtttatcatgaccgtgttcaggcaggaaaacgtggatgattactacgacaccggcgaggaacttggcagtggacagtttgcggttgtgaagaaatgccgtgagaaaagcaccggcctccagtatgccgccaaattcatcaagaaaaggaggactaagtccagccggcggggtgtgagccgcgaggacatcgagcgggaggtcagcatcctgaaggagatccagcaccccaatgtcatcaccctgcacgaggtctatgagaacaagacggacgtcatcctgatcttggaactcgttgcaggtggcgagctgtttgacttcttagctgaaaaggaatctttaactgaagaggaagcaactgaatttctcaaacaaattcttaatggtgtttactacctgcactcccttcaaatcgcccactttgatcttaagcctgagaacataatgcttttggatagaaatgtccccaaacctcggatcaagatcattgactttgggttggcccataaaattgactttggaaatgaatttaaaaacatatttgggactccagagtttgtcgctcctgagatagtcaactatgaacctcttggtcttgaggcagatatgtggagtatcggggtaataacctatatcctcctaagtggggcctccccatttcttggagacactaagcaagaaacgttagcaaatgtatccgctgtcaactacgaatttgaggatgaatacttcagtaataccagtgccctagccaaagatttcataagaagacttctggtcaaggatccaaagaagagaatgacaattcaagatagtttgcagcatccctggatcaagcctaaagatacacaacaggcacttagtagaaaagcatcagcagtaaacatggagaaattcaagaagtttgcagcccggaaaaaatggaaacaatccgttcgcttgatatcactgtgccaaagattatccaggtcattcctgtccagaagtaacatgagtgttgccagaagcgatgatactctggatgaggaagactcctttgtgatgaaagccatcatccatgccatcaacgatgacaatgtcccaggcctgcagcaccttctgggctcattatccaactatgatgttaaccaacccaacaagcacgggacacctccattactcattgctgctggctgtgggaatattcaaatactacagttgctcattaaaagaggctcgagaatcgatgtccaggataagggcgggtccaatgccgtctactgggctgctcggcatggccacgtcgataccttgaaatttctcagtgagaacaaatgccctttggatgtgaaagacaagtctggagagatggccctccacgtggcagctcgctatggccatgctgacgtggctcagttactgtgcagcttcggctcaaatcccaatatccaggacaaggaagaagaaacccccctgcactgtgctgcttggcacggctattactctgtggccaaagccctttgtgaagccggctgtaacgtgaacatcaagaaccgagaaggagagacgcccctcctgacagcctctgccaggggctaccacgacatcgtggagtgtctggccgaacatggagccgaccttaatgcttgcgacaaggacggacacattgcccttcatctggctgtaagacggtgtcagatggaggtaatcaagactctcctcagccaagggtgtttcgtcgattatcaagacaggcacggcaatactcccctccatgtggcatgtaaagatggcaacatgcctatcgtggtggccctctgtgaagcaaactgcaatttggacatctccaacaagtatgggcgaacgcctctgcaccttgcggccaacaacggaatcctagacgtggtccggtatctctgtctgatgggagccagcgttgaggcgctgaccacggacggaaagacggcagaagatcttgctagatcggaacagcacgagcacgtagcaggtctccttgcaagacttcgaaaggatacgcaccgaggactcttcatccagcagctccgacccacacagaacctgcagccaagaattaagctcaagctgtttggccactcgggatccgggaaaaccacccttgtagaatctctcaagtgtgggctgctgaggagctttttcagaaggcgtcggcccagactgtcttccaccaactccagcaggttcccaccttcacccctggcttctaagcccacagtctcagtgagcatcaacaacctgtacccaggctgcgagaacgtgagtgtgaggagccgcagcatgatgttcgagccgggtcttaccaaagggatgctggaggtgtttgtggccccgacccaccacccgcactgctcggccgatgaccagtccaccaaggccatcgacatccagaacgcttatttgaatggagttggcgatttcagcgtgtgggagttctctggaaatcctgtgtatttctgctgttatgactattttgctgcaaatgatcccacgtcaatccatgttgttgtctttagtctagaagagccctatgagatccagctgaaccaagtgattttctggctcagtttcctgaagtcccttgtcccagttgaagaacccatagccttcggtggcaagctgaagaacccactccaagttgtcctggtggccacccacgctgacatcatgaatgttcctcgaccggctggaggcgagtttggatatgacaaagacacatcgttgctgaaagagattaggaacaggtttggaaatgatcttcacatttcaaataagctgtttgttctggatgctggggcttctgggtcaaaggacatgaaggtacttcgaaatcatctgcaagaaatacgaagccagattgtttcggtctgtcctcccatgactcacctgtgtgagaaaatcatctccacgctgccttcctggaggaagctcaatggacccaaccagctgatgtcgctgcagcagtttgtgtacgacgtgcaggaccagctgaaccccctggccagcgaggaggacctcaggcgcattgctcagcagctccacagcacaggcgagatcaacatcatgcaaagtgaaacagttcaggacgtgctgctcctggacccccgctggctctgcacaaacgtcctggggaagttgctgtccgtggagaccccacgggcgctgcaccactaccggggccgctacaccgtggaggacatccagcgcctggtgcccgacagcgacgtggaggagctgctgcagatcctcgatgccatggacatctgcgcccgggacctgagcagcgggaccatggtggacgtcccagccctgatcaagacagacaacctgcaccgctcctgggctgatgaggaggacgaggtgatggtgtatggtggcgtgcgcatcgtgcccgtggaacacctcacccccttcccatgtggcatctttcacaaggtccaggtgaacctgtgccggtggatccaccagcaaagcacagagggcgacgcggacatccgcctgtgggtgaatggctgcaagctggccaaccgtggggccgagctgctggtgctgctggtcaaccacggccagggcattgaggtccaggtccgcggcctggagacggagaagatcaagtgctgcctgctgctggactcggtgtgcagcaccattgagaacgtcatggccaccacgctgccagggctcctgaccgtgaagcattacctgagcccccagcagctgcgggagcaccatgagcccgtcatgatctaccagccacgggacttcttccgggcacagactctgaaggaaacctcactgaccaacaccatgggggggtacaaggaaagcttcagcagcatcatgtgcttcgggtgtcacgacgtctactcacaggccagcctcggcatggacatccatgcatcagacctgaacctcctcactcggaggaaactgagtcgcctgctggacccgcccgaccccctggggaaggactggtgccttctcgccatgaacttaggcctccctgacctcgtggcaaagtacaacaccagtaacggggctcccaaggatttcctccccagccccctccacgccctgctgcgggaatggaccacctaccctgagagcacagtgggcaccctcatgtccaaactgagggagctgggtcgccgggatgccgcagactttttgctgaaggcatcctctgtgttcaaaatcaacctggatggcaatggccaggaggcctatgcctcgagctgcaacagcggcacctcttacaattccattagctctgttgtatcccggtgagggcagcctctggcttgggcagggtctgtttggactgcagaagcaagggggtgatgtagcccatccttccctttggagatgctgagggtgtttcttcctgcacccacagccagggggatgccactcctccctccggcttgacctgtttctctgccgctacctccctccccgtctcattccgttgtctgtggatggtcattgcagtttaagagcagaacagatcttttactttggccgcttgaaaagctagtgtacctcctctcagtgttttggactccatctctcatcctccagtaccttgcttcttactgataattttgctggaattcctaacttttcaatgacattttttttaactactatattgattgtcctttaaaaaagaaaagtgcatatttatccaaaatgtgtatttcttatacgcttttctttgttataccatttcctcagcttatctcttttatatttgtaggagaaactcccatgtatggaatcccactgtatgatttataaacagacaatatgtgagtgccttttgcagaagagggtgtgtttgaaatcatcggagtcagccaggagctgtcaccaaggaaacgctacctctctgtcccttgctgtatgctgatcatcgccagaggtgcttcaccctgagttttgttttgtattgttttctgacagtttttctgttttgtttggcaaggaaaggggagaagggaatcctcctccagggtgattttatgatcagtgttgttgctctaggaagacatttttccgtttgcttttgttccaatgtcaatgtgaacgtccacatgaaacctacacactgtcatgcttcatcattccctctcatctcaggtagaaggttgacacagttgtagggttacagagacctatgtaagaattcagaagacccctgactcatcatttgtggcagtcccttataattggtgcatagcagatggtttccacatttagatcctggtttcataacttcctgtacttgaagtctaaaagcagaaaataaaggaagcaagttttcttccatgattttaaattgtgatcgagttttaaattgataggagggaacatgtcctaattcttctgtcctgagaagcatgtaatgttaatgttatatcatatgtatatatatatatgcactatgtatatacatatatattaatactggtatttttacttaatctataaaatgtcgttaaaaagttgtttgtttttttctttttttataaataaactgttgctcgttgc

SEQ ID NO: 125704 - DNA, 4334 bp, Homo sapiens
  Payload ID: 4637
  Gene Symbol: DAPK1
  Gene Name: death-associated protein kinase 1
  ENST ID: ENST00000489291
  CDS Start-End: 73-639
caggagcggtggtgatggtctgggaagcggagctgaagtgccctgggctttggtgaggcgtgacagtttatcatgaccgtgttcaggcaggaaaacgtggatgattactacgacaccggcgaggaacttggcagtggacagtttgcggttgtgaagaaatgccgtgagaaaagcaccggcctccagtatgccgccaaattcatcaagaaaaggaggactaagtccagccggcggggtgtgagccgcgaggacatcgagcgggaggtcagcatcctgaaggagatccagcaccccaatgtcatcaccctgcacgaggtctatgagaacaagacggacgtcatcctgatcttggaactcgttgcaggtggcgagctgtttgacttcttagctgaaaaggaatctttaactgaagaggaagcaactgaatttctcaaacaaattcttaatggtgtttactacctgcactcccttcaaatcgcccactttgatcttaagcctgagaacataatgcttttggatagaaatgtccccaaacctcggatcaagatcattgactttgggttggcccataaaattgactttggaaatgaatttaaaaacatatttgggactccagagtttgtcggagtatcggggtaataacctatatcctcctaagtggggcctccccatttcttggagacactaagcaagaaacgttagcaaatgtatccgctgtcaactacgaatttgaggatgaatacttcagtaataccagtgccctagccaaagatttcataagaagacttctggtcaaggatccaaagaagagaatgacaattcaagatagtttgcagcatccctggatcaagcctaaagatacacaacaggcacttagtagaaaagcatcagcagtaaacatggagaaattcaagaagtttgcagcccggaaaaaatggaaacaatccgttcgcttgatatcactgtgccaaagattatccaggtcattcctgtccagaagtaacatgagtgttgccagaagcgatgatactctggatgaggaagactcctttgtgatgaaagccatcatccatgccatcaacgatgacaatgtcccaggcctgcagcaccttctgggctcattatccaactatgatgttaaccaacccaacaagcacgggacacctccattactcattgctgctggctgtgggaatattcaaatactacagttgctcattaaaagaggctcgagaatcgatgtccaggataagggcgggtccaatgccgtctactgggctgctcggcatggccacgtcgataccttgaaatttctcagtgagaacaaatgccctttggatgtgaaagacaagtctggagagatggccctccacgtggcagctcgctatggccatgctgacgtggctcagttactgtgcagcttcggctcaaatcccaatatccaggacaaggaagaagaaacccccctgcactgtgctgcttggcacggctattactctgtggccaaagccctttgtgaagccggctgtaacgtgaacatcaagaaccgagaaggagagacgcccctcctgacagcctctgccaggggctaccacgacatcgtggagtgtctggccgaacatggagccgaccttaatgcttgcgacaaggacggacacattgcccttcatctggctgtaagacggtgtcagatggaggtaatcaagactctcctcagccaagggtgtttcgtcgattatcaagacaggcacggcaatactcccctccatgtggcatgtaaagatggcaacatgcctatcgtggtggccctctgtgaagcaaactgcaatttggacatctccaacaagtatgggcgaacgcctctgcaccttgcggccaacaacggaatcctagacgtggtccggtatctctgtctgatgggagccagcgttgaggcgctgaccacggacggaaagacggcagaagatcttgctagatcggaacagcacgagcacgtagcaggtctccttgcaagacttcgaaaggatacgcaccgaggactcttcatccagcagctccgacccacacagaacctgcagccaagaattaagctcaagctgtttggccactcgggatccgggaaaaccacccttgtagaatctctcaagtgtgggctgctgaggagctttttcagaaggcgtcggcccagactgtcttccaccaactccagcaggttcccaccttcacccctggcttctaagcccacagtctcagtgagcatcaacaacctgtacccaggctgcgagaacgtgagtgtgaggagccgcagcatgatgttcgagccgggtcttaccaaagggatgctggaggtgtttgtggccccgacccaccacccgcactgctcggccgatgaccagtccaccaaggccatcgacatccagaacgcttatttgaatggagttggcgatttcagcgtgtgggagttctctggaaatcctgtgtatttctgctgttatgactattttgctgcaaatgatcccacgtcaatccatgttgttgtctttagtctagaagagccctatgagatccagctgaaccaagtgattttctggctcagtttcctgaagtcccttgtcccagttgaagaacccatagccttcggtggcaagctgaagaacccactccaagttgtcctggtggccacccacgctgacatcatgaatgttcctcgaccggctggaggcgagtttggatatgacaaagacacatcgttgctgaaagagattaggaacaggtttggaaatgatcttcacatttcaaataagctgtttgttctggatgctggggcttctgggtcaaaggacatgaaggtacttcgaaatcatctgcaagaaatacgaagccagattgtttcggtctgtcctcccatgactcacctgtgtgagaaaatcatctccacgctgccttcctggaggaagctcaatggacccaaccagctgatgtcgctgcagcagtttgtgtacgacgtgcaggaccagctgaaccccctggccagcgaggaggacctcaggcgcattgctcagcagctccacagcacaggcgagatcaacatcatgcaaagtgaaacagttcaggacgtgctgctcctggacccccgctggctctgcacaaacgtcctggggaagttgctgtccgtggagaccccacgggcgctgcaccactaccggggccgctacaccgtggaggacatccagcgcctggtgcccgacagcgacgtggaggagctgctgcagatcctcgatgccatggacatctgcgcccgggacctgagcagcgggaccatggtggacgtcccagccctgatcaagacagacaacctgcaccgctcctgggctgatgaggaggacgaggtgatggtgtatggtggcgtgcgcatcgtgcccgtggaacacctcacccccttcccatgtggcatctttcacaaggtccaggtgaacctgtgccggtggatccaccagcaaagcacagagggcgacgcggacatccgcctgtgggtgaatggctgcaagctggccaaccgtggggccgagctgctggtgctgctggtcaaccacggccagggcattgaggtccaggtccgcggcctggagacggagaagatcaagtgctgcctgctgctggactcggtgtgcagcaccattgagaacgtcatggccaccacgctgccagggctcctgaccgtgaagcattacctgagcccccagcagctgcgggagcaccatgagcccgtcatgatctaccagccacgggacttcttccgggcacagactctgaaggaaacctcactgaccaacaccatgggggggtacaaggaaagcttcagcagcatcatgtgcttcgggtgtcacgacgtctactcacaggccagcctcggcatggacatccatgcatcagacctgaacctcctcactcggaggaaactgagtcgcctgctggacccgcccgaccccctggggaaggactggtgccttctcgccatgaacttaggcctccctgacctcgtggcaaagtacaacaccagtaacggggctcccaaggatttcctccccagccccctccacgccctgctgcgggaatggaccacctaccctgagagcacagtgggcaccctcatgtccaaactgagggagctgggtcgccgggatgccgcagactttttgctgaaggcatcctctgtgttcaaaatcaacctggatggcaatggccaggaggcctatgcctcgagctgcaacagcggcacctcttacaattccattagctctgttgtatcccggtgagggcagcctctggcttgg

SEQ ID NO: 125705 - DNA, 5899 bp, Homo sapiens
  Payload ID: 4637
  Gene Symbol: DAPK1
  Gene Name: death-associated protein kinase 1
  Uniprot ID: P53355
  ENST ID: ENST00000469640
  CDS Start-End: 536-4630
agagcgcgccagcgagcccggagcgcggagctgggaggagcagcgagcgccgcgcagaacccgcagcgccggcctggcagggcagctcggaggtgggtgggccgcgccgccagcccgcttgcagggtccccattggccgcctgccggccgccctccgcccaaaaggcggcaaggagccgagaggctgcttcggagtgtgaggaggacagccggaccgagccaacgccggggactttgttccctccgcggaggggactcggcaactcgcagcggcagggtctggggccggcgcctgggagggatctgcgccccccactcactccctagctgtgttcccgccgccgccccggctagtctccggcgctggcgcctatggtcggcctccgacagcgctccggagggaccgggggagctcccaggcgcccgggactggagactgatgcatgagggggctacggaggcgcaggagcggtggtgatggtctgggaagcggagctgaagtgccctgggctttggtgaggcgtgacagtttatcatgaccgtgttcaggcaggaaaacgtggatgattactacgacaccggcgaggaacttggcagtggacagtttgcggttgtgaagaaatgccgtgagaaaagcaccggcctccagtatgccgccaaattcatcaagaaaaggaggactaagtccagccggcggggtgtgagccgcgaggacatcgagcgggaggtcagcatcctgaaggagatccagcaccccaatgtcatcaccctgcacgaggtctatgagaacaagacggacgtcatcctgatcttggaactcgttgcaggtggcgagctgtttgacttcttagctgaaaaggaatctttaactgaagaggaagcaactgaatttctcaaacaaattcttaatggtgtttactacctgcactcccttcaaatcgcccactttgatcttaagcctgagaacataatgcttttggatagaaatgtccccaaacctcggatcaagatcattgactttgggttggcccataaaattgactttggaaatgaatttaaaaacatatttgggactccagagtttgtcgctcctgagatagtcaactatgaacctcttggtcttgaggcagatatgtggagtatcggggtaataacctatatcctcctaagtggggcctccccatttcttggagacactaagcaagaaacgttagcaaatgtatccgctgtcaactacgaatttgaggatgaatacttcagtaataccagtgccctagccaaagatttcataagaagacttctggtcaaggatccaaagaagagaatgacaattcaagatagtttgcagcatccctggatcaagcctaaagatacacaacaggcacttagtagaaaagcatcagcagtaaacatggagaaattcaagaagtttgcagcccggaaaaaatggaaacaatccgttcgcttgatatcactgtgccaaagattatccaggtcattcctgtccagaagtaacatgagtgttgccagaagcgatgatactctggatgaggaagactcctttgtgatgaaagccatcatccatgccatcaacgatgacaatgtcccaggcctgcagcaccttctgggctcattatccaactatgatgttaaccaacccaacaagcacgggacacctccattactcattgctgctggctgtgggaatattcaaatactacagttgctcattaaaagaggctcgagaatcgatgtccaggataagggcgggtccaatgccgtctactgggctgctcggcatggccacgtcgataccttgaaatttctcagtgagaacaaatgccctttggatgtgaaagacaagtctggagagatggccctccacgtggcagctcgctatggccatgctgacgtggctcagttactgtgcagcttcggctcaaatcccaatatccaggacaaggaagaagaaacccccctgcactgtgctgcttggcacggctattactctgtggccaaagccctttgtgaagccggctgtaacgtgaacatcaagaaccgagaaggagagacgcccctcctgacagcctctgccaggggctaccacgacatcgtggagtgtctggccgaacatggagccgaccttaatgcttgcgacaaggacggacacattgcccttcatctggctgtaagacggtgtcagatggaggtaatcaagactctcctcagccaagggtgtttcgtcgattatcaagacaggcacggcaatactcccctccatgtggcatgtaaagatggcaacatgcctatcgtggtggccctctgtgaagcaaactgcaatttggacatctccaacaagtatgggcgaacgcctctgcaccttgcggccaacaacggaatcctagacgtggtccggtatctctgtctgatgggagccagcgttgaggcgctgaccacggacggaaagacggcagaagatcttgctagatcggaacagcacgagcacgtagcaggtctccttgcaagacttcgaaaggatacgcaccgaggactcttcatccagcagctccgacccacacagaacctgcagccaagaattaagctcaagctgtttggccactcgggatccgggaaaaccacccttgtagaatctctcaagtgtgggctgctgaggagctttttcagaaggcgtcggcccagactgtcttccaccaactccagcaggttcccaccttcacccctggcttctaagcccacagtctcagtgagcatcaacaacctgtacccaggctgcgagaacgtgagtgtgaggagccgcagcatgatgttcgagccgggtcttaccaaagggatgctggaggtgtttgtggccccgacccaccacccgcactgctcggccgatgaccagtccaccaaggccatcgacatccagaacgcttatttgaatgccttcggtggcaagctgaagaacccactccaagttgtcctggtggccacccacgctgacatcatgaatgttcctcgaccggctggaggcgagtttggatatgacaaagacacatcgttgctgaaagagattaggaacaggtttggaaatgatcttcacatttcaaataagctgtttgttctggatgctggggcttctgggtcaaaggacatgaaggtacttcgaaatcatctgcaagaaatacgaagccagattgtttcggtctgtcctcccatgactcacctgtgtgagaaaatcatctccacgctgccttcctggaggaagctcaatggacccaaccagctgatgtcgctgcagcagtttgtgtacgacgtgcaggaccagctgaaccccctggccagcgaggaggacctcaggcgcattgctcagcagctccacagcacaggcgagatcaacatcatgcaaagtgaaacagttcaggacgtgctgctcctggacccccgctggctctgcacaaacgtcctggggaagttgctgtccgtggagaccccacgggcgctgcaccactaccggggccgctacaccgtggaggacatccagcgcctggtgcccgacagcgacgtggaggagctgctgcagatcctcgatgccatggacatctgcgcccgggacctgagcagcgggaccatggtggacgtcccagccctgatcaagacagacaacctgcaccgctcctgggctgatgaggaggacgaggtgatggtgtatggtggcgtgcgcatcgtgcccgtggaacacctcacccccttcccatgtggcatctttcacaaggtccaggtgaacctgtgccggtggatccaccagcaaagcacagagggcgacgcggacatccgcctgtgggtgaatggctgcaagctggccaaccgtggggccgagctgctggtgctgctggtcaaccacggccagggcattgaggtccaggtccgcggcctggagacggagaagatcaagtgctgcctgctgctggactcggtgtgcagcaccattgagaacgtcatggccaccacgctgccagggctcctgaccgtgaagcattacctgagcccccagcagctgcgggagcaccatgagcccgtcatgatctaccagccacgggacttcttccgggcacagactctgaaggaaacctcactgaccaacaccatgggggggtacaaggaaagcttcagcagcatcatgtgcttcgggtgtcacgacgtctactcacaggccagcctcggcatggacatccatgcatcagacctgaacctcctcactcggaggaaactgagtcgcctgctggacccgcccgaccccctggggaaggactggtgccttctcgccatgaacttaggcctccctgacctcgtggcaaagtacaacaccagtaacggggctcccaaggatttcctccccagccccctccacgccctgctgcgggaatggaccacctaccctgagagcacagtgggcaccctcatgtccaaactgagggagctgggtcgccgggatgccgcagactttttgctgaaggcatcctctgtgttcaaaatcaacctggatggcaatggccaggaggcctatgcctcgagctgcaacagcggcacctcttacaattccattagctctgttgtatcccggtgagggcagcctctggcttgggcagggtctgtttggactgcagaagcaagggggtgatgtagcccatccttccctttggagatgctgagggtgtttcttcctgcacccacagccagggggatgccactcctccctccggcttgacctgtttctctgccgctacctccctccccgtctcattccgttgtctgtggatggtcattgcagtttaagagcagaacagatcttttactttggccgcttgaaaagctagtgtacctcctctcagtgttttggactccatctctcatcctccagtaccttgcttcttactgataattttgctggaattcctaacttttcaatgacattttttttaactactatattgattgtcctttaaaaaagaaaagtgcatatttatccaaaatgtgtatttcttatacgcttttctttgttataccatttcctcagcttatctcttttatatttgtaggagaaactcccatgtatggaatcccactgtatgatttataaacagacaatatgtgagtgccttttgcagaagagggtgtgtttgaaatcatcggagtcagccaggagctgtcaccaaggaaacgctacctctctgtcccttgctgtatgctgatcatcgccagaggtgcttcaccctgagttttgttttgtattgttttctgacagtttttctgttttgtttggcaaggaaaggggagaagggaatcctcctccagggtgattttatgatcagtgttgttgctctaggaagacatttttccgtttgcttttgttccaatgtcaatgtgaacgtccacatgaaacctacacactgtcatgcttcatcattccctctcatctcaggtagaaggttgacacagttgtagggttacagagacctatgtaagaattcagaagacccctgactcatcatttgtggcagtcccttataattggtgcatagcagatggtttccacatttagatcctggtttcataacttcctgtacttgaagtctaaaagcagaaaataaaggaagcaagttttcttccatgattttaaattgtgatcgagttttaaattgataggagggaacatgtcctaattcttctgtcctgagaagcatgtaatgttaatgttatatcatatgtatatatatatatgcactatgtatatacatatatattaatactggtatttttacttaatctataaaatgtcgttaaaaagttgtttgtttttttctttttttataaataaactgttgctcgttgcatt

SEQ ID NO: 125706 - DNA, 4186 bp, Homo sapiens
  Payload ID: 4637
  Gene Symbol: DAPK1
  Gene Name: death-associated protein kinase 1
  Uniprot ID: P53355
  ENST ID: ENST00000491893
  CDS Start-End: 74-4168
gcaggagcggtggtgatggtctgggaagcggagctgaagtgccctgggctttggtgaggcgtgacagtttatcatgaccgtgttcaggcaggaaaacgtggatgattactacgacaccggcgaggaacttggcagtggacagtttgcggttgtgaagaaatgccgtgagaaaagcaccggcctccagtatgccgccaaattcatcaagaaaaggaggactaagtccagccggcggggtgtgagccgcgaggacatcgagcgggaggtcagcatcctgaaggagatccagcaccccaatgtcatcaccctgcacgaggtctatgagaacaagacggacgtcatcctgatcttggaactcgttgcaggtggcgagctgtttgacttcttagctgaaaaggaatctttaactgaagaggaagcaactgaatttctcaaacaaattcttaatggtgtttactacctgcactcccttcaaatcgcccactttgatcttaagcctgagaacataatgcttttggatagaaatgtccccaaacctcggatcaagatcattgactttgggttggcccataaaattgactttggaaatgaatttaaaaacatatttgggactccagagtttgtcgctcctgagatagtcaactatgaacctcttggtcttgaggcagatatgtggagtatcggggtaataacctatatcctcctaagtggggcctccccatttcttggagacactaagcaagaaacgttagcaaatgtatccgctgtcaactacgaatttgaggatgaatacttcagtaataccagtgccctagccaaagatttcataagaagacttctggtcaaggatccaaagaagagaatgacaattcaagatagtttgcagcatccctggatcaagcctaaagatacacaacaggcacttagtagaaaagcatcagcagtaaacatggagaaattcaagaagtttgcagcccggaaaaaatggaaacaatccgttcgcttgatatcactgtgccaaagattatccaggtcattcctgtccagaagtaacatgagtgttgccagaagcgatgatactctggatgaggaagactcctttgtgatgaaagccatcatccatgccatcaacgatgacaatgtcccaggcctgcagcaccttctgggctcattatccaactatgatgttaaccaacccaacaagcacgggacacctccattactcattgctgctggctgtgggaatattcaaatactacagttgctcattaaaagaggctcgagaatcgatgtccaggataagggcgggtccaatgccgtctactgggctgctcggcatggccacgtcgataccttgaaatttctcagtgagaacaaatgccctttggatgtgaaagacaagtctggagagatggccctccacgtggcagctcgctatggccatgctgacgtggctcagttactgtgcagcttcggctcaaatcccaatatccaggacaaggaagaagaaacccccctgcactgtgctgcttggcacggctattactctgtggccaaagccctttgtgaagccggctgtaacgtgaacatcaagaaccgagaaggagagacgcccctcctgacagcctctgccaggggctaccacgacatcgtggagtgtctggccgaacatggagccgaccttaatgcttgcgacaaggacggacacattgcccttcatctggctgtaagacggtgtcagatggaggtaatcaagactctcctcagccaagggtgtttcgtcgattatcaagacaggcacggcaatactcccctccatgtggcatgtaaagatggcaacatgcctatcgtggtggccctctgtgaagcaaactgcaatttggacatctccaacaagtatgggcgaacgcctctgcaccttgcggccaacaacggaatcctagacgtggtccggtatctctgtctgatgggagccagcgttgaggcgctgaccacggacggaaagacggcagaagatcttgctagatcggaacagcacgagcacgtagcaggtctccttgcaagacttcgaaaggatacgcaccgaggactcttcatccagcagctccgacccacacagaacctgcagccaagaattaagctcaagctgtttggccactcgggatccgggaaaaccacccttgtagaatctctcaagtgtgggctgctgaggagctttttcagaaggcgtcggcccagactgtcttccaccaactccagcaggttcccaccttcacccctggcttctaagcccacagtctcagtgagcatcaacaacctgtacccaggctgcgagaacgtgagtgtgaggagccgcagcatgatgttcgagccgggtcttaccaaagggatgctggaggtgtttgtggccccgacccaccacccgcactgctcggccgatgaccagtccaccaaggccatcgacatccagaacgcttatttgaatgccttcggtggcaagctgaagaacccactccaagttgtcctggtggccacccacgctgacatcatgaatgttcctcgaccggctggaggcgagtttggatatgacaaagacacatcgttgctgaaagagattaggaacaggtttggaaatgatcttcacatttcaaataagctgtttgttctggatgctggggcttctgggtcaaaggacatgaaggtacttcgaaatcatctgcaagaaatacgaagccagattgtttcggtctgtcctcccatgactcacctgtgtgagaaaatcatctccacgctgccttcctggaggaagctcaatggacccaaccagctgatgtcgctgcagcagtttgtgtacgacgtgcaggaccagctgaaccccctggccagcgaggaggacctcaggcgcattgctcagcagctccacagcacaggcgagatcaacatcatgcaaagtgaaacagttcaggacgtgctgctcctggacccccgctggctctgcacaaacgtcctggggaagttgctgtccgtggagaccccacgggcgctgcaccactaccggggccgctacaccgtggaggacatccagcgcctggtgcccgacagcgacgtggaggagctgctgcagatcctcgatgccatggacatctgcgcccgggacctgagcagcgggaccatggtggacgtcccagccctgatcaagacagacaacctgcaccgctcctgggctgatgaggaggacgaggtgatggtgtatggtggcgtgcgcatcgtgcccgtggaacacctcacccccttcccatgtggcatctttcacaaggtccaggtgaacctgtgccggtggatccaccagcaaagcacagagggcgacgcggacatccgcctgtgggtgaatggctgcaagctggccaaccgtggggccgagctgctggtgctgctggtcaaccacggccagggcattgaggtccaggtccgcggcctggagacggagaagatcaagtgctgcctgctgctggactcggtgtgcagcaccattgagaacgtcatggccaccacgctgccagggctcctgaccgtgaagcattacctgagcccccagcagctgcgggagcaccatgagcccgtcatgatctaccagccacgggacttcttccgggcacagactctgaaggaaacctcactgaccaacaccatgggggggtacaaggaaagcttcagcagcatcatgtgcttcgggtgtcacgacgtctactcacaggccagcctcggcatggacatccatgcatcagacctgaacctcctcactcggaggaaactgagtcgcctgctggacccgcccgaccccctggggaaggactggtgccttctcgccatgaacttaggcctccctgacctcgtggcaaagtacaacaccagtaacggggctcccaaggatttcctccccagccccctccacgccctgctgcgggaatggaccacctaccctgagagcacagtgggcaccctcatgtccaaactgagggagctgggtcgccgggatgccgcagactttttgctgaaggcatcctctgtgttcaaaatcaacctggatggcaatggccaggaggcctatgcctcgagctgcaacagcggcacctcttacaattccattagctctgttgtatcccggtgagggcagcctctggcttgg

SEQ ID NO: 125707 - DNA, 5772 bp, Homo sapiens
  Payload ID: 4637
  Gene Symbol: DAPK1
  Gene Name: death-associated protein kinase 1
  Uniprot ID: P53355
  ENST ID: ENST00000622514
  CDS Start-End: 211-4503
ggcgcgggggtgccaccgttgccgcaggctggagagagattgctcccagtgaggcgcgtaccgtctgggcgagggcttcattcttccgcggcgtccctggaggactggagactgatgcatgagggggctacggaggcgcaggagcggtggtgatggtctgggaagcggagctgaagtgccctgggctttggtgaggcgtgacagtttatcatgaccgtgttcaggcaggaaaacgtggatgattactacgacaccggcgaggaacttggcagtggacagtttgcggttgtgaagaaatgccgtgagaaaagcaccggcctccagtatgccgccaaattcatcaagaaaaggaggactaagtccagccggcggggtgtgagccgcgaggacatcgagcgggaggtcagcatcctgaaggagatccagcaccccaatgtcatcaccctgcacgaggtctatgagaacaagacggacgtcatcctgatcttggaactcgttgcaggtggcgagctgtttgacttcttagctgaaaaggaatctttaactgaagaggaagcaactgaatttctcaaacaaattcttaatggtgtttactacctgcactcccttcaaatcgcccactttgatcttaagcctgagaacataatgcttttggatagaaatgtccccaaacctcggatcaagatcattgactttgggttggcccataaaattgactttggaaatgaatttaaaaacatatttgggactccagagtttgtcgctcctgagatagtcaactatgaacctcttggtcttgaggcagatatgtggagtatcggggtaataacctatatcctcctaagtggggcctccccatttcttggagacactaagcaagaaacgttagcaaatgtatccgctgtcaactacgaatttgaggatgaatacttcagtaataccagtgccctagccaaagatttcataagaagacttctggtcaaggatccaaagaagagaatgacaattcaagatagtttgcagcatccctggatcaagcctaaagatacacaacaggcacttagtagaaaagcatcagcagtaaacatggagaaattcaagaagtttgcagcccggaaaaaatggaaacaatccgttcgcttgatatcactgtgccaaagattatccaggtcattcctgtccagaagtaacatgagtgttgccagaagcgatgatactctggatgaggaagactcctttgtgatgaaagccatcatccatgccatcaacgatgacaatgtcccaggcctgcagcaccttctgggctcattatccaactatgatgttaaccaacccaacaagcacgggacacctccattactcattgctgctggctgtgggaatattcaaatactacagttgctcattaaaagaggctcgagaatcgatgtccaggataagggcgggtccaatgccgtctactgggctgctcggcatggccacgtcgataccttgaaatttctcagtgagaacaaatgccctttggatgtgaaagacaagtctggagagatggccctccacgtggcagctcgctatggccatgctgacgtggctcagttactgtgcagcttcggctcaaatcccaatatccaggacaaggaagaagaaacccccctgcactgtgctgcttggcacggctattactctgtggccaaagccctttgtgaagccggctgtaacgtgaacatcaagaaccgagaaggagagacgcccctcctgacagcctctgccaggggctaccacgacatcgtggagtgtctggccgaacatggagccgaccttaatgcttgcgacaaggacggacacattgcccttcatctggctgtaagacggtgtcagatggaggtaatcaagactctcctcagccaagggtgtttcgtcgattatcaagacaggcacggcaatactcccctccatgtggcatgtaaagatggcaacatgcctatcgtggtggccctctgtgaagcaaactgcaatttggacatctccaacaagtatgggcgaacgcctctgcaccttgcggccaacaacggaatcctagacgtggtccggtatctctgtctgatgggagccagcgttgaggcgctgaccacggacggaaagacggcagaagatcttgctagatcggaacagcacgagcacgtagcaggtctccttgcaagacttcgaaaggatacgcaccgaggactcttcatccagcagctccgacccacacagaacctgcagccaagaattaagctcaagctgtttggccactcgggatccgggaaaaccacccttgtagaatctctcaagtgtgggctgctgaggagctttttcagaaggcgtcggcccagactgtcttccaccaactccagcaggttcccaccttcacccctggcttctaagcccacagtctcagtgagcatcaacaacctgtacccaggctgcgagaacgtgagtgtgaggagccgcagcatgatgttcgagccgggtcttaccaaagggatgctggaggtgtttgtggccccgacccaccacccgcactgctcggccgatgaccagtccaccaaggccatcgacatccagaacgcttatttgaatggagttggcgatttcagcgtgtgggagttctctggaaatcctgtgtatttctgctgttatgactattttgctgcaaatgatcccacgtcaatccatgttgttgtctttagtctagaagagccctatgagatccagctgaaccaagtgattttctggctcagtttcctgaagtcccttgtcccagttgaagaacccatagccttcggtggcaagctgaagaacccactccaagttgtcctggtggccacccacgctgacatcatgaatgttcctcgaccggctggaggcgagtttggatatgacaaagacacatcgttgctgaaagagattaggaacaggtttggaaatgatcttcacatttcaaataagctgtttgttctggatgctggggcttctgggtcaaaggacatgaaggtacttcgaaatcatctgcaagaaatacgaagccagattgtttcggtctgtcctcccatgactcacctgtgtgagaaaatcatctccacgctgccttcctggaggaagctcaatggacccaaccagctgatgtcgctgcagcagtttgtgtacgacgtgcaggaccagctgaaccccctggccagcgaggaggacctcaggcgcattgctcagcagctccacagcacaggcgagatcaacatcatgcaaagtgaaacagttcaggacgtgctgctcctggacccccgctggctctgcacaaacgtcctggggaagttgctgtccgtggagaccccacgggcgctgcaccactaccggggccgctacaccgtggaggacatccagcgcctggtgcccgacagcgacgtggaggagctgctgcagatcctcgatgccatggacatctgcgcccgggacctgagcagcgggaccatggtggacgtcccagccctgatcaagacagacaacctgcaccgctcctgggctgatgaggaggacgaggtgatggtgtatggtggcgtgcgcatcgtgcccgtggaacacctcacccccttcccatgtggcatctttcacaaggtccaggtgaacctgtgccggtggatccaccagcaaagcacagagggcgacgcggacatccgcctgtgggtgaatggctgcaagctggccaaccgtggggccgagctgctggtgctgctggtcaaccacggccagggcattgaggtccaggtccgcggcctggagacggagaagatcaagtgctgcctgctgctggactcggtgtgcagcaccattgagaacgtcatggccaccacgctgccagggctcctgaccgtgaagcattacctgagcccccagcagctgcgggagcaccatgagcccgtcatgatctaccagccacgggacttcttccgggcacagactctgaaggaaacctcactgaccaacaccatgggggggtacaaggaaagcttcagcagcatcatgtgcttcgggtgtcacgacgtctactcacaggccagcctcggcatggacatccatgcatcagacctgaacctcctcactcggaggaaactgagtcgcctgctggacccgcccgaccccctggggaaggactggtgccttctcgccatgaacttaggcctccctgacctcgtggcaaagtacaacaccagtaacggggctcccaaggatttcctccccagccccctccacgccctgctgcgggaatggaccacctaccctgagagcacagtgggcaccctcatgtccaaactgagggagctgggtcgccgggatgccgcagactttttgctgaaggcatcctctgtgttcaaaatcaacctggatggcaatggccaggaggcctatgcctcgagctgcaacagcggcacctcttacaattccattagctctgttgtatcccggtgagggcagcctctggcttgggcagggtctgtttggactgcagaagcaagggggtgatgtagcccatccttccctttggagatgctgagggtgtttcttcctgcacccacagccagggggatgccactcctccctccggcttgacctgtttctctgccgctacctccctccccgtctcattccgttgtctgtggatggtcattgcagtttaagagcagaacagatcttttactttggccgcttgaaaagctagtgtacctcctctcagtgttttggactccatctctcatcctccagtaccttgcttcttactgataattttgctggaattcctaacttttcaatgacattttttttaactactatattgattgtcctttaaaaaagaaaagtgcatatttatccaaaatgtgtatttcttatacgcttttctttgttataccatttcctcagcttatctcttttatatttgtaggagaaactcccatgtatggaatcccactgtatgatttataaacagacaatatgtgagtgccttttgcagaagagggtgtgtttgaaatcatcggagtcagccaggagctgtcaccaaggaaacgctacctctctgtcccttgctgtatgctgatcatcgccagaggtgcttcaccctgagttttgttttgtattgttttctgacagtttttctgttttgtttggcaaggaaaggggagaagggaatcctcctccagggtgattttatgatcagtgttgttgctctaggaagacatttttccgtttgcttttgttccaatgtcaatgtgaacgtccacatgaaacctacacactgtcatgcttcatcattccctctcatctcaggtagaaggttgacacagttgtagggttacagagacctatgtaagaattcagaagacccctgactcatcatttgtggcagtcccttataattggtgcatagcagatggtttccacatttagatcctggtttcataacttcctgtacttgaagtctaaaagcagaaaataaaggaagcaagttttcttccatgattttaaattgtgatcgagttttaaattgataggagggaacatgtcctaattcttctgtcctgagaagcatgtaatgttaatgttatatcatatgtatatatatatatgcactatgtatatacatatatattaatactggtatttttacttaatctataaaatgtcgttaaaaagttgtttgtttttttctttttttataaataaactgttgctcgttgcatt

SEQ ID NO: 125708 - DNA, 2603 bp, Homo sapiens
  Payload ID: 4638
  Gene Symbol: DAPK2
  Gene Name: death-associated protein kinase 2
  Uniprot ID: Q9UIK4
  ENST ID: ENST00000261891
  CDS Start-End: 7-1119
gattgtatgttccaggcctcaatgaggagtccaaacatggagccattcaagcagcagaaggtggaggacttttatgacatcggagaggagctggggagtggccagtttgccatcgtgaagaagtgccgggagaagagcacggggcttgagtatgcagccaagttcatcaagaagcggcagagccgggcgagccggcgcggtgtgagccgggaggagatcgagcgggaggtgagcatcctgcggcaggtgctgcaccacaatgtcatcacgctgcacgacgtctatgagaaccgcaccgacgtggtgctcatccttgagctagtgtctggaggagagctcttcgatttcctggcccagaaggagtcactgagtgaggaggaggccaccagcttcattaagcagatcctggatggggtgaactaccttcacacaaagaaaattgctcactttgatctcaagccagaaaacattatgttgttagacaagaatattcccattccacacatcaagctgattgactttggtctggctcacgaaatagaagatggagttgaatttaagaatatttttgggacgccggaatttgttgctccagaaattgtgaactacgagcccctgggtctggaggctgacatgtggagcataggcgtcatcacctacatcctcttaagtggagcatcccctttcctgggagacacgaagcaggaaacactggcaaatatcacagcagtgagttacgactttgatgaggaattcttcagccagacgagcgagctggccaaggactttattcggaagcttctggttaaagagacccggaaacggctcacaatccaagaggctctcagacacccctggatcacgccggtggacaaccagcaagccatggtgcgcagggagtctgtggtcaatctggagaacttcaggaagcagtatgtccgcaggcggtggaagctttccttcagcatcgtgtccctgtgcaaccacctcacccgctcgctgatgaagaaggtgcacctgaggccggatgaggacctgaggaactgtgagagtgacactgaggaggacatcgccaggaggaaagccctccacccacggaggaggagcagcacctcctaactggcctgacctgcagtggccgccagggaggtctgggcccagcggggctcccttctgtgcagacttttggacccagctcagcaccagcacccgggcgtcctgagcactttgcaagagagatgggcccaaggaattcagaagagcttgcaggcaagccaggagaccctgggagctgtggctgtcttctgtggaggaggctccagcattcccaaagctcttaattctccataaaatgggctttcctctgtctgccatcctcagagtctggggtgggagtgtggacttaggaaaacaatataaaggacatcctcatcatcacggggtgaaggtcagactaaggcagccttcttcacaggctgagggggttcagaaccagcctggccaaaaattacaccagagagacagagtcctccccattgggaacagggtgattgaggaaagtgaaccttgggtgtgagggaccaatcctgtgacctcccagaaccatggaagccaggacgtcaggctgaccaacacctcagaccttctgaagcagcccattgctggcccgccatgttgtaattttgctcatttttattaaacttctggtttacctgatgcttggcttcttttagggctacccccatctcatttcctttagcccgtgtgcctgtaactctgagggggggcacccagtggggtgctgagtgggcagaatctcagaaggtcctcctgaaccgtccgcgcaggcctgcagtgggcctgcctcctccttgcttccctaacaggaaggtgtccagttcaagagaacccacccagagactgggagtggtggctcacgcctataatccctgcgctttggcagtccgaggcaggggaattgcttgaactcaggagttggagaccagcctgggcaacatggcaaaacgcagtctgtacaaaaaatacaaaaaattagccaggtgtaggggtaggcacctggcatcccagctactccaggggctgaggtgacagcattgcttaagcccagaaggtcgaggctgcagtgagctgagatcacgccactgcactccagtctgggtgacagagagagaccatatccaaaaaaaaaaaaagttgccagagacgagtatgcccatgctccctctacctcactgccaccactcctgctgttaggagctgagtgtgtctccctaaaatttctatgttgaagtcttaacccttggtaccacagaatatcactgtatttggagatggggtctttagaaaggcacttaaattaaaatgagctcactgatatgggccccgatgcaatataattggtgtccttataagaaggggaggttaggacacgcaggaaagaccacatgaaggcccaggagtgggagggggaatagccatcgacaaactaagggggcctcagaggaaaccaaccctgctgacacctcaatcttagactctggcctcaaaaattgtaagaaaataaacttctgtcttttaagcca

SEQ ID NO: 125709 - DNA, 1741 bp, Homo sapiens
  Payload ID: 4638
  Gene Symbol: DAPK2
  Gene Name: death-associated protein kinase 2
  Uniprot ID: Q9UIK4
  ENST ID: ENST00000457488
  CDS Start-End: 32-1144
gaccgcggcagctcagcctcccgccgattgtatgttccaggcctcaatgaggagtccaaacatggagccattcaagcagcagaaggtggaggacttttatgacatcggagaggagctggggagtggccagtttgccatcgtgaagaagtgccgggagaagagcacggggcttgagtatgcagccaagttcatcaagaagcggcagagccgggcgagccggcgcggtgtgagccgggaggagatcgagcgggaggtgagcatcctgcggcaggtgctgcaccacaatgtcatcacgctgcacgacgtctatgagaaccgcaccgacgtggtgctcatccttgagctagtgtctggaggagagctcttcgatttcctggcccagaaggagtcactgagtgaggaggaggccaccagcttcattaagcagatcctggatggggtgaactaccttcacacaaagaaaattgctcactttgatctcaagccagaaaacattatgttgttagacaagaatattcccattccacacatcaagctgattgactttggtctggctcacgaaatagaagatggagttgaatttaagaatatttttgggacgccggaatttgttgctccagaaattgtgaactacgagcccctgggtctggaggctgacatgtggagcataggcgtcatcacctacatcctcttaagtggagcatcccctttcctgggagacacgaagcaggaaacactggcaaatatcacagcagtgagttacgactttgatgaggaattcttcagccagacgagcgagctggccaaggactttattcggaagcttctggttaaagagacccggaaacggctcacaatccaagaggctctcagacacccctggatcacgccggtggacaaccagcaagccatggtgcgcagggagtctgtggtcaatctggagaacttcaggaagcagtatgtccgcaggcggtggaagctttccttcagcatcgtgtccctgtgcaaccacctcacccgctcgctgatgaagaaggtgcacctgaggccggatgaggacctgaggaactgtgagagtgacactgaggaggacatcgccaggaggaaagccctccacccacggaggaggagcagcacctcctaactggcctgacctgcagtggccgccagggaggtctgggcccagcggggctcccttctgtgcagacttttggacccagctcagcaccagcacccgggcgtcctgagcactttgcaagagagatgggcccaaggaattcagaagagcttgcaggcaagccaggagaccctgggagctgtggctgtcttctgtggaggaggctccagcattcccaaagctcttaattctccataaaatgggctttcctctgtctgccatcctcagagtctggggtgggagtgtggacttaggaaaacaatataaaggacatcctcatcatcacggggtgaaggtcagactaaggcagccttcttcacaggctgagggggttcagaaccagcctggccaaaaattacaccagagagacagagtcctccccattgggaacagggtgattgaggaaagtgaaccttgggtgtgagggaccaatcctgtgacctcccagaaccatggaagccaggacgtcaggctgaccaacacctcagaccttctgaagcagcccattgctggcccgccatgttgtaattttgctcatttttattaaacttctggtttacctga

SEQ ID NO: 125710 - DNA, 724 bp, Homo sapiens
  Payload ID: 4638
  Gene Symbol: DAPK2
  Gene Name: death-associated protein kinase 2
  ENST ID: ENST00000559306
  CDS Start-End: 483-724
gaatccagctgctatgtcacgagaactcaagccaccctgtggagaattccacacggagtgcagctgaggcctcccaacaacaaccagcagcaatttgcaaaccatgtgtctcctacagctactggtgtgttttttgcatattggccttccaacatttcttgttgaattatttcaggctcaccttggtcataatgagtggatctggctttacccagggcttcagcctttagcatttcacatgaggaatatccactgagctgggggtcaagaggcctgacctttaatcttggctctgccccaggcaagtgtgaacttgggtaagaacactgaggccaggaaatgttgagtgacgtgtccatactcacatagcatggaagaatcagaggccatggggtcaggacctatgggcttaggatataccggaagaggcctgatttccagtcgagcatttgccaaaaatcagcagcgtgatttgggattgtatgttccaggcctcaatgaggagtccaaacatggagccattcaagcagcagaaggtggaggacttttatgacatcggagaggagctggggagtggccagtttgccatcgtgaagaagtgccgggagaagagcacggggcttgagtatgcagccaagttcatcaagaagcggcagagccgggcgagccggcgcggtgtgagccgggaggagatcgagcgggaggtgagcatcctgcggcaggt

SEQ ID NO: 125711 - DNA, 584 bp, Homo sapiens
  Payload ID: 4638
  Gene Symbol: DAPK2
  Gene Name: death-associated protein kinase 2
  ENST ID: ENST00000558064
  CDS Start-End: 1-147
atgaagaaggtgcacctgaggccggatgaggacctgacagagtttcactcttattgcttaggttggagtgcaatggcgcgatctcggctcaccgcaacctctgcctcctggcttcaagcgattctcctgcgtcagcctcctgagtagctgggattacagtcatgcgccaccacacccagctaattttgtatttttagtagagatggggtttctccatgttggtcaggctggtctcgaactcccgacttcaggtgatctgcccgcctcggcctcccaaaatgctgggattacaggcataagccaccatgccaggccaataatgacatattcttaaagcctggcatgtaagtgctcagtaagcgttagcaattgttgttgtttaaaaccttcctgtaggctggcagtagtggttcgtgcctatagtcccagcactttgggtggctgaggcgggaggttcatttaaggccaggagttaaagaccagcccaggcaacaacagtgagaccctgactctacaaaacaaaaacaaacaaacaaacaaaaaaattagccagatcatcatgacttggatgaaaagacattatg

SEQ ID NO: 125712 - DNA, 1473 bp, Homo sapiens
  Payload ID: 4638
  Gene Symbol: DAPK2
  Gene Name: death-associated protein kinase 2
  Uniprot ID: Q9UIK4
  ENST ID: ENST00000558069
  CDS Start-End: 7-1473
gattgtatgttccaggcctcaatgaggagtccaaacatggagccattcaagcagcagaaggtggaggacttttatgacatcggagaggagctggggagtggccagtttgccatcgtgaagaagtgccgggagaagagcacggggcttgagtatgcagccaagttcatcaagaagcggcagagccgggcgagccggcgcggtgtgagccgggaggagatcgagcgggaggtgagcatcctgcggcaggtgctgcaccacaatgtcatcacgctgcacgacgtctatgagaaccgcaccgacgtggtgctcatccttgagctagtgtctggaggagagctcttcgatttcctggcccagaaggagtcactgagtgaggaggaggccaccagcttcattaagcagatcctggatggggtgaactaccttcacacaaagaaaattgctcactttgatctcaagccagaaaacattatgttgttagacaagaatattcccattccacacatcaagctgattgactttggtctggctcacgaaatagaagatggagttgaatttaagaatatttttgggacgccggaatttgttgctccagaaattgtgaactacgagcccctgggtctggaggctgacatgtggagcataggcgtcatcacctacatcctcttaagtggagcatcccctttcctgggagacacgaagcaggaaacactggcaaatatcacagcagtgagttacgactttgatgaggaattcttcagccagacgagcgagctggccaaggactttattcggaagcttctggttaaagagacccggaaacggctcacaatccaagaggctctcagacacccctggatcacgtcaaaaggagaaggcagagcccctgaacagcggaagacagagcccacccagctgaagaccaagcacctgagagagtacactctcaaatgccactcaagcatgcctcccaacaactcctatgtcaacttcgagcgttttgcctgtgtggtggaagacgtggctcgggtcgacctgggatgccgtgccctggtggaggcccacgataccatccaggacgatgtggaggccctggtctccatcttcaatgagaaggaagcttggtaccgagaggagaatgagagcgcccggcatgacctgtcccagctcaggtatgagttccgcaaggtggagtcattgaagaagctgctgcgagaagacatccaggccacgggatgtagcctcggaagcatggccaggaaactggaccatctgcaagcccagtttgagattctgaggcaggagctctccgcagacctgcagtggattcaggagctggtgggcagcttccagctggagagtgggagctctgagggcctgggctccacattctaccaggacaccagtgaatccctgtcagagctgctcagcagatcatgcactgaggaatttctggcaggctggaagctctaa

SEQ ID NO: 125713 - DNA, 566 bp, Homo sapiens
  Payload ID: 4638
  Gene Symbol: DAPK2
  Gene Name: death-associated protein kinase 2
  ENST ID: ENST00000561162
  CDS Start-End: 91-357
cccgccgcgcccgccgcgcccgccgcgcccgccgctcccgccgcgcctgccgcggccgcgaccgcggcagctcagcctcccgccgattgtatgttccaggcctcaatgaggagtccaaacatggagccattcaagcagcagaaggtggaggacttttatgacatcggagaggagctggggaggttcttggctggcattctgttgttccagactctccacctgctgctgactttgctgctgctccctgcgtgtttctcactcctgtcatgcccatctagttcccagcgcactgcccacctggctttgtggccagtttgccatcgtgaagaagtgccgggagaagagcacggggcttgagtatgcagccaagttcatcaagaagcggcagagccgggcgagccggcgcggtgtgagccgggaggagatcgagcgggaggtgagcatcctgcggcaggtgctgcaccacaatgtcatcacgctgcacgacgtctatgagaaccgcaccgacgtggtgctcatccttgagctagtgtctggaggagagctcttcgatttcctggcccaga

SEQ ID NO: 125714 - DNA, 4835 bp, Homo sapiens
  Payload ID: 4638
  Gene Symbol: DAPK2
  Gene Name: death-associated protein kinase 2
  ENST ID: ENST00000559007
  CDS Start-End: 7-282
gattgtatgttccaggcctcaatgaggagtccaaacatggagccattcaagcagcagaaggtggaggacttttatgacatcggagaggagctggggagtggccagtttgccatcgtgaagaagtgccgggagaagagcacggggcttgagtatgcagccaagttcatcaagaagcggcagagccgggcgagccggcgcggtgtgagccgggaggagatcgagcgggagagtgtctggaggagagctcttcgatttcctggcccagaaggagtcactgagtgaggaggaggccaccagcttcattaagcagatcctggatggggtgaactaccttcacacaaagaaaattgctcactttgatctcaagccagaaaacattatgttgttagacaagaatattcccattccacacatcaagctgattgactttggtctggctcacgaaatagaagatggagttgaatttaagaatatttttgggacgccggaatttgttgctccagaaattgtgaactacgagcccctgggtctggaggctgacatgtggagcataggcgtcatcacctacatcctcttaagtggagcatcccctttcctgggagacacgaagcaggaaacactggcaaatatcacagcagtgagttacgactttgatgaggaattcttcagccagacgagcgagctggccaaggactttattcggaagcttctggttaaagagacccggaaacggctcacaatccaagaggctctcagacacccctggatcacgccggtggacaaccagcaagccatggtgcgcagggagtctgtggtcaatctggagaacttcaggaagcagtatgtccgcaggcggtggaagctttccttcagcatcgtgtccctgtgcaaccacctcacccgctcgctgatgaagaaggtgcacctgaggccggatgaggacctggtgggtaaatgcatgccctcttcttgggcagaattctggggtagcctggagctcagggatgggtgagttccctttcccctcacaaggcaggtgggtgttcactgtttccagccagttctgctggcccagtcctcctcttccctgaaggctgaagtgtgatcttcagaggagtgtgttctggggacctctgggtggtgccgggaggggaccactgatgcagcagcatgaactcctggaggatctcccatcctttcctggtgggccttcagaggggccgctgctgccggctgaccacagacaacccaaaatgtatttctgataacccaaaagctgctttagaatgggagctttacattcttttttccatatttctatttctgctttgtttcagattaccatcatcataatatttagacaatatcttatatttgattactttattgccattttgtatacatttaaagggagtagcttataacagaatatactggtgaagagggtgccctctgcagtcagactaccaggattcaaatctgccacttaccgtgtgaccttgaggaaattacttaacctctctgtgctgatagttcatcatttgtaaaatagggttaataatagttcctaaagattaaataatgacatattcttcctcttcttcttcttctttttttttttttttttgtttgtttagacagagtttcactcttattgcttaggttggagtgcaatggcgcgatctcggctcaccgcaacctctgcctcctggcttcaagcgattctcctgcgtcagcctcctgagtagctgggattacagtcatgcgccaccacacccagctaattttgtatttttagtagagatggggtttctccatgttggtcaggctggtctcgaactcccgacttcaggtgatctgcccgcctcggcctcccaaaatgctgggattacaggcataagccaccatgccaggccaataatgacatattcttaaagcctggcatgtaagtgctcagtaagcgttagcaattgttgttgtttaaaaccttcctgtaggctggcagtagtggttcgtgcctatagtcccagcactttgggtggctgaggcgggaggttcatttaaggccaggagttaaagaccagcccaggcaacaacagtgagaccctgactctacaaaacaaaaacaaacaaacaaacaaaaaaattagccaggtatggtgacaggcacctatagtcctagctactcagggagctgaggtgggaggatcacttgagcccaggagttaaaggctgcagtgcagtggcaccatctcagctcgctgcaacctctgcctcccgggttcaagagattctcctgccttagcctcctgactagctgggattacaggcatgagccaccacgcccagccaaaaagaatgtcagtttctttccaaacttttgttcttgtacaaatattcttaaatagtactctttttactcaaatagcaagcaccatcagctcaaaggttcatcctagaagtggaaaaatgttgggtcccagatatctgttatgcagttttcccaaagggactttccttaaaaaaaaaaaaaaaaagagtaatgataggtccttttgtttaggaagcactggaattgaacattggacaacagatattttaggaatgaagtcactgtggattagtacttcttttaataattttataattacattagatcatcatgacttggatgaaaagacattatggcctcggggtggctgcctcagctctggtttgccatgtaggaactgacagacagtactttatactcatttcctgttttataaaaatggagctcagaagtcatttccctggaaacactggtcagcaaggcggctgaaggtgcagcccatcaaagaagaaggggcatgggatggtggctgtcaagcatggggagtaccttgtggctcacacccatcctccagtctctctaggctgagctcaggagacccagcagccacagaccacccagccaagtggccttgattatatggcagccacaaagggaactagatgtaattttctttattataatttggcctctcctgatgtctggtttcccttagatgccctgctgctttccttcctccaagcagttggtctggcctcgtttcagatccctcccatcccccagcccctggatggatcagcaggcttgctttcaccacccacctccctggcttgtagtcccgtggtccaggtgaatcaacccaggttgcccagcacagccccattcctggcgtctcatgatcctcctgccctggacctctttctcttttttttctccagaggaactgtgagagtgacactgaggaggacatcgccaggaggaaagccctccacccacggaggaggagcagcacctcctaactggcctgacctgcagtggccgccagggaggtctgggcccagcggggctcccttctgtgcagacttttggacccagctcagcaccagcacccgggcgtcctgagcactttgcaagagagatgggcccaaggaattcagaagagcttgcaggcaagccaggagaccctgggagctgtggctgtcttctgtggaggaggctccagcattcccaaagctcttaattctccataaaatgggctttcctctgtctgccatcctcagagtctggggtgggagtgtggacttaggaaaacaatataaaggacatcctcatcatcacggggtgaaggtcagactaaggcagccttcttcacaggctgagggggttcagaaccagcctggccaaaaattacaccagagagacagagtcctccccattgggaacagggtgattgaggaaagtgaaccttgggtgtgagggaccaatcctgtgacctcccagaaccatggaagccaggacgtcaggctgaccaacacctcagaccttctgaagcagcccattgctggcccgccatgttgtaattttgctcatttttattaaacttctggtttacctgatgcttggcttcttttagggctacccccatctcatttcctttagcccgtgtgcctgtaactctgagggggggcacccagtggggtgctgagtgggcagaatctcagaaggtcctcctgaaccgtccgcgcaggcctgcagtgggcctgcctcctccttgcttccctaacaggaaggtgtccagttcaagagaacccacccagagactgggagtggtggctcacgcctataatccctgcgctttggcagtccgaggcaggggaattgcttgaactcaggagttggagaccagcctgggcaacatggcaaaacgcagtctgtacaaaaaatacaaaaaattagccaggtgtaggggtaggcacctggcatcccagctactccaggggctgaggtgacagcattgcttaagcccagaaggtcgaggctgcagtgagctgagatcacgccactgcactccagtctgggtgacagagagagaccatatccaaaaaaaaaaaaagttgccagagacgagtatgcccatgctccctctacctcactgccaccactcctgctgttaggagctgagtgtgtctccctaaaatttctatgttgaagtcttaacccttggtaccacagaatatcactgtatttggagatggggtctttagaaaggcacttaaattaaaatgagctcactgatatgggccccgatgcaatataattggtgtccttataagaaggggaggttaggacacgcaggaaagaccacatgaaggcccaggagtgggagggggaatagccatcgacaaactaagggggcctcagaggaaaccaaccctgctgacacctcaatcttagactctggcctcaaaaattgtaagaaaataaacttctgtcttttaagcca

SEQ ID NO: 125715 - DNA, 8086 bp, Homo sapiens
  Payload ID: 4638
  Gene Symbol: DAPK2
  Gene Name: death-associated protein kinase 2
  Uniprot ID: Q9UIK4
  ENST ID: ENST00000612884
  CDS Start-End: 32-1498
gaccgcggcagctcagcctcccgccgattgtatgttccaggcctcaatgaggagtccaaacatggagccattcaagcagcagaaggtggaggacttttatgacatcggagaggagctggggagtggccagtttgccatcgtgaagaagtgccgggagaagagcacggggcttgagtatgcagccaagttcatcaagaagcggcagagccgggcgagccggcgcggtgtgagccgggaggagatcgagcgggaggtgagcatcctgcggcaggtgctgcaccacaatgtcatcacgctgcacgacgtctatgagaaccgcaccgacgtggtgctcatccttgagctagtgtctggaggagagctcttcgatttcctggcccagaaggagtcactgagtgaggaggaggccaccagcttcattaagcagatcctggatggggtgaactaccttcacacaaagaaaattgctcactttgatctcaagccagaaaacattatgttgttagacaagaatattcccattccacacatcaagctgattgactttggtctggctcacgaaatagaagatggagttgaatttaagaatatttttgggacgccggaatttgttgctccagaaattgtgaactacgagcccctgggtctggaggctgacatgtggagcataggcgtcatcacctacatcctcttaagtggagcatcccctttcctgggagacacgaagcaggaaacactggcaaatatcacagcagtgagttacgactttgatgaggaattcttcagccagacgagcgagctggccaaggactttattcggaagcttctggttaaagagacccggaaacggctcacaatccaagaggctctcagacacccctggatcacgtcaaaaggagaaggcagagcccctgaacagcggaagacagagcccacccagctgaagaccaagcacctgagagagtacactctcaaatgccactcaagcatgcctcccaacaactcctatgtcaacttcgagcgttttgcctgtgtggtggaagacgtggctcgggtcgacctgggatgccgtgccctggtggaggcccacgataccatccaggacgatgtggaggccctggtctccatcttcaatgagaaggaagcttggtaccgagaggagaatgagagcgcccggcatgacctgtcccagctcaggtatgagttccgcaaggtggagtcattgaagaagctgctgcgagaagacatccaggccacgggatgtagcctcggaagcatggccaggaaactggaccatctgcaagcccagtttgagattctgaggcaggagctctccgcagacctgcagtggattcaggagctggtgggcagcttccagctggagagtgggagctctgagggcctgggctccacattctaccaggacaccagtgaatccctgtcagagctgctcagcagatcatgcactgaggaatttctggcaggctggaagctctaatcgccagaatccagtcagtgatgcatcccaagaggtttgcagaagcatgttctcatccaccctgctgcggcctccagctagaattatcctgcaggggtgtgtgtctgtagtatagccttccagcccctccacagaatccagaattgctgaggtgccagttaattcttcattctgcacctcccctcaccaatctggttttctgggagggctctggcagggcagccaagctgttaaaacaattagagagtgagtacccctcagggtccccttctgcagagggaggatggctggccctggggaaatgcttgagaattgatttgtgatgaaggatttgttcatatctcactttctgcctacataccttatggactgtagatcttgggtaatatttgagttaattaggaataactaagtcagcatggtgctttcctgctacagaagcagggatttacaatgcatagagaaaataatattgcctttcgtttgcattgatttttcacttaccaagcactcatgtctgacaaatgacctcacttggtccttaaaagaactcagtgagataggaaggtgggtggcattattattattattatttacatgtaactgatgagaaaattgactcagagagggaaaatgatatagtcaatcagtacagatgaaacagaaacccaggatgcccatctctaagatgaggtatatgggagaaagtagtaaggctttgctgtaaatatctaccttaatattaaagtccaggtcccagaggtaaagtaagcaacttcatgtattctgccaggtgtaggtggaatgcatacacctgcagatgattgtcccaggagctctgtcccagaaggcaaagtcattgtccctacccatccctgtctctgtctgaagaccagcctgcaagcaggagagaaggaaggaaggagtcttcccattctccaccctttctcctcttctggctaacggccccaactctgtgtcgagaataaaggccagaaggtcctcaacaggaggttccttttcttatgtacctaggccattgggccttgaaggcctaagaagttccgtgagggtttttgaaaagggcaaacataaagatggggaagcgcaaggccacatggtcgtttcatgacccaaagctttgagcacccctccccaaggattataagatctcatctccctttctctgggggaggggacagtcaaccaactcatgtcaacagagcatggcatatgagcctagtgctgagctagaagcttgtgggtaggggcataacttgtatagttcaaagtgtcttcatggcctcacaaaacatccctatcttagaggcagactaaacgatattcccaatttagagctgaggaaacagggagaggatgggattttcccaaggtcacatcattatggcaaaagtagagaccttctaatgacaagtctgttgctctttctgcttcccctggctgcgccaggctccagaagtttactccctgcttgtgggggcagctcacacctggattcatccatccatttataaattatacttaggcaccaaccaacttccagatgcccggcttgactctggggatacaatgtttagtaaaaataggcctgattcctgtctcacggagtgctcagtccagcgaaggatttgaacattgaccaagaatcacagagagatagagctgcagcttgtgttcatgctgggagagaagcacatagcactgcaggggcctgccgtcagggtctgacagcatcgggggaagcgtcctgaagcagtgacactggaacggaggtcagctaagccaaccagggagagagaagtttcccaacagagccatcataccagagctctgtgatgagaggcggtgtggaaggttgagaatgtgaggactgaaagctggaggggagagaataggaatacagtgcggaaatgaccggagaacaagcaggagcagcagggctttggccatgtggaagagctctgcccttatcccgaaagtcatgagaagccagcgggttccaggtgctggggagggaatgccccgtgaacagctcagacaggaagtggtttaggacaagacaggaaagcttcatctcatgaaaccatttcttcagaatcctgtctccttttctatatgcatgaaggatcatttcaaatatcatatacaatatttgtaacagaaacttacttcatcagctatgagaaaccgtggtgataagatgcatcatcattttatggaccactaagaaaaaaggcccaagatggggcgtctaataggaaactctctctacccccaccacataaagctgtgatgccctcaatgagagggtaaatgagaaatagagccaccatgcagaaagggggagcaaggaaacccatgcatctcaaccttgacactaaatgggggtgaaaaatccttccctgagaacaggagtcccaagccggtggtactcatgcaggtttgctttctgaatttgcactatcagtgtgatccaaaagaacatcaagcagagagtgtaatgtccaacagtctgaggctgggtggccctggatggctggcaaaaacagtactatcctctcccggagcacctgccttctgtccgggccaacagtaagaatatgataccatcatctgggagatgcctcctgacttcagagatccaaaaatgtatatcttggaaccaatgaaagatggcaaaagctccatttcctacatcttaccccagagaattggttcaaatgacctgtctacagtctctccaaggtcttacctgccctgtcacgggaagttgtatacttgtttggtgctgagacactgcaaatattaaatgtccctttggccgtgttaacagaccttgaccttcacacagccaggtttctaaggagaggaagccactgatggggcaacacagggcaagctttttagtgaaggtcaaaatagaatgcaggcccagtgtggtggctcatgcctgtaatcccagcactttgggaggctgaggtgggtggatcacttgaggtcaggagtgtgagaccagcctggccaacatggagaaatcctgtctctactaaagatataaaaattagctgggcatggtggtgggtgcctgtagtcccagctactcaggacactcgggaggctgaggcaggagaatcgcttgaacctggaaggcggaggttgcagtgagccaagatcacgccattgcactccagcctgggtgacagagtgagactctgtctcaaaaaaataaaaaatagaatacagtaaaagagtaaaatgttggcaatgatttgaatggggaaaattgggaaaagggagggagaagtggttgttttagaatcatgatcagctatacacagtgctgagagtcacccatttagttggccgtgagctggactccgaactctaagtggttttccttatagcagtgacatcgtcctctctatgctcatgtccagtcactgtaactgtttctcacttagacgtgtcgtaaacagacctttttctgtacaaagagcttctaaagacaaatgaaagagagttgagaaatgcccccaagtcttttggggaaagcagaggagaccatgaccttcctctgtgtcctggccagctgaagtcccgtccttccatggcattggaacctgatgctgggggagcccgggggcctgtgggatgcagccacaggacctgcttatctctgctccccacacgccctcagctgactttttacaacagtgtggagggctaacaatggcgggaagggctgtgagaatggactgtttcgctggtgcctagaggaaggaaggcttgtgggtgctgctctgtgggcaggcccctctgccattgaggatttttaattcaccaaattgcaatttttttggtgggggagccgcacagagtctcactctgccgcccaggctggagtgcagtggcatgatctcggctcactccaacctctgcctcccaggttcaagcaattctcctgcctcagtctcctgagtagctgggactataggtgcgcagcaccatgcccggctaatttttgtatttttagtagagatgggggtttcaccacattggtcaggctggtctcgaactcctgacctcaggtgatccacccacctcggccttccaaagtgctggaattacaggcgtgagccactgcacccagcccagactgcaaataaaaggtcggcttctgtgctctgttcaaacaccatcctgggctgtttgggaggggaaagtgagtgtatgacatcgccctgaataacaattctcaaggaagctggcaagctggcccttggggaaggcagctgcctgtccctgctgtgaggcaggtgctcacagcctagcattgcctgactgtgtgtcagaaggtggggtgatggtttggtaatcgatgattctgcagctgtgggagcctggcagtgaagggatggagcagaggaataatggcagaaagagctggagtctcccccatgggccccctcccctcccttacaggtgatcatgaagatggtggcttcctacctcactccatcacgcagcacaggtggcccggcccttgctggaggtggctgtgtgcccagctgtcacccctactgtcaatcttctgtaaatgtctgtgggactggatgccttttttccttggtccgtgaaattcctgacccagcagtgggcatgttcacgttgcaaaagggtccagtcccgttgaacaaacactgattgtgctctggctcagggggaggtgacagacaaggacaagataacctcaaataaaagattcagtgtctggggcagatggggacccagccaactagattggaaaagctatggtgagtgataaaatagagcttcctcatctcctagaaatcaaaggagagaggaattctgattgagaaagggtaagagggttgcagagaagagaggccttcccagggacgccgtccccaccagtgaccgccctcctccactcccaagctgtgtcccttgaggaaggcatgagtaaaatctggaaggggggtggggctgagccaagattggggttaggaacttggaacagttgaatggagattaaagagagggagattacacagatttaaaagagtgttttaaactttttgttatggtcccctcagcaggaaaattgccaaaacttgcacagaagtataaggaatgggatagtggattccaggacctatgaccccgctccagcaggaatcaagtcatgcgggtcctctttcattcatctctcccattacttttcttctggggtattttaaagcaaatttcagacttatttaactcataagttctccagcataaatctctgctaaggattttcttcttctttttttctttttttttttttgagacagagtttcactctcgttgcccaggctggagtgcaatggcgcgatcttggctcactgcaacctccatcttccaggttcaagcaattctcctgcctcagcctcctgagtagctgagattacaggcacccaccaccacacccaactagtttttgtatttttagtagagatggggtttcatcatgttggccaggctagtcttgaactcctgacctcaggtgatctgcctgcctcggcctcccgaagtgctgagattacaggcatgagccaccgcacccagccaggactttctttttaatacaaccccatgccattatcacacttgacaaaatcagcaataattccttcatctcatctggattcccattccatcctcacatgtccccaccactcccaacagtgtcccattacagctggtttgttcaaatcaggatccaaacagtccacatgtggcatttggttgctacgtctctcaagtctcttgggttttataacagtacaaaaggaagaacctttgaagcttttcctggggacaaaaaattgctcagaaaactgatggtcccatagaagaataaaaaacagagcgtatccatgtcaagacctaactcagaaatgtgagaccaggccaagcaaggaaaggaatgtttctgcctccttccactggcttgttcactgtagggggcagccttcaggctcacagcctttctgcagctgtccctcccacttaggaggaggcagagcctcaagcctcccacaagccccatgtgctcctttcctgggaaaacaggtgggtgaaggcagcagagcccaggcttcagccatcaaaacatccagcgaaggggaggggtggaggggtgccacctataaaactccattgagggaagggcagcggggaggggtcctgggcaggagagaagtgggtgtgagagtgccctggctttcactggagtaaggggctggagagatggcacagatgggggttggaggtgcaatctgcttgcagttcctaaagaagacctagtatctagagaaaatcgttgtgtggggggtggagttgggggagtcgcctcttcagtaaagccaggattcctttttcatgccttagcagcggctgctgcttcctgcccctgcctgtggatgttggtactgacctggcacaccccactggactttttcaaaggcatttgcagctgcataaacaaaacttgactacccc

SEQ ID NO: 125716 - DNA, 2105 bp, Homo sapiens
  Payload ID: 4639
  Gene Symbol: DAPK3
  Gene Name: death-associated protein kinase 3
  Uniprot ID: O43293
  ENST ID: ENST00000301264
  CDS Start-End: 94-1458
gttgccattaggggactcctgaggtcctatctccaggctgcggtgactgcactttccctggagtggaagctgctggaaggcggaccggccgccatgtccacgttcaggcaggaggacgtggaggaccattatgagatgggggaggagctgggcagcggccagtttgcgatcgtgcggaagtgccggcagaagggcacgggcaaggagtacgcagccaagttcatcaagaagcgccgcctgtcatccagccggcgtggggtgagccgggaggagatcgagcgggaggtgaacatcctgcgggagatccggcaccccaacatcatcaccctgcacgacatcttcgagaacaagacggacgtggtcctcatcctggagctggtctctggcggggagctctttgacttcctggcggagaaggagtcgctgacggaggacgaggccacccagttcctcaagcagatcctggacggcgttcactacctgcactctaagcgcatcgcacactttgacctgaagccggaaaacatcatgctgctggacaagaacgtgcccaacccacgaatcaagctcatcgacttcggcatcgcgcacaagatcgaggcggggaacgagttcaagaacatcttcggcaccccggagtttgtggccccagagattgtgaactatgagccgctgggcctggaggcggacatgtggagcatcggtgtcatcacctatatcctcctgagcggtgcatccccgttcctgggcgagaccaagcaggagacgctcaccaacatctcagccgtgaactacgacttcgacgaggagtacttcagcaacaccagcgagctggccaaggacttcattcgccggctgctcgtcaaagatcccaagcggagaatgaccattgcccagagcctggaacattcctggattaaggcgatccggcggcggaacgtgcgtggtgaggacagcggccgcaagcccgagcggcggcgcctgaagaccacgcgtctgaaggagtacaccatcaagtcgcactccagcttgccgcccaacaacagctacgccgacttcgagcgcttctccaaggtgctggaggaggcggcggccgccgaggagggcctgcgcgagctgcagcgcagccggcggctctgccacgaggacgtggaggcgctggccgccatctacgaggagaaggaggcctggtaccgcgaggagagcgacagcctgggccaggacctgcggaggctacggcaggagctgctcaagaccgaggcgctcaagcggcaggcgcaggaggaggccaagggcgcgctgctggggaccagcggcctcaagcgccgcttcagccgcctggagaaccgctacgaggcgctggccaagcaagtagcctccgagatgcgcttcgtgcaggacctcgtgcgcgccctggagcaggagaagctgcagggcgtggagtgcgggctgcgctaggcgcagtggggtgggccaggccccaggacagccggagctcggcctgcggtgggggcgcttcctgtggacgctgcgcctcccatcgcccgggtgcctgtccttgcccagcgccaccaggctggaggcggagtgggaggagctggagccaggcccgtaagttcgcaggcaggggtgggtgtgggacggggctgcttctctacacagcctccacgctggccttcaccttcacccctgcatcgtcggtgaccctgggaccctccaggcagcgtggcctgtggcaccgtgagggttgggacccaccgaggcgcagaggcggcccgaatgcagccctggttcaggcccggaggagggtttgcgggtagttgcacggacaattcggcggggtgctgcctgttgctgccattagcccaggaggaggtcgtgggacggggagggtgggatggacggcggacaggcagtccccacgctgctgggtggcgccgggcttggtggggtcttccactgtgtgcccttctcgccgaggccggtcccccgggtgtggggtgccctgctgcggactcctccgcgagccccatcgtcgcgcctgtggacgcctaggcaagagcggccctctgcagccaagagaaataaaatactggcttccagat

SEQ ID NO: 125717 - DNA, 2257 bp, Homo sapiens
  Payload ID: 4639
  Gene Symbol: DAPK3
  Gene Name: death-associated protein kinase 3
  Uniprot ID: O43293
  ENST ID: ENST00000545797
  CDS Start-End: 245-1609
ggcggtggccagcgcggcggcgccggccgtattctccgggctgcggagggtaaagagcgggctcgggccgaggctggagggctgggtggggccagagcggcgcttcgggggcccgcggaggacgagggagggagagaatctgaggagctgggttgccattaggggactcctgaggtcctatctccaggctgcggtgactgcactttccctggagtggaagctgctggaaggcggaccggccgccatgtccacgttcaggcaggaggacgtggaggaccattatgagatgggggaggagctgggcagcggccagtttgcgatcgtgcggaagtgccggcagaagggcacgggcaaggagtacgcagccaagttcatcaagaagcgccgcctgtcatccagccggcgtggggtgagccgggaggagatcgagcgggaggtgaacatcctgcgggagatccggcaccccaacatcatcaccctgcacgacatcttcgagaacaagacggacgtggtcctcatcctggagctggtctctggcggggagctctttgacttcctggcggagaaggagtcgctgacggaggacgaggccacccagttcctcaagcagatcctggacggcgttcactacctgcactctaagcgcatcgcacactttgacctgaagccggaaaacatcatgctgctggacaagaacgtgcccaacccacgaatcaagctcatcgacttcggcatcgcgcacaagatcgaggcggggaacgagttcaagaacatcttcggcaccccggagtttgtggccccagagattgtgaactatgagccgctgggcctggaggcggacatgtggagcatcggtgtcatcacctatatcctcctgagcggtgcatccccgttcctgggcgagaccaagcaggagacgctcaccaacatctcagccgtgaactacgacttcgacgaggagtacttcagcaacaccagcgagctggccaaggacttcattcgccggctgctcgtcaaagatcccaagcggagaatgaccattgcccagagcctggaacattcctggattaaggcgatccggcggcggaacgtgcgtggtgaggacagcggccgcaagcccgagcggcggcgcctgaagaccacgcgtctgaaggagtacaccatcaagtcgcactccagcttgccgcccaacaacagctacgccgacttcgagcgcttctccaaggtgctggaggaggcggcggccgccgaggagggcctgcgcgagctgcagcgcagccggcggctctgccacgaggacgtggaggcgctggccgccatctacgaggagaaggaggcctggtaccgcgaggagagcgacagcctgggccaggacctgcggaggctacggcaggagctgctcaagaccgaggcgctcaagcggcaggcgcaggaggaggccaagggcgcgctgctggggaccagcggcctcaagcgccgcttcagccgcctggagaaccgctacgaggcgctggccaagcaagtagcctccgagatgcgcttcgtgcaggacctcgtgcgcgccctggagcaggagaagctgcagggcgtggagtgcgggctgcgctaggcgcagtggggtgggccaggccccaggacagccggagctcggcctgcggtgggggcgcttcctgtggacgctgcgcctcccatcgcccgggtgcctgtccttgcccagcgccaccaggctggaggcggagtgggaggagctggagccaggcccgtaagttcgcaggcaggggtgggtgtgggacggggctgcttctctacacagcctccacgctggccttcaccttcacccctgcatcgtcggtgaccctgggaccctccaggcagcgtggcctgtggcaccgtgagggttgggacccaccgaggcgcagaggcggcccgaatgcagccctggttcaggcccggaggagggtttgcgggtagttgcacggacaattcggcggggtgctgcctgttgctgccattagcccaggaggaggtcgtgggacggggagggtgggatggacggcggacaggcagtccccacgctgctgggtggcgccgggcttggtggggtcttccactgtgtgcccttctcgccgaggccggtcccccgggtgtggggtgccctgctgcggactcctccgcgagccccatcgtcgcgcctgtggacgcctaggcaagagcggccctctgcagccaagagaaataaaatactggcttccagata

SEQ ID NO: 125718 - DNA, 626 bp, Homo sapiens
  Payload ID: 4639
  Gene Symbol: DAPK3
  Gene Name: death-associated protein kinase 3
  ENST ID: ENST00000593844
  CDS Start-End: 204-626
agagtggagaggtgggaggcttgtgtttgctggacaggtctgtccattaatctaggagaaaagggtggtgtctcagttcctcacttctgtctttccctgtcttctccagggttgccattaggggactcctgaggtcctatctccaggctgcggtgactgcactttccctggagtggaagctgctggaaggcggaccggccgccatgtccacgttcaggcaggaggacgtggaggaccattatgagatgggggaggagctgggcagcggccagtttgcgatcgtgcggaagtgccggcagaagggcacgggcaaggagtacgcagccaagttcatcaagaagcgccgcctgtcatccagccggcgtggggtgagccgggaggagatcgagcgggaggtgaacatcctgcgggagatccggcaccccaacatcatcaccctgcacgacatcttcgagaacaagacggacgtggtcctcatcctggagctggtctctggcggggagctctttgacttcctggcggagaaggagtcgctgacggaggacgaggccacccagttcctcaagcagatcctggacggcgttcactacctgcactctaagcgcatcgcacactttgacctgaag

SEQ ID NO: 125719 - DNA, 617 bp, Homo sapiens
  Payload ID: 4639
  Gene Symbol: DAPK3
  Gene Name: death-associated protein kinase 3
  ENST ID: ENST00000594894
  CDS Start-End: 1-278
tgagcggtgcatccccgttcctgggcgagaccaagcaggagacgctcaccaacatctcagccgtgaactacgacttcgacgaggagtacttcagcaacaccagcgagctggccaaggacttcattcgccggctgctcgtcaaagatcccaagcggagaatgaccattgcccagagcctggaacattcctggattaaggtaagtggggaggtgggggagctccctgggcttcccgccttggccttctcgctggggtcccggggggccttcagcatttaaggcttgtggatgtgacaacccccagtggctggggagggtccccagaggagtgagcctgtgtggcgggggttgggtcctgggcgtgggatgtccagcacccgacagacctggtggcatccttggctggtgtgtgtccaacggggctgactcctggggccagggccgcagcgtttttctcgagagagcactctcggctttgcgtcgggctgggcagtctccgtcacgaggcgttgactctgctgccggatgagcccctgaacctcagttcacactggcaggtgggggctggcggggctgggtggcatcgcggggaccccgctcaggcttccctccttccta

SEQ ID NO: 125720 - DNA, 671 bp, Homo sapiens
  Payload ID: 4639
  Gene Symbol: DAPK3
  Gene Name: death-associated protein kinase 3
  ENST ID: ENST00000596311
  CDS Start-End: 197-671
acgtcggcgcaggcgcgtcgcggcggcaggggcgcggggcttctggaggcggcggcggtggccagcgcggcggcgccggccgtattctccgggctgcggaggggttgccattaggggactcctgaggtcctatctccaggctgcggtgactgcactttccctggagtggaagctgctggaaggcggaccggccgccatgtccacgttcaggcaggaggacgtggaggaccattatgagatgggggaggagctgggcagcggccagtttgcgatcgtgcggaagtgccggcagaagggcacgggcaaggagtacgcagccaagttcatcaagaagcgccgcctgtcatccagccggcgtggggtgagccgggaggagatcgagcgggaggtgaacatcctgcgggagatccggcaccccaacatcatcaccctgcacgacatcttcgagaacaagacggacgtggtcctcatcctggagctggtctctggcggggagctctttgacttcctggcggagaaggagtcgctgacggaggacgaggccacccagttcctcaagcagatcctggacggcgttcactacctgcactctaagcgcatcgcacactttgacctgaagccggaaaacatcatgctgctggacaagaacgtgcccaacccacgaatcaagc

SEQ ID NO: 125721 - DNA, 599 bp, Homo sapiens
  Payload ID: 4639
  Gene Symbol: DAPK3
  Gene Name: death-associated protein kinase 3
  ENST ID: ENST00000601824
  CDS Start-End: 126-599
ggaagaggttaatcttgcgaggacagtggagggttgccattaggggactcctgaggtcctatctccaggctgcggtgactgcactttccctggagtggaagctgctggaaggcggaccggccgccatgtccacgttcaggcaggaggacgtggaggaccattatgagatgggggaggagctgggcagcggccagtttgcgatcgtgcggaagtgccggcagaagggcacgggcaaggagtacgcagccaagttcatcaagaagcgccgcctgtcatccagccggcgtggggtgagccgggaggagatcgagcgggaggtgaacatcctgcgggagatccggcaccccaacatcatcaccctgcacgacatcttcgagaacaagacggacgtggtcctcatcctggagctggtctctggcggggagctctttgacttcctggcggagaaggagtcgctgacggaggacgaggccacccagttcctcaagcagatcctggacggcgttcactacctgcactctaagcgcatcgcacactttgacctgaagccggaaaacatcatgctgctggacaagaacgtgcccaacccacgaatcaag

SEQ ID NO: 125722 - DNA, 2606 bp, Homo sapiens
  Payload ID: 4640
  Gene Symbol: DAXX
  Gene Name: death-domain associated protein
  Uniprot ID: Q9UER7
  ENST ID: ENST00000266000
  CDS Start-End: 199-2421
atatggcggcgcttagttgcatgaaggcggaaactctgtgacttccggtccgtagtggggcctgcggtgggagtgggaaggaaggcggagggaaccatgcgaggttctgagaattgcggcgagggtcgcctcgagagacggtttctgaggaattctgaaatccccaccacttcctccctccgggggatttgatcccctatggccaccgctaacagcatcatcgtgctggatgatgatgacgaagatgaagcagctgctcagccagggccctcccacccactccccaatgcggcctcacctggggcagaagcccctagctcctctgagcctcatggggccagaggaagcagtagttcgggcggcaagaaatgctacaagctggagaatgagaagctgttcgaagagttccttgaactttgtaagatgcagacagcagaccaccctgaggtggtcccattcctctataaccggcagcaacgtgcccactctctgtttttggcctcggcggagttctgcaacatcctctctagggtcctgtctcgggcccggagccggccagccaagctctatgtctacatcaatgagctctgcactgttctcaaggcccactcagccaaaaagaagctgaacttggcccctgccgccaccacctccaatgagccctctgggaataaccctcccacacacctctccttggaccccacaaatgctgaaaacactgcctctcagtctccaaggacccgtggttcccggcggcagatccagcgtttggagcagctgctggcgctctatgtggcagagatccggcggctgcaggaaaaggagttggatctctcagaattggatgacccagactccgcatacctgcaggaggcacggttgaagcgtaagctgatccgcctctttgggcgactatgtgagctgaaagactgctcttcactgaccggccgtgtcatagagcagcgcatcccctaccgtggcacccgctacccagaggttaacaggcgcattgagcggctcatcaacaagccagggcctgataccttccctgactatggggatgtgcttcgggctgtagagaaggcagctgcccgacacagccttggcctcccccgacagcagctccagctcatggctcaggatgccttccgagatgtgggcatcaggttacaggagcgacgtcacctcgatctcatctacaactttggctgccacctcacagatgactataggccaggcgttgaccctgcactatcagatcctgtgttggcccggcgccttcgggaaaaccggagtttggccatgagtcggctggatgaggtcatctccaaatatgcaatgttgcaagacaaaagtgaggagggcgagagaaaaaagagaagagctcggctccaaggcacctcttcccactctgcagacacccccgaagcctccttggattctggtgagggccctagtggaatggcatcccaggggtgcccttctgcctccagagctgagacagatgacgaagacgatgaggagagtgatgaggaagaggaggaggaggaggaagaagaagaggaggaggccacagattctgaagaggaggaggatctggaacagatgcaggagggtcaggaggatgatgaagaggaggacgaagaggaagaagcagcagcaggtaaagatggagacaagagccccatgtcctcactacagatctccaatgaaaagaacctggaacctggcaaacagatcagcagatcttcaggggagcagcaaaacaaaggacgcatagtgtcaccatcgttactgtcagaagaacccctggccccctccagcatagatgctgaaagcaatggagaacagcctgaggagctgaccctggaggaagaaagccctgtgtctcagctctttgagctagagattgaagctttgcccctggataccccttcctctgtggagacggacatttcctcttccaggaagcaatcagaggagcccttcaccactgtcttagagaatggagcaggcatggtctcttctacttccttcaatggaggcgtctctcctcacaactggggagattctggtcccccctgcaaaaaatctcggaaggagaagaagcaaacaggatcagggccattaggaaacagctatgtggaaaggcaaaggtcagtgcatgagaagaatgggaaaaagatatgtaccctgcccagcccaccttcccccttggcttccttggccccagttgctgattcctccacgagggtggactctcccagccatggcctggtgaccagctccctctgcatcccttctccagcccggctgtcccaaaccccccattcacagcctcctcggcctggtacttgcaagacaagtgtggccacacaatgcgatccagaagagatcatcgtgctctcagactctgattagctgcctccccttctccctgcctccagaatgttctgggataacatttggaggaaggtgggaagcagatgactgaggaagggatggactaagctaatccccttttggtggtgtttctttaaaaaaaaaaaaaagcttaagttttacacagaaacattaataaacaataaagttcttttcttactgta

SEQ ID NO: 125723 - DNA, 2613 bp, Homo sapiens
  Payload ID: 4640
  Gene Symbol: DAXX
  Gene Name: death-domain associated protein
  Uniprot ID: Q9UER7
  ENST ID: ENST00000374542
  CDS Start-End: 206-2428
gacaatatggcggcgcttagttgcatgaaggcggaaactctgtgacttccggtccgtagtggggcctgcggtgggagtgggaaggaaggcggagggaaccatgcgaggttctgagaattgcggcgagggtcgcctcgagagacggtttctgagcaggaattctgaaatccccaccacttcctccctccgggggatttgatcccctatggccaccgctaacagcatcatcgtgctggatgatgatgacgaagatgaagcagctgctcagccagggccctcccacccactccccaatgcggcctcacctggggcagaagcccctagctcctctgagcctcatggggccagaggaagcagtagttcgggcggcaagaaatgctacaagctggagaatgagaagctgttcgaagagttccttgaactttgtaagatgcagacagcagaccaccctgaggtggtcccattcctctataaccggcagcaacgtgcccactctctgtttttggcctcggcggagttctgcaacatcctctctagggtcctgtctcgggcccggagccggccagccaagctctatgtctacatcaatgagctctgcactgttctcaaggcccactcagccaaaaagaagctgaacttggcccctgccgccaccacctccaatgagccctctgggaataaccctcccacacacctctccttggaccccacaaatgctgaaaacactgcctctcagtctccaaggacccgtggttcccggcggcagatccagcgtttggagcagctgctggcgctctatgtggcagagatccggcggctgcaggaaaaggagttggatctctcagaattggatgacccagactccgcatacctgcaggaggcacggttgaagcgtaagctgatccgcctctttgggcgactatgtgagctgaaagactgctcttcactgaccggccgtgtcatagagcagcgcatcccctaccgtggcacccgctacccagaggttaacaggcgcattgagcggctcatcaacaagccagggcctgataccttccctgactatggggatgtgcttcgggctgtagagaaggcagctgcccgacacagccttggcctcccccgacagcagctccagctcatggctcaggatgccttccgagatgtgggcatcaggttacaggagcgacgtcacctcgatctcatctacaactttggctgccacctcacagatgactataggccaggcgttgaccctgcactatcagatcctgtgttggcccggcgccttcgggaaaaccggagtttggccatgagtcggctggatgaggtcatctccaaatatgcaatgttgcaagacaaaagtgaggagggcgagagaaaaaagagaagagctcggctccaaggcacctcttcccactctgcagacacccccgaagcctccttggattctggtgagggccctagtggaatggcatcccaggggtgcccttctgcctccagagctgagacagatgacgaagacgatgaggagagtgatgaggaagaggaggaggaggaggaagaagaagaggaggaggccacagattctgaagaggaggaggatctggaacagatgcaggagggtcaggaggatgatgaagaggaggacgaagaggaagaagcagcagcaggtaaagatggagacaagagccccatgtcctcactacagatctccaatgaaaagaacctggaacctggcaaacagatcagcagatcttcaggggagcagcaaaacaaaggacgcatagtgtcaccatcgttactgtcagaagaacccctggccccctccagcatagatgctgaaagcaatggagaacagcctgaggagctgaccctggaggaagaaagccctgtgtctcagctctttgagctagagattgaagctttgcccctggataccccttcctctgtggagacggacatttcctcttccaggaagcaatcagaggagcccttcaccactgtcttagagaatggagcaggcatggtctcttctacttccttcaatggaggcgtctctcctcacaactggggagattctggtcccccctgcaaaaaatctcggaaggagaagaagcaaacaggatcagggccattaggaaacagctatgtggaaaggcaaaggtcagtgcatgagaagaatgggaaaaagatatgtaccctgcccagcccaccttcccccttggcttccttggccccagttgctgattcctccacgagggtggactctcccagccatggcctggtgaccagctccctctgcatcccttctccagcccggctgtcccaaaccccccattcacagcctcctcggcctggtacttgcaagacaagtgtggccacacaatgcgatccagaagagatcatcgtgctctcagactctgattagctgcctccccttctccctgcctccagaatgttctgggataacatttggaggaaggtgggaagcagatgactgaggaagggatggactaagctaatccccttttggtggtgtttctttaaaaaaaaaaaaaagcttaagttttacacagaaacattaataaacaataaagttcttttcttactgta

SEQ ID NO: 125724 - DNA, 2615 bp, Homo sapiens
  Payload ID: 4640
  Gene Symbol: DAXX
  Gene Name: death-domain associated protein
  Uniprot ID: Q9UER7
  ENST ID: ENST00000383062
  CDS Start-End: 206-2428
gacaatatggcggcgcttagttgcatgaaggcggaaactctgtgacttccggtccgtagtggggcctgcggtgggagtgggaaggaaggcggagggaaccatgcgaggttctgagaattgcggcgagggtcgcctcgagagacggtttctgagcaggaattctgaaatccccaccacttcctccctccgggggatttgatcccctatggccaccgctaacagcatcatcgtgctggatgatgatgacgaagatgaagcagctgctcagccagggccctcccacccactccccaatgcggcctcacctggggcagaagcccctagctcctctgagcctcatggggccagaggaagcagtagttcgggcggcaagaaatgctacaagctggagaatgagaagctgttcgaagagttccttgaactttgtaagatgcagacagcagaccaccctgaggtggtcccattcctctataaccggcagcaacgtgcccactctctgtttttggcctcggcggagttctgcaacatcctctctagggtcctgtctcgggcccggagccggccagccaagctctatgtctacatcaatgagctctgcactgttctcaaggcccactcagccaaaaagaagctgaacttggcccctgccgccaccacctccaatgagccctctgggaataaccctcccacacacctctccttggaccccacaaatgctgaaaacactgcctctcagtctccaaggacccgtggttcccggcggcagatccagcgtttggagcagctgctggcgctctatgtggcagagatccggcggctgcaggaaaaggagttggatctctcagaattggatgacccagactccgcatacctgcaggaggcacggttgaagcgtaagctgatccgcctctttgggcgactatgtgagctgaaagactgctcttcactgaccggccgtgtcatagagcagcgcatcccctaccgtggcacccgctacccagaggttaacaggcgcattgagcggctcatcaacaagccagggcctgataccttccctgactatggggatgtgcttcgggctgtagagaaggcagctgcccgacacagccttggcctcccccgacagcagctccagctcatggctcaggatgccttccgagatgtgggcatcaggttacaggagcgacgtcacctcgatctcatctacaactttggctgccacctcacagatgactataggccaggcgttgaccctgcactatcagatcctgtgttggcccggcgccttcgggaaaaccggagtttggccatgagtcggctggatgaggtcatctccaaatacgcaatgttgcaagacaaaagtgaggagggcgagagaaaaaagagaagagctcggctccaaggcacctcttcccactctgcagacacccccgaagcctccttggattctggtgagggccctagtggaatggcatcccaggggtgcccttctgcctccagagctgagacagatgacgaagacgatgaggagagtgatgaggaagaggaggaggaggaggaagaagaagaggaggaggccacagattctgaagaggaggaggatctggaacagatgcaggagggtcaggaggatgatgaagaggaggacgaagaggaagaagcagcagcaggtaaagatggagacaagagccccatgtcctcactacagatctccaatgaaaagaacctggaacctggcaaacagatcagcagatcttcaggggagcagcaaaacaaaggacgcatagtgtcaccatcgttactgtcagaagaacccctggccccctccagcatagatgctgaaagcaatggagaacagcctgaggagctgaccctggaggaagaaagccctgtgtctcagctctttgagctagagattgaagctttgcccctggataccccttcctctgtggagacggacatttcctcttccaggaagcaatcagaggagcccttcaccactgtcttagagaatggagcaggcatggtctcttctacttccttcaatggaggcgtctctcctcacaactggggagattctggtcccccctgcaaaaaatctcggaaggagaagaagcaaacaggatcagggccattaggaaacagctatgtggaaaggcaaaggtcagtgcatgagaagaatgggaaaaagatatgtaccctgcccagcccaccttcccccttggcttccttggccccagttgctgattcctccacgagggtggactctcccagccatggcctggtgaccagctccctctgcatcccttctccagcccggctgtcccaaaccccccattcacagcctcctcggcctggtacttgcaagacaagtgtggccacacaatgcgatccagaagagatcatcgtgctctcagactctgattagctgcctccccttctccctgcctccagaatgttctgggataacatttggaggaaggtgggaagcagatgactgaggaagggatggactaagctaatccccttttggtggtgtttctttaaaaaaaaaaaaaaaagcttaagttttacacagaaacattaataaacaataaagttcttttcttactgta

SEQ ID NO: 125725 - DNA, 2614 bp, Homo sapiens
  Payload ID: 4640
  Gene Symbol: DAXX
  Gene Name: death-domain associated protein
  Uniprot ID: Q9UER7
  ENST ID: ENST00000383194
  CDS Start-End: 206-2428
gacaatatggcggcgcttagttgcatgaaggcggaaactctgtgacttccggtccgtagtggggcctgcggtgggagtgggaaggaaggcggagggaaccatgcgaggttctgagaattgcggcgagggtcgcctcgagagacggtttctgagcaggaattctgaaatccccaccacttcctccctccgggggatttgatcccctatggccaccgctaacagcatcatcgtgctggatgatgatgacgaagatgaagcagctgctcagccagggccctcccacccactccccaatgcggcctcacctggggcagaagcccctagctcctctgagcctcatggggccagaggaagcagtagttcgggcggcaagaaatgctacaagctggagaatgagaagctgttcgaagagttccttgaactttgtaagatgcagacagcagaccaccctgaggtggtcccattcctctataaccggcagcaacgtgcccactctctgtttttggcctcggcggagttctgcaacatcctctctagggtcctgtctcgggcccggagccggccagccaagctctatgtctacatcaatgagctctgcactgttctcaaggcccactcagccaaaaagaagctgaacttggcccctgccgccaccacctccaatgagccctctgggaataaccctcccacacacctctccttggaccccacaaatgctgaaaacactgcctctcagtctccaaggacccgtggttcccggcggcagatccagcgtttggagcagctgctggcgctctatgtggcagagatccggcggctgcaggaaaaggagttggatctctcagaattggatgacccagactccgcatacctgcaggaggcacggttgaagcgtaagctgatccgcctctttgggcgactatgtgagctgaaagactgctcttcactgaccggccgtgtcatagagcagcgcatcccctaccgtggcacccgctacccagaggttaacaggcgcattgagcggctcatcaacaagccagggcctgataccttccctgactatggggatgtgcttcgggctgtagagaaggcagctgcccgacacagccttggcctcccccgacagcagctccagctcatggctcaggatgccttccgagatgtgggcatcaggttacaggagcgacgtcacctcgatctcatctacaactttggctgccacctcacagatgactataggccaggcgttgaccctgcactatcagatcctgtgttggcccggcgccttcgggaaaaccggagtttggccatgagtcggctggatgaggtcatctccaaatatgcaatgttgcaagacaaaagtgaggagggcgagagaaaaaagagaagagctcggctccaaggcacctcttcccactctgcagacacccccgaagcctccttggattctggtgagggccctagtggaatggcatcccaggggtgcccttctgcctccagagctgagacagatgacgaagacgatgaggagagtgatgaggaagaggaggaggaggaggaagaagaagaggaggaggccacagattctgaagaggaggaggatctggaacagatgcaggagggtcaggaggatgatgaagaggaggacgaagaggaagaagcagcagcaggtaaagatggagacaagagccccatgtcctcactacagatctccaatgaaaagaacctggaacctggcaaacagatcagcagatcttcaggggagcagcaaaacaaaggacgcatagtgtcaccatcgttactgtcagaagaacccctggccccctccagcatagatgctgaaagcaatggagaacagcctgaggagctgaccctggaggaagaaagccctgtgtctcagctctttgagctagagattgaagctttgcccctggataccccttcctctgtggagacggacatttcctcttccaggaagcaatcagaggagcccttcaccactgtcttagagaatggagcaggcatggtctcttctacttccttcaatggaggcgtctctcctcacaactggggagattctggtcccccctgcaaaaaatctcggaaggagaagaagcaaacaggatcagggccattaggaaacagctatgtggaaaggcaaaggtcagtgcatgagaagaatgggaaaaagatatgtaccctgcccagcccaccttcccccttggcttccttggccccagttgctgattcctccacgagggtggactctcccagccatggcctggtgaccagctccctctgcatcccttctccagcccggctgtcccaaaccccccattcacagcctcctcggcctggtacttgcaagacaagtgtggccacacaatgcgatccagaagagatcatcgtgctctcagactctgattagctgcctccccttctccctgcctccagaatgttctgggataacatttggaggaaggtgggaagcagatgactgaggaagggatggactaagctaatccccttttggtggtgtttctttaaaaaaaaaaaaaaagcttaagttttacacagaaacattaataaacaataaagttcttttcttactgta

SEQ ID NO: 125726 - DNA, 2608 bp, Homo sapiens
  Payload ID: 4640
  Gene Symbol: DAXX
  Gene Name: death-domain associated protein
  Uniprot ID: Q9UER7
  ENST ID: ENST00000399060
  CDS Start-End: 199-2421
atatggcggcgcttagttgcatgaaggcggaaactctgtgacttccggtccgtagtggggcctgcggtgggagtgggaaggaaggcggagggaaccatgcgaggttctgagaattgcggcgagggtcgcctcgagagacggtttctgaggaattctgaaatccccaccacttcctccctccgggggatttgatcccctatggccaccgctaacagcatcatcgtgctggatgatgatgacgaagatgaagcagctgctcagccagggccctcccacccactccccaatgcggcctcacctggggcagaagcccctagctcctctgagcctcatggggccagaggaagcagtagttcgggcggcaagaaatgctacaagctggagaatgagaagctgttcgaagagttccttgaactttgtaagatgcagacagcagaccaccctgaggtggtcccattcctctataaccggcagcaacgtgcccactctctgtttttggcctcggcggagttctgcaacatcctctctagggtcctgtctcgggcccggagccggccagccaagctctatgtctacatcaatgagctctgcactgttctcaaggcccactcagccaaaaagaagctgaacttggcccctgccgccaccacctccaatgagccctctgggaataaccctcccacacacctctccttggaccccacaaatgctgaaaacactgcctctcagtctccaaggacccgtggttcccggcggcagatccagcgtttggagcagctgctggcgctctatgtggcagagatccggcggctgcaggaaaaggagttggatctctcagaattggatgacccagactccgcatacctgcaggaggcacggttgaagcgtaagctgatccgcctctttgggcgactatgtgagctgaaagactgctcttcactgaccggccgtgtcatagagcagcgcatcccctaccgtggcacccgctacccagaggttaacaggcgcattgagcggctcatcaacaagccagggcctgataccttccctgactatggggatgtgcttcgggctgtagagaaggcagctgcccgacacagccttggcctcccccgacagcagctccagctcatggctcaggatgccttccgagatgtgggcatcaggttacaggagcgacgtcacctcgatctcatctacaactttggctgccacctcacagatgactataggccaggcgttgaccctgcactatcagatcctgtgttggcccggcgccttcgggaaaaccggagtttggccatgagtcggctggatgaggtcatctccaaatacgcaatgttgcaagacaaaagtgaggagggcgagagaaaaaagagaagagctcggctccaaggcacctcttcccactctgcagacacccccgaagcctccttggattctggtgagggccctagtggaatggcatcccaggggtgcccttctgcctccagagctgagacagatgacgaagacgatgaggagagtgatgaggaagaggaggaggaggaggaagaagaagaggaggaggccacagattctgaagaggaggaggatctggaacagatgcaggagggtcaggaggatgatgaagaggaggacgaagaggaagaagcagcagcaggtaaagatggagacaagagccccatgtcctcactacagatctccaatgaaaagaacctggaacctggcaaacagatcagcagatcttcaggggagcagcaaaacaaaggacgcatagtgtcaccatcgttactgtcagaagaacccctggccccctccagcatagatgctgaaagcaatggagaacagcctgaggagctgaccctggaggaagaaagccctgtgtctcagctctttgagctagagattgaagctttgcccctggataccccttcctctgtggagacggacatttcctcttccaggaagcaatcagaggagcccttcaccactgtcttagagaatggagcaggcatggtctcttctacttccttcaatggaggcgtctctcctcacaactggggagattctggtcccccctgcaaaaaatctcggaaggagaagaagcaaacaggatcagggccattaggaaacagctatgtggaaaggcaaaggtcagtgcatgagaagaatgggaaaaagatatgtaccctgcccagcccaccttcccccttggcttccttggccccagttgctgattcctccacgagggtggactctcccagccatggcctggtgaccagctccctctgcatcccttctccagcccggctgtcccaaaccccccattcacagcctcctcggcctggtacttgcaagacaagtgtggccacacaatgcgatccagaagagatcatcgtgctctcagactctgattagctgcctccccttctccctgcctccagaatgttctgggataacatttggaggaaggtgggaagcagatgactgaggaagggatggactaagctaatccccttttggtggtgtttctttaaaaaaaaaaaaaaaagcttaagttttacacagaaacattaataaacaataaagttcttttcttactgta

SEQ ID NO: 125727 - DNA, 2607 bp, Homo sapiens
  Payload ID: 4640
  Gene Symbol: DAXX
  Gene Name: death-domain associated protein
  Uniprot ID: Q9UER7
  ENST ID: ENST00000399344
  CDS Start-End: 199-2421
atatggcggcgcttagttgcatgaaggcggaaactctgtgacttccggtccgtagtggggcctgcggtgggagtgggaaggaaggcggagggaaccatgcgaggttctgagaattgcggcgagggtcgcctcgagagacggtttctgaggaattctgaaatccccaccacttcctccctccgggggatttgatcccctatggccaccgctaacagcatcatcgtgctggatgatgatgacgaagatgaagcagctgctcagccagggccctcccacccactccccaatgcggcctcacctggggcagaagcccctagctcctctgagcctcatggggccagaggaagcagtagttcgggcggcaagaaatgctacaagctggagaatgagaagctgttcgaagagttccttgaactttgtaagatgcagacagcagaccaccctgaggtggtcccattcctctataaccggcagcaacgtgcccactctctgtttttggcctcggcggagttctgcaacatcctctctagggtcctgtctcgggcccggagccggccagccaagctctatgtctacatcaatgagctctgcactgttctcaaggcccactcagccaaaaagaagctgaacttggcccctgccgccaccacctccaatgagccctctgggaataaccctcccacacacctctccttggaccccacaaatgctgaaaacactgcctctcagtctccaaggacccgtggttcccggcggcagatccagcgtttggagcagctgctggcgctctatgtggcagagatccggcggctgcaggaaaaggagttggatctctcagaattggatgacccagactccgcatacctgcaggaggcacggttgaagcgtaagctgatccgcctctttgggcgactatgtgagctgaaagactgctcttcactgaccggccgtgtcatagagcagcgcatcccctaccgtggcacccgctacccagaggttaacaggcgcattgagcggctcatcaacaagccagggcctgataccttccctgactatggggatgtgcttcgggctgtagagaaggcagctgcccgacacagccttggcctcccccgacagcagctccagctcatggctcaggatgccttccgagatgtgggcatcaggttacaggagcgacgtcacctcgatctcatctacaactttggctgccacctcacagatgactataggccaggcgttgaccctgcactatcagatcctgtgttggcccggcgccttcgggaaaaccggagtttggccatgagtcggctggatgaggtcatctccaaatatgcaatgttgcaagacaaaagtgaggagggcgagagaaaaaagagaagagctcggctccaaggcacctcttcccactctgcagacacccccgaagcctccttggattctggtgagggccctagtggaatggcatcccaggggtgcccttctgcctccagagctgagacagatgacgaagacgatgaggagagtgatgaggaagaggaggaggaggaggaagaagaagaggaggaggccacagattctgaagaggaggaggatctggaacagatgcaggagggtcaggaggatgatgaagaggaggacgaagaggaagaagcagcagcaggtaaagatggagacaagagccccatgtcctcactacagatctccaatgaaaagaacctggaacctggcaaacagatcagcagatcttcaggggagcagcaaaacaaaggacgcatagtgtcaccatcgttactgtcagaagaacccctggccccctccagcatagatgctgaaagcaatggagaacagcctgaggagctgaccctggaggaagaaagccctgtgtctcagctctttgagctagagattgaagctttgcccctggataccccttcctctgtggagacggacatttcctcttccaggaagcaatcagaggagcccttcaccactgtcttagagaatggagcaggcatggtctcttctacttccttcaatggaggcgtctctcctcacaactggggagattctggtcccccctgcaaaaaatctcggaaggagaagaagcaaacaggatcagggccattaggaaacagctatgtggaaaggcaaaggtcagtgcatgagaagaatgggaaaaagatatgtaccctgcccagcccaccttcccccttggcttccttggccccagttgctgattcctccacgagggtggactctcccagccatggcctggtgaccagctccctctgcatcccttctccagcccggctgtcccaaaccccccattcacagcctcctcggcctggtacttgcaagacaagtgtggccacacaatgcgatccagaagagatcatcgtgctctcagactctgattagctgcctccccttctccctgcctccagaatgttctgggataacatttggaggaaggtgggaagcagatgactgaggaagggatggactaagctaatccccttttggtggtgtttctttaaaaaaaaaaaaaaagcttaagttttacacagaaacattaataaacaataaagttcttttcttactgta

SEQ ID NO: 125728 - DNA, 371 bp, Homo sapiens
  Payload ID: 4640
  Gene Symbol: DAXX
  Gene Name: death-domain associated protein
  ENST ID: ENST00000421874
  CDS Start-End: 228-371
ttggggagagctgggcgctgagtctgaggggaatgctgtggtaccttcctgtccctgaaagggagtggagcggccgggggctgaactgggggagggggatttggcgggaagcgcatctagcggaccggccggacccacggttgggatctaagaggaatcgcgagagcgtagcgcgcaggaattctgaaatccccaccacttcctccctccgggggatttgatcccctatggccaccgctaacagcatcatcgtgctggatgatgatgacgaagatgaagcagctgctcagccagggccctcccacccactccccaatgcggcctcacctggggcagaagcccctagctcctctgagcctcatggggccaga

SEQ ID NO: 125729 - DNA, 371 bp, Homo sapiens
  Payload ID: 4640
  Gene Symbol: DAXX
  Gene Name: death-domain associated protein
  ENST ID: ENST00000446511
  CDS Start-End: 228-371
ttggggagagctgggcgctgagtctgaggggaaagctgtggtaccttcctgtccctgaaagggagtggagcggccgggggctgaactgggggagggggatttggcgggaagcgcatctagcggaccggccggacccacggttgggatctaagaggaatcgcgagagcgtagcgcgcaggaattctgaaatccccaccacttcctccctccgggggatttgatcccctatggccaccgctaacagcatcatcgtgctggatgatgatgacgaagatgaagcagctgctcagccagggccctcccacccactccccaatgcggcctcacctggggcagaagcccctagctcctctgagcctcatggggccaga

SEQ ID NO: 125730 - DNA, 2545 bp, Homo sapiens
  Payload ID: 4640
  Gene Symbol: DAXX
  Gene Name: death-domain associated protein
  Uniprot ID: Q9UER7
  ENST ID: ENST00000445009
  CDS Start-End: 139-2361
gcggtgggagtgggaaggaaggcggagggaaccatgcgaggttctgagaattgcggcgagggtcgcctcgagagacggtttctgagcaggaattctgaaatccccaccacttcctccctccgggggatttgatcccctatggccaccgctaacagcatcatcgtgctggatgatgatgacgaagatgaagcagctgctcagccagggccctcccacccactccccaatgcggcctcacctggggcagaagcccctagctcctctgagcctcatggggccagaggaagcagtagttcgggcggcaagaaatgctacaagctggagaatgagaagctgttcgaagagttccttgaactttgtaagatgcagacagcagaccaccctgaggtggtcccattcctctataaccggcagcaacgtgcccactctctgtttttggcctcggcggagttctgcaacatcctctctagggtcctgtctcgggcccggagccggccagccaagctctatgtctacatcaatgagctctgcactgttctcaaggcccactcagccaaaaagaagctgaacttggcccctgccgccaccacctccaatgagccctctgggaataaccctcccacacacctctccttggaccccacaaatgctgaaaacactgcctctcagtctccaaggacccgtggttcccggcggcagatccagcgtttggagcagctgctggcgctctatgtggcagagatccggcggctgcaggaaaaggagttggatctctcagaattggatgacccagactccgcatacctgcaggaggcacggttgaagcgtaagctgatccgcctctttgggcgactatgtgagctgaaagactgctcttcactgaccggccgtgtcatagagcagcgcatcccctaccgtggcacccgctacccagaggttaacaggcgcattgagcggctcatcaacaagccagggcctgataccttccctgactatggggatgtgcttcgggctgtagagaaggcagctgcccgacacagccttggcctcccccgacagcagctccagctcatggctcaggatgccttccgagatgtgggcatcaggttacaggagcgacgtcacctcgatctcatctacaactttggctgccacctcacagatgactataggccaggcgttgaccctgcactatcagatcctgtgttggcccggcgccttcgggaaaaccggagtttggccatgagtcggctggatgaggtcatctccaaatatgcaatgttgcaagacaaaagtgaggagggcgagagaaaaaagagaagagctcggctccaaggcacctcttcccactctgcagacacccccgaagcctccttggattctggtgagggccctagtggaatggcatcccaggggtgcccttctgcctccagagctgagacagatgacgaagacgatgaggagagtgatgaggaagaggaggaggaggaggaagaagaagaggaggaggccacagattctgaagaggaggaggatctggaacagatgcaggagggtcaggaggatgatgaagaggaggacgaagaggaagaagcagcagcaggtaaagatggagacaagagccccatgtcctcactacagatctccaatgaaaagaacctggaacctggcaaacagatcagcagatcttcaggggagcagcaaaacaaaggacgcatagtgtcaccatcgttactgtcagaagaacccctggccccctccagcatagatgctgaaagcaatggagaacagcctgaggagctgaccctggaggaagaaagccctgtgtctcagctctttgagctagagattgaagctttgcccctggataccccttcctctgtggagacggacatttcctcttccaggaagcaatcagaggagcccttcaccactgtcttagagaatggagcaggcatggtctcttctacttccttcaatggaggcgtctctcctcacaactggggagattctggtcccccctgcaaaaaatctcggaaggagaagaagcaaacaggatcagggccattaggaaacagctatgtggaaaggcaaaggtcagtgcatgagaagaatgggaaaaagatatgtaccctgcccagcccaccttcccccttggcttccttggccccagttgctgattcctccacgagggtggactctcccagccatggcctggtgaccagctccctctgcatcccttctccagcccggctgtcccaaaccccccattcacagcctcctcggcctggtacttgcaagacaagtgtggccacacaatgcgatccagaagagatcatcgtgctctcagactctgattagctgcctccccttctccctgcctccagaatgttctgggataacatttggaggaaggtgggaagcagatgactgaggaagggatggactaagctaatccccttttggtggtgtttctttaaaaaaaaaaaaagcttaagttttacacagaaacattaataaacaataaagttcttttcttactgta

SEQ ID NO: 125731 - DNA, 2355 bp, Homo sapiens
  Payload ID: 4640
  Gene Symbol: DAXX
  Gene Name: death-domain associated protein
  Uniprot ID: Q9UER7
  ENST ID: ENST00000414083
  CDS Start-End: 174-2171
acgacaatatggcggcgcttagttgcatgaaggcggaaactctgtgacttccggtccgtagtggggcctgcggtgggagtgggaaggaaggcggagggaaccatgcgaggttctgagaattgcggcgagggtcgcctcgagagacggtttctgagttccttgaactttgtaagatgcagacagcagaccaccctgaggtggtcccattcctctataaccggcagcaacgtgcccactctctgtttttggcctcggcggagttctgcaacatcctctctagggtcctgtctcgggcccggagccggccagccaagctctatgtctacatcaatgagctctgcactgttctcaaggcccactcagccaaaaagaagctgaacttggcccctgccgccaccacctccaatgagccctctgggaataaccctcccacacacctctccttggaccccacaaatgctgaaaacactgcctctcagtctccaaggacccgtggttcccggcggcagatccagcgtttggagcagctgctggcgctctatgtggcagagatccggcggctgcaggaaaaggagttggatctctcagaattggatgacccagactccgcatacctgcaggaggcacggttgaagcgtaagctgatccgcctctttgggcgactatgtgagctgaaagactgctcttcactgaccggccgtgtcatagagcagcgcatcccctaccgtggcacccgctacccagaggttaacaggcgcattgagcggctcatcaacaagccagggcctgataccttccctgactatggggatgtgcttcgggctgtagagaaggcagctgcccgacacagccttggcctcccccgacagcagctccagctcatggctcaggatgccttccgagatgtgggcatcaggttacaggagcgacgtcacctcgatctcatctacaactttggctgccacctcacagatgactataggccaggcgttgaccctgcactatcagatcctgtgttggcccggcgccttcgggaaaaccggagtttggccatgagtcggctggatgaggtcatctccaaatatgcaatgttgcaagacaaaagtgaggagggcgagagaaaaaagagaagagctcggctccaaggcacctcttcccactctgcagacacccccgaagcctccttggattctggtgagggccctagtggaatggcatcccaggggtgcccttctgcctccagagctgagacagatgacgaagacgatgaggagagtgatgaggaagaggaggaggaggaggaagaagaagaggaggaggccacagattctgaagaggaggaggatctggaacagatgcaggagggtcaggaggatgatgaagaggaggacgaagaggaagaagcagcagcaggtaaagatggagacaagagccccatgtcctcactacagatctccaatgaaaagaacctggaacctggcaaacagatcagcagatcttcaggggagcagcaaaacaaaggacgcatagtgtcaccatcgttactgtcagaagaacccctggccccctccagcatagatgctgaaagcaatggagaacagcctgaggagctgaccctggaggaagaaagccctgtgtctcagctctttgagctagagattgaagctttgcccctggataccccttcctctgtggagacggacatttcctcttccaggaagcaatcagaggagcccttcaccactgtcttagagaatggagcaggcatggtctcttctacttccttcaatggaggcgtctctcctcacaactggggagattctggtcccccctgcaaaaaatctcggaaggagaagaagcaaacaggatcagggccattaggaaacagctatgtggaaaggcaaaggtcagtgcatgagaagaatgggaaaaagatatgtaccctgcccagcccaccttcccccttggcttccttggccccagttgctgattcctccacgagggtggactctcccagccatggcctggtgaccagctccctctgcatcccttctccagcccggctgtcccaaaccccccattcacagcctcctcggcctggtacttgcaagacaagtgtggccacacaatgcgatccagaagagatcatcgtgctctcagactctgattagctgcctccccttctccctgcctccagaatgttctgggataacatttggaggaaggtgggaagcagatgactgaggaagggatggactaagctaatccccttttggtggtgtttctttaaaaaaaaaaaaaagcttaagttttacacagaaacattaataaacaataaagttcttttcttactgt

SEQ ID NO: 125732 - DNA, 751 bp, Homo sapiens
  Payload ID: 4640
  Gene Symbol: DAXX
  Gene Name: death-domain associated protein
  ENST ID: ENST00000419855
  CDS Start-End: 363-751
ggatgtgttcctggcatttgcccagggtccctcccctcccaggggtcccgtgcgacgtgccttggacaaggctttctttatcttcctggccctcttcctgacactgctgatgctggaggctgcttataagctgctgtggttactactatgggcaaagttaggggactggctcctggggacacctcagaaggaggaggagctggaattgtgaccacctttcctataaacatcttctttccccaccaaggagctcacctctggacccagccttgcctccacgagtccctccagcctccctaaacacaacgagcaggaattctgaaatccccaccacttcctccctccgggggatttgatcccctatggccaccgctaacagcatcatcgtgctggatgatgatgacgaagatgaagcagctgctcagccagggccctcccacccactccccaatgcggcctcacctggggcagaagcccctagctcctctgagcctcatggggccagaggaagcagtagttcgggcggcaagaaatgctacaagctggagaatgagaagctgttcgaagagttccttgaactttgtaagatgcagacagcagaccaccctgaggtggtcccattcctctataaccggcagcaacgtgcccactctctgtttttggcctcggcggagttctgcaacatcctctctagggtcctgtctcgggcccggagccggccagccaagctctatgtctacatcaatgagct

SEQ ID NO: 125733 - DNA, 702 bp, Homo sapiens
  Payload ID: 4640
  Gene Symbol: DAXX
  Gene Name: death-domain associated protein
  ENST ID: ENST00000440500
  CDS Start-End: 168-702
ggtgggagtgggaaggaaggcggagggaaccatgcgaggttctgagaattgcggcgagggtcgcctcgagagacggtttctgaggggctcattctgaggccccatccccttccagcaggaattctgaaatccccaccacttcctccctccgggggatttgatcccctatggccaccgctaacagcatcatcgtgctggatgatgatgacgaagatgaagcagctgctcagccagggccctcccacccactccccaatgcggcctcacctggggcagaagcccctagctcctctgagcctcatggggccagaggaagcagtagttcgggcggcaagaaatgctacaagctggagaatgagaagctgttcgaagagttccttgaactttgtaagatgcagacagcagaccaccctgaggtggtcccattcctctataaccggcagcaacgtgcccactctctgtttttggcctcggcggagttctgcaacatcctctctagggtcctgtctcgggcccggagccggccagccaagctctatgtctacatcaatgagctctgcactgttctcaaggcccactcagccaaaaagaagctgaacttggcccctgccgccaccacctccaatgagccctctgggaataaccctcccacacacctctccttggaccccacaaatgctgaaaacactgcctctcagtctc

SEQ ID NO: 125734 - DNA, 2615 bp, Homo sapiens; identical to SEQ ID NO: 125724
  Payload ID: 4640
  Gene Symbol: DAXX
  Gene Name: death-domain associated protein
  Uniprot ID: Q9UER7
  ENST ID: ENST00000436311
  CDS Start-End: 206-2428

SEQ ID NO: 125735 - DNA, 2522 bp, Homo sapiens
  Payload ID: 4640
  Gene Symbol: DAXX
  Gene Name: death-domain associated protein
  Uniprot ID: Q9UER7
  ENST ID: ENST00000433482
  CDS Start-End: 116-2338
ggcggagggaaccatgcgaggttctgagaattgcggcgagggtcgcctcgagagacggtttctgaggaattctgaaatccccaccacttcctccctccgggggatttgatcccctatggccaccgctaacagcatcatcgtgctggatgatgatgacgaagatgaagcagctgctcagccagggccctcccacccactccccaatgcggcctcacctggggcagaagcccctagctcctctgagcctcatggggccagaggaagcagtagttcgggcggcaagaaatgctacaagctggagaatgagaagctgttcgaagagttccttgaactttgtaagatgcagacagcagaccaccctgaggtggtcccattcctctataaccggcagcaacgtgcccactctctgtttttggcctcggcggagttctgcaacatcctctctagggtcctgtctcgggcccggagccggccagccaagctctatgtctacatcaatgagctctgcactgttctcaaggcccactcagccaaaaagaagctgaacttggcccctgccgccaccacctccaatgagccctctgggaataaccctcccacacacctctccttggaccccacaaatgctgaaaacactgcctctcagtctccaaggacccgtggttcccggcggcagatccagcgtttggagcagctgctggcgctctatgtggcagagatccggcggctgcaggaaaaggagttggatctctcagaattggatgacccagactccgcatacctgcaggaggcacggttgaagcgtaagctgatccgcctctttgggcgactatgtgagctgaaagactgctcttcactgaccggccgtgtcatagagcagcgcatcccctaccgtggcacccgctacccagaggttaacaggcgcattgagcggctcatcaacaagccagggcctgataccttccctgactatggggatgtgcttcgggctgtagagaaggcagctgcccgacacagccttggcctcccccgacagcagctccagctcatggctcaggatgccttccgagatgtgggcatcaggttacaggagcgacgtcacctcgatctcatctacaactttggctgccacctcacagatgactataggccaggcgttgaccctgcactatcagatcctgtgttggcccggcgccttcgggaaaaccggagtttggccatgagtcggctggatgaggtcatctccaaatatgcaatgttgcaagacaaaagtgaggagggcgagagaaaaaagagaagagctcggctccaaggcacctcttcccactctgcagacacccccgaagcctccttggattctggtgagggccctagtggaatggcatcccaggggtgcccttctgcctccagagctgagacagatgacgaagacgatgaggagagtgatgaggaagaggaggaggaggaggaagaagaagaggaggaggccacagattctgaagaggaggaggatctggaacagatgcaggagggtcaggaggatgatgaagaggaggacgaagaggaagaagcagcagcaggtaaagatggagacaagagccccatgtcctcactacagatctccaatgaaaagaacctggaacctggcaaacagatcagcagatcttcaggggagcagcaaaacaaaggacgcatagtgtcaccatcgttactgtcagaagaacccctggccccctccagcatagatgctgaaagcaatggagaacagcctgaggagctgaccctggaggaagaaagccctgtgtctcagctctttgagctagagattgaagctttgcccctggataccccttcctctgtggagacggacatttcctcttccaggaagcaatcagaggagcccttcaccactgtcttagagaatggagcaggcatggtctcttctacttccttcaatggaggcgtctctcctcacaactggggagattctggtcccccctgcaaaaaatctcggaaggagaagaagcaaacaggatcagggccattaggaaacagctatgtggaaaggcaaaggtcagtgcatgagaagaatgggaaaaagatatgtaccctgcccagcccaccttcccccttggcttccttggccccagttgctgattcctccacgagggtggactctcccagccatggcctggtgaccagctccctctgcatcccttctccagcccggctgtcccaaaccccccattcacagcctcctcggcctggtacttgcaagacaagtgtggccacacaatgcgatccagaagagatcatcgtgctctcagactctgattagctgcctccccttctccctgcctccagaatgttctgggataacatttggaggaaggtgggaagcagatgactgaggaagggatggactaagctaatccccttttggtggtgtttctttaaaaaaaaaaaaagcttaagttttacacagaaacattaataaacaataaagttcttttcttactgta

SEQ ID NO: 125736 - DNA, 702 bp, Homo sapiens; identical to SEQ ID NO: 125733
  Payload ID: 4640
  Gene Symbol: DAXX
  Gene Name: death-domain associated protein
  ENST ID: ENST00000446403
  CDS Start-End: 168-702

SEQ ID NO: 125737 - DNA, 371 bp, Homo sapiens; identical to SEQ ID NO: 125729
  Payload ID: 4640
  Gene Symbol: DAXX
  Gene Name: death-domain associated protein
  ENST ID: ENST00000451280
  CDS Start-End: 228-371

SEQ ID NO: 125738 - DNA, 371 bp, Homo sapiens; identical to SEQ ID NO: 125728
  Payload ID: 4640
  Gene Symbol: DAXX
  Gene Name: death-domain associated protein
  ENST ID: ENST00000419051
  CDS Start-End: 228-371

SEQ ID NO: 125739 - DNA, 702 bp, Homo sapiens; identical to SEQ ID NO: 125733
  Payload ID: 4640
  Gene Symbol: DAXX
  Gene Name: death-domain associated protein
  ENST ID: ENST00000428268
  CDS Start-End: 168-702

SEQ ID NO: 125740 - DNA, 751 bp, Homo sapiens; identical to SEQ ID NO: 125732
  Payload ID: 4640
  Gene Symbol: DAXX
  Gene Name: death-domain associated protein
  ENST ID: ENST00000453407
  CDS Start-End: 363-751

SEQ ID NO: 125741 - DNA, 751 bp, Homo sapiens; identical to SEQ ID NO: 125732
  Payload ID: 4640
  Gene Symbol: DAXX
  Gene Name: death-domain associated protein
  ENST ID: ENST00000414272
  CDS Start-End: 363-751

SEQ ID NO: 125742 - DNA, 2608 bp, Homo sapiens; identical to SEQ ID NO: 125726
  Payload ID: 4640
  Gene Symbol: DAXX
  Gene Name: death-domain associated protein
  Uniprot ID: Q9UER7
  ENST ID: ENST00000455860
  CDS Start-End: 199-2421

SEQ ID NO: 125743 - DNA, 371 bp, Homo sapiens; identical to SEQ ID NO: 125728
  Payload ID: 4640
  Gene Symbol: DAXX
  Gene Name: death-domain associated protein
  ENST ID: ENST00000457553
  CDS Start-End: 228-371

SEQ ID NO: 125744 - DNA, 751 bp, Homo sapiens; identical to SEQ ID NO: 125732
  Payload ID: 4640
  Gene Symbol: DAXX
  Gene Name: death-domain associated protein
  ENST ID: ENST00000438332
  CDS Start-End: 363-751

SEQ ID NO: 125745 - DNA, 702 bp, Homo sapiens; identical to SEQ ID NO: 125733
  Payload ID: 4640
  Gene Symbol: DAXX
  Gene Name: death-domain associated protein
  ENST ID: ENST00000454197
  CDS Start-End: 168-702

SEQ ID NO: 125746 - DNA, 751 bp, Homo sapiens; identical to SEQ ID NO: 125732
  Payload ID: 4640
  Gene Symbol: DAXX
  Gene Name: death-domain associated protein
  ENST ID: ENST00000453931
  CDS Start-End: 363-751

SEQ ID NO: 125747 - DNA, 702 bp, Homo sapiens; identical to SEQ ID NO: 125733
  Payload ID: 4640
  Gene Symbol: DAXX
  Gene Name: death-domain associated protein
  ENST ID: ENST00000429531
  CDS Start-End: 168-702

SEQ ID NO: 125748 - DNA, 2464 bp, Homo sapiens
  Payload ID: 4640
  Gene Symbol: DAXX
  Gene Name: death-domain associated protein
  Uniprot ID: Q9UER7
  ENST ID: ENST00000613912
  CDS Start-End: 208-2274
acgacaatatggcggcgcttagttgcatgaaggcggaaactctgtgacttccggtccgtagtggggcctgcggtgggagtgggaaggaaggcggagggaaccatgcgaggttctgagaattgcggcgagggtcgcctcgagagacggtttctgagcaggaattctgaaatccccaccacttcctccctccgggggatttgatcccctatggccaccgctaacagcatcatcgtgctggatgatgatgacgaagatgaagcagctgctcagccagggccctcccacccactccccaatgcggcctcacctggggcagaagcccctagctcctctgagcctcatggggccagaggaagcagtagttcgggcggcaagaaatgctacaagctggagaatgagaagctgttcgaagagttccttgaactttgtaagatgcagacagcagaccaccctgaggtggtcccattcctctataaccggcagcaacgtgcccactctctgtttttggcctcggcggagttctgcaacatcctctctagggtcctgtctcgggcccggagccggccagccaagctctatgtctacatcaatgagctctgcactgttctcaaggcccactcagccaaaaagaagctgaacttggcccctgccgccaccacctccaatgagccctctgggaataaccctcccacacacctctccttggaccccacaaatgctgaaaacactgcctctcagtctccaaggacccgtggttcccggcggcagatccagcgtttggagcagctgctggcgctctatgtggcagagatccggcggctgcaggaaaaggagttggatctctcagaattggatgacccagactccgcatacctgcaggaggcacggttgaagcgtaagctgatccgcctctttgggcgactatgtgagctgaaagactgctcttcactgaccggccgtgtcatagagcagcgcatcccctaccgtggcacccgctacccagaggttaacaggcgcattgagcggctcatcaacaagccagggcctgataccttccctgactatggggatgtgcttcgggctgtagagaaggcagctgcccgacacagccttggcctcccccgacagcagctccagctcatggctcaggatgccttccgagatgtgggcatcaggttacaggagcgacgtcacctcgatctcatctacaactttggctgccacctcacagatgactataggccaggcgttgaccctgcactatcagatcctgtgttggcccggcgccttcgggaaaaccggagtttggccatgagtcggctggatgaggtcatctccaaatacgcaatgttgcaagacaaaagtgaggagggcgagagaaaaaagagaagagctcggctccaaggcacctcttcccactctgcagacacccccgaagcctccttggattctggtgagggccctagtggaatggcatcccaggggtgcccttctgcctccagagctgagacagatgacgaagacgatgaggagagtgatgaggaagaggaggaggaggaggaagaagaagaggaggaggccacagattctgaagaggaggaggatctggaacagatgcaggagggtcaggaggatgatgaagaggaggacgaagaggaagaagcagcagcaggtaaagatggagacaagagccccatgtcctcactacagatctccaatgaaaagaacctggaacctggcaaacagatcagcagatcttcaggggagcagcaaaacaaaggacgcatagtgtcaccatcgttactgtcagaagaacccctggccccctccagcatagatgctgaaagcaatggagaacagcctgaggagctgaccctggaggaagaaagccctgtgtctcagctctttgagctagagattgaagctttgcccctggataccccttcctctgtggagacggacatttcctcttccaggaagcaatcagaggagcccttcaccactgtcttagagaatggagcaggcatggtctcttctacttccttcaatggaggcgtctctcctcacaactggggagattctggtcccccctgcaaaaaatctcggaaggagaagaagcaaacaggatcagggccattaggaaacagctatgtggaaaggcaaagcccggctgtcccaaaccccccattcacagcctcctcggcctggtacttgcaagacaagtgtggccacacaatgcgatccagaagagatcatcgtgctctcagactctgattagctgcctccccttctccctgcctccagaatgttctgggataacatttggaggaaggtgggaagcagatgactgaggaagggatggactaagctaatccccttttggtggtgtttctttaaaaaaaaaaaaaaaagcttaagttttacacagaaacattaataaacaataaagttcttttcttactgt

SEQ ID NO: 125749 - DNA, 2463 bp, Homo sapiens
  Payload ID: 4640
  Gene Symbol: DAXX
  Gene Name: death-domain associated protein
  Uniprot ID: Q9UER7
  ENST ID: ENST00000619421
  CDS Start-End: 208-2274
acgacaatatggcggcgcttagttgcatgaaggcggaaactctgtgacttccggtccgtagtggggcctgcggtgggagtgggaaggaaggcggagggaaccatgcgaggttctgagaattgcggcgagggtcgcctcgagagacggtttctgagcaggaattctgaaatccccaccacttcctccctccgggggatttgatcccctatggccaccgctaacagcatcatcgtgctggatgatgatgacgaagatgaagcagctgctcagccagggccctcccacccactccccaatgcggcctcacctggggcagaagcccctagctcctctgagcctcatggggccagaggaagcagtagttcgggcggcaagaaatgctacaagctggagaatgagaagctgttcgaagagttccttgaactttgtaagatgcagacagcagaccaccctgaggtggtcccattcctctataaccggcagcaacgtgcccactctctgtttttggcctcggcggagttctgcaacatcctctctagggtcctgtctcgggcccggagccggccagccaagctctatgtctacatcaatgagctctgcactgttctcaaggcccactcagccaaaaagaagctgaacttggcccctgccgccaccacctccaatgagccctctgggaataaccctcccacacacctctccttggaccccacaaatgctgaaaacactgcctctcagtctccaaggacccgtggttcccggcggcagatccagcgtttggagcagctgctggcgctctatgtggcagagatccggcggctgcaggaaaaggagttggatctctcagaattggatgacccagactccgcatacctgcaggaggcacggttgaagcgtaagctgatccgcctctttgggcgactatgtgagctgaaagactgctcttcactgaccggccgtgtcatagagcagcgcatcccctaccgtggcacccgctacccagaggttaacaggcgcattgagcggctcatcaacaagccagggcctgataccttccctgactatggggatgtgcttcgggctgtagagaaggcagctgcccgacacagccttggcctcccccgacagcagctccagctcatggctcaggatgccttccgagatgtgggcatcaggttacaggagcgacgtcacctcgatctcatctacaactttggctgccacctcacagatgactataggccaggcgttgaccctgcactatcagatcctgtgttggcccggcgccttcgggaaaaccggagtttggccatgagtcggctggatgaggtcatctccaaatatgcaatgttgcaagacaaaagtgaggagggcgagagaaaaaagagaagagctcggctccaaggcacctcttcccactctgcagacacccccgaagcctccttggattctggtgagggccctagtggaatggcatcccaggggtgcccttctgcctccagagctgagacagatgacgaagacgatgaggagagtgatgaggaagaggaggaggaggaggaagaagaagaggaggaggccacagattctgaagaggaggaggatctggaacagatgcaggagggtcaggaggatgatgaagaggaggacgaagaggaagaagcagcagcaggtaaagatggagacaagagccccatgtcctcactacagatctccaatgaaaagaacctggaacctggcaaacagatcagcagatcttcaggggagcagcaaaacaaaggacgcatagtgtcaccatcgttactgtcagaagaacccctggccccctccagcatagatgctgaaagcaatggagaacagcctgaggagctgaccctggaggaagaaagccctgtgtctcagctctttgagctagagattgaagctttgcccctggataccccttcctctgtggagacggacatttcctcttccaggaagcaatcagaggagcccttcaccactgtcttagagaatggagcaggcatggtctcttctacttccttcaatggaggcgtctctcctcacaactggggagattctggtcccccctgcaaaaaatctcggaaggagaagaagcaaacaggatcagggccattaggaaacagctatgtggaaaggcaaagcccggctgtcccaaaccccccattcacagcctcctcggcctggtacttgcaagacaagtgtggccacacaatgcgatccagaagagatcatcgtgctctcagactctgattagctgcctccccttctccctgcctccagaatgttctgggataacatttggaggaaggtgggaagcagatgactgaggaagggatggactaagctaatccccttttggtggtgtttctttaaaaaaaaaaaaaaagcttaagttttacacagaaacattaataaacaataaagttcttttcttactgt

SEQ ID NO: 125750 - DNA, 2357 bp, Homo sapiens
  Payload ID: 4640
  Gene Symbol: DAXX
  Gene Name: death-domain associated protein
  Uniprot ID: Q9UER7
  ENST ID: ENST00000612868
  CDS Start-End: 174-2171
acgacaatatggcggcgcttagttgcatgaaggcggaaactctgtgacttccggtccgtagtggggcctgcggtgggagtgggaaggaaggcggagggaaccatgcgaggttctgagaattgcggcgagggtcgcctcgagagacggtttctgagttccttgaactttgtaagatgcagacagcagaccaccctgaggtggtcccattcctctataaccggcagcaacgtgcccactctctgtttttggcctcggcggagttctgcaacatcctctctagggtcctgtctcgggcccggagccggccagccaagctctatgtctacatcaatgagctctgcactgttctcaaggcccactcagccaaaaagaagctgaacttggcccctgccgccaccacctccaatgagccctctgggaataaccctcccacacacctctccttggaccccacaaatgctgaaaacactgcctctcagtctccaaggacccgtggttcccggcggcagatccagcgtttggagcagctgctggcgctctatgtggcagagatccggcggctgcaggaaaaggagttggatctctcagaattggatgacccagactccgcatacctgcaggaggcacggttgaagcgtaagctgatccgcctctttgggcgactatgtgagctgaaagactgctcttcactgaccggccgtgtcatagagcagcgcatcccctaccgtggcacccgctacccagaggttaacaggcgcattgagcggctcatcaacaagccagggcctgataccttccctgactatggggatgtgcttcgggctgtagagaaggcagctgcccgacacagccttggcctcccccgacagcagctccagctcatggctcaggatgccttccgagatgtgggcatcaggttacaggagcgacgtcacctcgatctcatctacaactttggctgccacctcacagatgactataggccaggcgttgaccctgcactatcagatcctgtgttggcccggcgccttcgggaaaaccggagtttggccatgagtcggctggatgaggtcatctccaaatacgcaatgttgcaagacaaaagtgaggagggcgagagaaaaaagagaagagctcggctccaaggcacctcttcccactctgcagacacccccgaagcctccttggattctggtgagggccctagtggaatggcatcccaggggtgcccttctgcctccagagctgagacagatgacgaagacgatgaggagagtgatgaggaagaggaggaggaggaggaagaagaagaggaggaggccacagattctgaagaggaggaggatctggaacagatgcaggagggtcaggaggatgatgaagaggaggacgaagaggaagaagcagcagcaggtaaagatggagacaagagccccatgtcctcactacagatctccaatgaaaagaacctggaacctggcaaacagatcagcagatcttcaggggagcagcaaaacaaaggacgcatagtgtcaccatcgttactgtcagaagaacccctggccccctccagcatagatgctgaaagcaatggagaacagcctgaggagctgaccctggaggaagaaagccctgtgtctcagctctttgagctagagattgaagctttgcccctggataccccttcctctgtggagacggacatttcctcttccaggaagcaatcagaggagcccttcaccactgtcttagagaatggagcaggcatggtctcttctacttccttcaatggaggcgtctctcctcacaactggggagattctggtcccccctgcaaaaaatctcggaaggagaagaagcaaacaggatcagggccattaggaaacagctatgtggaaaggcaaaggtcagtgcatgagaagaatgggaaaaagatatgtaccctgcccagcccaccttcccccttggcttccttggccccagttgctgattcctccacgagggtggactctcccagccatggcctggtgaccagctccctctgcatcccttctccagcccggctgtcccaaaccccccattcacagcctcctcggcctggtacttgcaagacaagtgtggccacacaatgcgatccagaagagatcatcgtgctctcagactctgattagctgcctccccttctccctgcctccagaatgttctgggataacatttggaggaaggtgggaagcagatgactgaggaagggatggactaagctaatccccttttggtggtgtttctttaaaaaaaaaaaaaaaagcttaagttttacacagaaacattaataaacaataaagttcttttcttactgt

SEQ ID NO: 125751 - DNA, 2356 bp, Homo sapiens
  Payload ID: 4640
  Gene Symbol: DAXX
  Gene Name: death-domain associated protein
  Uniprot ID: Q9UER7
  ENST ID: ENST00000617660
  CDS Start-End: 174-2171
acgacaatatggcggcgcttagttgcatgaaggcggaaactctgtgacttccggtccgtagtggggcctgcggtgggagtgggaaggaaggcggagggaaccatgcgaggttctgagaattgcggcgagggtcgcctcgagagacggtttctgagttccttgaactttgtaagatgcagacagcagaccaccctgaggtggtcccattcctctataaccggcagcaacgtgcccactctctgtttttggcctcggcggagttctgcaacatcctctctagggtcctgtctcgggcccggagccggccagccaagctctatgtctacatcaatgagctctgcactgttctcaaggcccactcagccaaaaagaagctgaacttggcccctgccgccaccacctccaatgagccctctgggaataaccctcccacacacctctccttggaccccacaaatgctgaaaacactgcctctcagtctccaaggacccgtggttcccggcggcagatccagcgtttggagcagctgctggcgctctatgtggcagagatccggcggctgcaggaaaaggagttggatctctcagaattggatgacccagactccgcatacctgcaggaggcacggttgaagcgtaagctgatccgcctctttgggcgactatgtgagctgaaagactgctcttcactgaccggccgtgtcatagagcagcgcatcccctaccgtggcacccgctacccagaggttaacaggcgcattgagcggctcatcaacaagccagggcctgataccttccctgactatggggatgtgcttcgggctgtagagaaggcagctgcccgacacagccttggcctcccccgacagcagctccagctcatggctcaggatgccttccgagatgtgggcatcaggttacaggagcgacgtcacctcgatctcatctacaactttggctgccacctcacagatgactataggccaggcgttgaccctgcactatcagatcctgtgttggcccggcgccttcgggaaaaccggagtttggccatgagtcggctggatgaggtcatctccaaatatgcaatgttgcaagacaaaagtgaggagggcgagagaaaaaagagaagagctcggctccaaggcacctcttcccactctgcagacacccccgaagcctccttggattctggtgagggccctagtggaatggcatcccaggggtgcccttctgcctccagagctgagacagatgacgaagacgatgaggagagtgatgaggaagaggaggaggaggaggaagaagaagaggaggaggccacagattctgaagaggaggaggatctggaacagatgcaggagggtcaggaggatgatgaagaggaggacgaagaggaagaagcagcagcaggtaaagatggagacaagagccccatgtcctcactacagatctccaatgaaaagaacctggaacctggcaaacagatcagcagatcttcaggggagcagcaaaacaaaggacgcatagtgtcaccatcgttactgtcagaagaacccctggccccctccagcatagatgctgaaagcaatggagaacagcctgaggagctgaccctggaggaagaaagccctgtgtctcagctctttgagctagagattgaagctttgcccctggataccccttcctctgtggagacggacatttcctcttccaggaagcaatcagaggagcccttcaccactgtcttagagaatggagcaggcatggtctcttctacttccttcaatggaggcgtctctcctcacaactggggagattctggtcccccctgcaaaaaatctcggaaggagaagaagcaaacaggatcagggccattaggaaacagctatgtggaaaggcaaaggtcagtgcatgagaagaatgggaaaaagatatgtaccctgcccagcccaccttcccccttggcttccttggccccagttgctgattcctccacgagggtggactctcccagccatggcctggtgaccagctccctctgcatcccttctccagcccggctgtcccaaaccccccattcacagcctcctcggcctggtacttgcaagacaagtgtggccacacaatgcgatccagaagagatcatcgtgctctcagactctgattagctgcctccccttctccctgcctccagaatgttctgggataacatttggaggaaggtgggaagcagatgactgaggaagggatggactaagctaatccccttttggtggtgtttctttaaaaaaaaaaaaaaagcttaagttttacacagaaacattaataaacaataaagttcttttcttactgt

SEQ ID NO: 125752 - DNA, 2462 bp, Homo sapiens
  Payload ID: 4640
  Gene Symbol: DAXX
  Gene Name: death-domain associated protein
  Uniprot ID: Q9UER7
  ENST ID: ENST00000620164
  CDS Start-End: 208-2274
acgacaatatggcggcgcttagttgcatgaaggcggaaactctgtgacttccggtccgtagtggggcctgcggtgggagtgggaaggaaggcggagggaaccatgcgaggttctgagaattgcggcgagggtcgcctcgagagacggtttctgagcaggaattctgaaatccccaccacttcctccctccgggggatttgatcccctatggccaccgctaacagcatcatcgtgctggatgatgatgacgaagatgaagcagctgctcagccagggccctcccacccactccccaatgcggcctcacctggggcagaagcccctagctcctctgagcctcatggggccagaggaagcagtagttcgggcggcaagaaatgctacaagctggagaatgagaagctgttcgaagagttccttgaactttgtaagatgcagacagcagaccaccctgaggtggtcccattcctctataaccggcagcaacgtgcccactctctgtttttggcctcggcggagttctgcaacatcctctctagggtcctgtctcgggcccggagccggccagccaagctctatgtctacatcaatgagctctgcactgttctcaaggcccactcagccaaaaagaagctgaacttggcccctgccgccaccacctccaatgagccctctgggaataaccctcccacacacctctccttggaccccacaaatgctgaaaacactgcctctcagtctccaaggacccgtggttcccggcggcagatccagcgtttggagcagctgctggcgctctatgtggcagagatccggcggctgcaggaaaaggagttggatctctcagaattggatgacccagactccgcatacctgcaggaggcacggttgaagcgtaagctgatccgcctctttgggcgactatgtgagctgaaagactgctcttcactgaccggccgtgtcatagagcagcgcatcccctaccgtggcacccgctacccagaggttaacaggcgcattgagcggctcatcaacaagccagggcctgataccttccctgactatggggatgtgcttcgggctgtagagaaggcagctgcccgacacagccttggcctcccccgacagcagctccagctcatggctcaggatgccttccgagatgtgggcatcaggttacaggagcgacgtcacctcgatctcatctacaactttggctgccacctcacagatgactataggccaggcgttgaccctgcactatcagatcctgtgttggcccggcgccttcgggaaaaccggagtttggccatgagtcggctggatgaggtcatctccaaatatgcaatgttgcaagacaaaagtgaggagggcgagagaaaaaagagaagagctcggctccaaggcacctcttcccactctgcagacacccccgaagcctccttggattctggtgagggccctagtggaatggcatcccaggggtgcccttctgcctccagagctgagacagatgacgaagacgatgaggagagtgatgaggaagaggaggaggaggaggaagaagaagaggaggaggccacagattctgaagaggaggaggatctggaacagatgcaggagggtcaggaggatgatgaagaggaggacgaagaggaagaagcagcagcaggtaaagatggagacaagagccccatgtcctcactacagatctccaatgaaaagaacctggaacctggcaaacagatcagcagatcttcaggggagcagcaaaacaaaggacgcatagtgtcaccatcgttactgtcagaagaacccctggccccctccagcatagatgctgaaagcaatggagaacagcctgaggagctgaccctggaggaagaaagccctgtgtctcagctctttgagctagagattgaagctttgcccctggataccccttcctctgtggagacggacatttcctcttccaggaagcaatcagaggagcccttcaccactgtcttagagaatggagcaggcatggtctcttctacttccttcaatggaggcgtctctcctcacaactggggagattctggtcccccctgcaaaaaatctcggaaggagaagaagcaaacaggatcagggccattaggaaacagctatgtggaaaggcaaagcccggctgtcccaaaccccccattcacagcctcctcggcctggtacttgcaagacaagtgtggccacacaatgcgatccagaagagatcatcgtgctctcagactctgattagctgcctccccttctccctgcctccagaatgttctgggataacatttggaggaaggtgggaagcagatgactgaggaagggatggactaagctaatccccttttggtggtgtttctttaaaaaaaaaaaaaagcttaagttttacacagaaacattaataaacaataaagttcttttcttactgt

SEQ ID NO: 125753 - DNA, 2357 bp, Homo sapiens; identical to SEQ ID NO: 125750
  Payload ID: 4640
  Gene Symbol: DAXX
  Gene Name: death-domain associated protein
  Uniprot ID: Q9UER7
  ENST ID: ENST00000612888
  CDS Start-End: 174-2171

SEQ ID NO: 125754 - DNA, 2464 bp, Homo sapiens; identical to SEQ ID NO: 125748
  Payload ID: 4640
  Gene Symbol: DAXX
  Gene Name: death-domain associated protein
  Uniprot ID: Q9UER7
  ENST ID: ENST00000616312
  CDS Start-End: 208-2274

SEQ ID NO: 125755 - DNA, 2459 bp, Homo sapiens
  Payload ID: 4640
  Gene Symbol: DAXX
  Gene Name: death-domain associated protein
  Uniprot ID: Q9UER7
  ENST ID: ENST00000622655
  CDS Start-End: 206-2272
gacaatatggcggcgcttagttgcatgaaggcggaaactctgtgacttccggtccgtagtggggcctgcggtgggagtgggaaggaaggcggagggaaccatgcgaggttctgagaattgcggcgagggtcgcctcgagagacggtttctgagcaggaattctgaaatccccaccacttcctccctccgggggatttgatcccctatggccaccgctaacagcatcatcgtgctggatgatgatgacgaagatgaagcagctgctcagccagggccctcccacccactccccaatgcggcctcacctggggcagaagcccctagctcctctgagcctcatggggccagaggaagcagtagttcgggcggcaagaaatgctacaagctggagaatgagaagctgttcgaagagttccttgaactttgtaagatgcagacagcagaccaccctgaggtggtcccattcctctataaccggcagcaacgtgcccactctctgtttttggcctcggcggagttctgcaacatcctctctagggtcctgtctcgggcccggagccggccagccaagctctatgtctacatcaatgagctctgcactgttctcaaggcccactcagccaaaaagaagctgaacttggcccctgccgccaccacctccaatgagccctctgggaataaccctcccacacacctctccttggaccccacaaatgctgaaaacactgcctctcagtctccaaggacccgtggttcccggcggcagatccagcgtttggagcagctgctggcgctctatgtggcagagatccggcggctgcaggaaaaggagttggatctctcagaattggatgacccagactccgcatacctgcaggaggcacggttgaagcgtaagctgatccgcctctttgggcgactatgtgagctgaaagactgctcttcactgaccggccgtgtcatagagcagcgcatcccctaccgtggcacccgctacccagaggttaacaggcgcattgagcggctcatcaacaagccagggcctgataccttccctgactatggggatgtgcttcgggctgtagagaaggcagctgcccgacacagccttggcctcccccgacagcagctccagctcatggctcaggatgccttccgagatgtgggcatcaggttacaggagcgacgtcacctcgatctcatctacaactttggctgccacctcacagatgactataggccaggcgttgaccctgcactatcagatcctgtgttggcccggcgccttcgggaaaaccggagtttggccatgagtcggctggatgaggtcatctccaaatatgcaatgttgcaagacaaaagtgaggagggcgagagaaaaaagagaagagctcggctccaaggcacctcttcccactctgcagacacccccgaagcctccttggattctggtgagggccctagtggaatggcatcccaggggtgcccttctgcctccagagctgagacagatgacgaagacgatgaggagagtgatgaggaagaggaggaggaggaggaagaagaagaggaggaggccacagattctgaagaggaggaggatctggaacagatgcaggagggtcaggaggatgatgaagaggaggacgaagaggaagaagcagcagcaggtaaagatggagacaagagccccatgtcctcactacagatctccaatgaaaagaacctggaacctggcaaacagatcagcagatcttcaggggagcagcaaaacaaaggacgcatagtgtcaccatcgttactgtcagaagaacccctggccccctccagcatagatgctgaaagcaatggagaacagcctgaggagctgaccctggaggaagaaagccctgtgtctcagctctttgagctagagattgaagctttgcccctggataccccttcctctgtggagacggacatttcctcttccaggaagcaatcagaggagcccttcaccactgtcttagagaatggagcaggcatggtctcttctacttccttcaatggaggcgtctctcctcacaactggggagattctggtcccccctgcaaaaaatctcggaaggagaagaagcaaacaggatcagggccattaggaaacagctatgtggaaaggcaaagcccggctgtcccaaaccccccattcacagcctcctcggcctggtacttgcaagacaagtgtggccacacaatgcgatccagaagagatcatcgtgctctcagactctgattagctgcctccccttctccctgcctccagaatgttctgggataacatttggaggaaggtgggaagcagatgactgaggaagggatggactaagctaatccccttttggtggtgtttctttaaaaaaaaaaaaagcttaagttttacacagaaacattaataaacaataaagttcttttcttactgt

SEQ ID NO: 125756 - DNA, 2666 bp, Homo sapiens
  Payload ID: 4641
  Gene Symbol: DBR1
  Gene Name: debranching RNA lariats 1
  Uniprot ID: Q9UK59
  ENST ID: ENST00000260803
  CDS Start-End: 155-1789
gatctggaaaccggaagtgaattattttgcaggagtctacacccaggcggtggctatacttattaaagttggcgggagctgagcgatcagtcggtcctgggctggctgtggtgtagggcgttgcaggcagcgctcacctcctcaggccggcagaatgcgggtggctgtggctggctgctgccacggcgagctggataagatctatgagacgctggcgctggcagagcggcgcggcccggggcctgtcgacctcttgctgtgctgcggcgacttccaggcggtgcgcaacgaggcggatctacgctgcatggccgtgccgcccaagtatcgtcacatgcaaaccttctacaggtattactctggagagaaaaaggctccagttctcacgctcttcattgggggaaaccatgaagcctcaaatcatttgcaagagttaccctatggtggctgggtggcaccaaacatttattatttaggtttggctggtgtggtaaaataccgaggtgtaaggatcggtggaatctctggtatctttaaatctcatgactatcgaaaaggtcattttgagtgccccccttataattcatctacaatcaggagtatatatcatgtgagaaatattgaagtctataaattaaaacagctgaagcagcctatagatatattcttgtctcatgattggccaagaagtatatatcattatggaaataagaagcaacttcttaagactaaatcttttttccgacaagaagtggaaaataacacattaggaagtccagctgcctcagagcttttagagcatctcaaacctacttattggttttctgcccaccttcatgtgaagtttgccgccttgatgcagcatcaggcaaaggataaaggacagacagccagagcaaccaaatttttagccttggacaaatgcttaccacatagagattttcttcagatattagagatagaacatgaccccagtgctcctgattacttggaatatgatattgaatggctcactattctcagggctacggatgatcttattaatgtgactgggcgcctgtggaatatgccagaaaataatggcctgcatgcaaggtgggattatagtgcaacagaagaaggtatgaaagaagtattggaaaaattgaatcatgatctcaaggttccatgtaactttagtgtaacagctgcttgttatgatcctagcaagccacagacacaaatgcagctgattcataggatcaatcctcagacaactgaattttgtgcccaacttggcatcatagacatcaatgttaggcttcagaagtccaaggaagaacatcatgtgtgtggtgaatatgaagaacaggatgatgtggagagtaatgactctggagaagaccagagtgaatataatacagacacatctgctctgtcttctattaatccagatgaaataatgttagatgaagaagaagatgaagatagtattgtaagtgcacatagtggcatgaatacaccatcggtagaaccttctgatcaagcttctgagttttctgcaagtttctctgatgtcaggatcttgccaggctctatgattgtatcttctgatgatacggtggattccacaattgatagagaggggaaacctggtgggactgtggagtcagggaatggagaggacttaaccaaggtgccattgaagaggctgagtgatgaacatgaacctgaacaaagaaagaaaattaagaggaggaatcaagccatttacgctgcagtggatgatgatgatgacgatgcagcttaagatgatttacttgttttgtttttgtgtttgttttgtttttttgagatggagtttcactcttgtcacctagactggagtgcaatggcgtgatctcggctcaccgcaacctccgcctcccaggttcaagcaattctcctgcctcagcctcccaagtaggtgggactacaggtgcccgccaccacacccggctaatttttgcatttttagtaatgacagggtttcaccgtgttggccaggctggtctccaactcctgacctcaggcgatccacctgtcttggccttctaaagtgctgggattacaggcgtgagccactgtgcctggccgacaatttacttgtcttagtattatatgtagatatgtgattttttgagactgtatttttagagctgaatttttgactaaagacttaactttataataatgaagatacattagagaattttagttagatattgactttatctttaggcttttgtatgtttcagatgcaaacatattaaagtttcatatatttacttgactgggtatctttttttttgaagacatacattattcacttccatttttacaataaacacttacttaacatctactctgtgccaagcactctgctataatatgggaccataaagatgagtaagacaaggatttttgcctccaaggacttgttatcactgtaaacattttgatgtatacaatatggctatattatattttgttttataaaatcaagtcattgtatatattatgatgtatgctttcttttcatttattataaatatttttcctgatcagcttttaatatctgtcaaataaaaattgaaattgaagatggtatataagatttcaggaaataaactactctgaatactaaa

SEQ ID NO: 125757 - DNA, 838 bp, Homo sapiens
  Payload ID: 4641
  Gene Symbol: DBR1
  Gene Name: debranching RNA lariats 1
  ENST ID: ENST00000477557
  CDS Start-End: 65-421
tcggtcctgggctggctgtggtgtagggcgttgcaggcagcgctcacctcctcaggccggcagaatgcgggtggctgtggctggctgctgccacggcgagctggataagatctatgagacgctggcgctggcagagcggcgcggcccggggcctgtcgacctcttgctgtgctgcggcgacttccaggcggtgcgcaacgaggcggatctacgctgcatggccgtgccgcccaagtatcgtcacatgcaaaccttctacaggtattactctggagagaaaaaggctccagttctcacgctcttcattgggggaaaccatgaagcctcaaatcatttgcaagagttaccctatggtggctgggtggcaccaaacatttattatttagctgaagcagcctatagatatattcttgtctcatgattggccaagaagtatatatcattatggaaataagaagcaacttcttaagactaaatcttttttccgacaagaagtggaaaataacacattaggaagtccagctgcctcagagcttttagagcatctcaaacctacttattggttttctgcccaccttcatgtgaagtttgccgccttgatgcagcatcaggcaaaggataaaggacagacagccagagcaaccaaatttttagccttggacaaatgcttaccacatagagattttcttcagatattagagatagaacatgaccccagtgctcctgattacttggaatatgatattgaatggctcactattctcagggctacggatgatcttattaatgtgactgggcgcctgtggaatatgccagaaaataatggcctgcatgcaag

SEQ ID NO: 125758 - DNA, 1479 bp, Homo sapiens
  Payload ID: 4642
  Gene Symbol: DCPS
  Gene Name: decapping enzyme, scavenger
  Uniprot ID: Q96C86
  ENST ID: ENST00000263579
  CDS Start-End: 330-1343
gggcgtcttcggctcccaccccggggcgtgggcctgggggtccctcttcactgcgcagccacctctagcccgccgctttcgggactctcagccttcttttcccttccctgagggccggccggcaccacaacggggccaaaggcagtaactcggttgaaaggcgcgccctgggacaggtcagcgggctccgccatgcgcggcacgcatcccgcaggagcgggtgccagagcagggtaggccgggagttagcagcccagccaggccgctggactcgggctaggggcggggccagcgcagggggcgcaggcgcacaccgcctccgcggcagcatggcggacgcagctcctcaactaggcaagaggaagcgcgaattggacgtggaggaggcccacgccgccagcacagaggaaaaggaggcaggagttggaaatggtacctgtgctcctgtccgcttaccgttctccggcttcagactgcagaaggtgctgagggagtctgcgcgggacaaaatcattttcctacacgggaaggtgaatgaggcctctggggatggggatggagaggatgccgttgtgatcctggagaagacgccatttcaggtggaacaggtggctcagctcctgacgggcagccctgagctccagttgcagttctccaatgatatctacagcacctatcacttgttccctccaagacaactgaatgatgtaaagacgaccgtggtttaccctgccacagagaaacacctgcagaagtacctgcgccaggacctccgcctgatccgagagacgggagatgactacaggaatattactttaccccacctggagtcccagagcctcagcatccagtgggtgtataacattctcgacaagaaggctgaagcggaccggattgttttcgagaacccagatccctctgatggttttgtcctcatccctgacctcaagtggaaccaacagcagctcgatgacttgtacttgatcgccatctgccatcgccggggcatcagatccctacgcgaccttactccggagcacttgccgctgctcaggaacatcctccaccaggggcaggaggccatcctgcagcgctaccggatgaagggagaccatctgcgagtatacctgcactacctgccctcctactaccacctgcatgtgcacttcaccgccctgggcttcgaggcccccggctcaggcgtggagcgggcccacctgctggctgaggtgatcgagaacttggagtgtgaccctaggcactaccagcagcgcacgctcaccttcgccctcagggctgacgaccccctgctcaagctcttgcaggaggctcagcaaagctgaattaactcaggcagaagagcacagatgtgtgggattgggggaggagtggggacaagattttttatctccaagtgaattttctaaaaatgtattttataccggcttattcctagtattgaataaactagcgggctca

SEQ ID NO: 125759 - DNA, 1628 bp, Homo sapiens
  Payload ID: 4643
  Gene Symbol: DXO
  Gene Name: decapping exoribonuclease
  Uniprot ID: O77932
  ENST ID: ENST00000337523
  CDS Start-End: 371-1561
gtgatgacgaaaggagcgtcaacttgtcgtccctcaggcccgtcagtgctgggaggggcggtggcgacgcacataccagcatcacctccgccaggccgggccccacgccggccgcggattggctccctccaagggcacgcacgcccggggactcgttggcggcgtggaggggcgccggtggccacgttggtgtcaacctccttcgtgaagctcacacctcccccgccccgggaggggtttgcccgccactgtcgctgaatgattgcatcatcgaaagcagaaaaccacttttgcatccttcggcctctggcgtgcctgccatgacgtcatagctctgcggaggtggaagttggggagctttgaggacctcatggatcccagggggaccaagagaggagctgagaagacagaggtagctgagcctcggaacaaactacctcgtccagcaccttctctgcccacagaccctgccctctactctgggccctttcctttctaccggcgcccttcggaactgggctgcttctccctggatgctcaacgccagtaccatggagatgcccgagccctgcgctactatagcccaccccccactaacggtccaggccccaactttgacctcagagacggatacccggatcgataccagccccgggacgaggaggtccaggaaaggctggaccacctgctgtgctggctcctggaacaccgaggccggttggaggggggtccaggctggctggcagaggccatagtgacgtggcgggggcacctgacaaaactgctgacgacaccgtatgagcggcaggagggctggcagctggcagcctcccggttccagggaacactatacctgagtgaagtggagacaccgaacgctcgggcccagaggcttgctcggccaccgctcctccgggagcttatgtacatgggatacaaatttgagcagtacatgtgtgcagacaaacctggaagctccccagacccctctggggaggttaacaccaacgtggccttctgctctgtgctacgcagccgcctgggaagccaccctctgctcttctcaggggaggtagactgcacagacccccaagccccatccacacagcccccaacctgctatgtggagctcaagacctccaaggagatgcacagccctggccaatggaggagtttctacagacacaagctcctgaaatggtgggctcagtcattcctcccaggggtcccgaatgttgttgctggcttccgtaacccagacggttttgtctcttccctcaagacctttcctaccatgaagatgtttgaatatgtcaggaatgaccgtgacggctggaatccctctgtgtgcatgaacttctgtgccgccttccttagctttgcccagagcacggttgtccaggatgaccccaggctcgttcatctcttctcttgggagcctggcggcccagtcaccgtgtctgtacaccaagatgcaccttacgccttcctgcccatatggtatgtggaagctatgactcaggacctcccatcaccccccaagactccctctcccaaatagtaatgctttagagggaggcagtcatatctctgtgtgcagataataaaagcatatttctaagaggttc

SEQ ID NO: 125760 - DNA, 1667 bp, Homo sapiens
  Payload ID: 4643
  Gene Symbol: DXO
  Gene Name: decapping exoribonuclease
  Uniprot ID: O77932
  ENST ID: ENST00000375349
  CDS Start-End: 413-1603
gatgacgaaaggagcgtcaacttgtcgtccctcaggcccgtcagtgctgggaggggcggtggcgacgcacataccagcatcacctccgccaggccgggccccacgccggccgcggattggctccctccaagggcacgcacgcccggggactcgttggcggcgtggaggggcgccggtggccacgttggtgtcaacctccttcgtgaagctcacacctcccccgccccgggaggggtttgcccgccactgtcgctgaatgattgcatcatcgaaagcagaaaaccacttttgcatccttcggcctctggcgtgcctgccatgacgtcatagctctgcggaggtggaagttggggagctttgaggcctcctctgtagaatggaaactctgtacccctgcttgtcttaggacctcatggatcccagggggaccaagagaggagctgagaagacagaggtagctgagcctcggaacaaactacctcgtccagcaccttctctgcccacagaccctgccctctactctgggccctttcctttctaccggcgcccttcggaactgggctgcttctccctggatgctcaacgccagtaccatggagatgcccgagccctgcgctactatagcccaccccccactaacggtccaggccccaactttgacctcagagacggatacccggatcgataccagccccgggacgaggaggtccaggaaaggctggaccacctgctgtgctggctcctggaacaccgaggccggttggaggggggtccaggctggctggcagaggccatagtgacgtggcgggggcacctgacaaaactgctgacgacaccgtatgagcggcaggagggctggcagctggcagcctcccggttccagggaacactatacctgagtgaagtggagacaccgaacgctcgggcccagaggcttgctcggccaccgctcctccgggagcttatgtacatgggatacaaatttgagcagtacatgtgtgcagacaaacctggaagctccccagacccctctggggaggttaacaccaacgtggccttctgctctgtgctacgcagccgcctgggaagccaccctctgctcttctcaggggaggtagactgcacagacccccaagccccatccacacagcccccaacctgctatgtggagctcaagacctccaaggagatgcacagccctggccaatggaggagtttctacagacacaagctcctgaaatggtgggctcagtcattcctcccaggggtcccgaatgttgttgctggcttccgtaacccagacggttttgtctcttccctcaagacctttcctaccatgaagatgtttgaatatgtcaggaatgaccgtgacggctggaatccctctgtgtgcatgaacttctgtgccgccttccttagctttgcccagagcacggttgtccaggatgaccccaggctcgttcatctcttctcttgggagcctggcggcccagtcaccgtgtctgtacaccaagatgcaccttacgccttcctgcccatatggtatgtggaagctatgactcaggacctcccatcaccccccaagactccctctcccaaatagtaatgctttagagggaggcagtcatatctctgtgtgcagataataaaagcatatttctaagagg

SEQ ID NO: 125761 - DNA, 1533 bp, Homo sapiens
  Payload ID: 4643
  Gene Symbol: DXO
  Gene Name: decapping exoribonuclease
  Uniprot ID: O77932
  ENST ID: ENST00000375356
  CDS Start-End: 310-1500
ggcgtgcctgccatgacgtcatagctctgcggaggtggaagttggggagctttgaggtaactggattcttgatctgagcgcagacgtccttcctaacctcactgcatttggaggacctggagggagggtgggtgaagggcaaggaaagaggcaggatgagagcttggccgcggtggcgtctgaggggcctgaatgtttcaaggccagagcctggcgatcaggtggctcgcttagtcctaaaccagtcatccttctccaggcctcctctgtagaatggaaactctgtacccctgcttgtcttaggacctcatggatcccagggggaccaagagaggagctgagaagacagaggtagctgagcctcggaacaaactacctcgtccagcaccttctctgcccacagaccctgccctctactctgggccctttcctttctaccggcgcccttcggaactgggctgcttctccctggatgctcaacgccagtaccatggagatgcccgagccctgcgctactatagcccaccccccactaacggtccaggccccaactttgacctcagagacggatacccggatcgataccagccccgggacgaggaggtccaggaaaggctggaccacctgctgtgctggctcctggaacaccgaggccggttggaggggggtccaggctggctggcagaggccatagtgacgtggcgggggcacctgacaaaactgctgacgacaccgtatgagcggcaggagggctggcagctggcagcctcccggttccagggaacactatacctgagtgaagtggagacaccgaacgctcgggcccagaggcttgctcggccaccgctcctccgggagcttatgtacatgggatacaaatttgagcagtacatgtgtgcagacaaacctggaagctccccagacccctctggggaggttaacaccaacgtggccttctgctctgtgctacgcagccgcctgggaagccaccctctgctcttctcaggggaggtagactgcacagacccccaagccccatccacacagcccccaacctgctatgtggagctcaagacctccaaggagatgcacagccctggccaatggaggagtttctacagacacaagctcctgaaatggtgggctcagtcattcctcccaggggtcccgaatgttgttgctggcttccgtaacccagacggttttgtctcttccctcaagacctttcctaccatgaagatgtttgaatatgtcaggaatgaccgtgacggctggaatccctctgtgtgcatgaacttctgtgccgccttccttagctttgcccagagcacggttgtccaggatgaccccaggctcgttcatctcttctcttgggagcctggcggcccagtcaccgtgtctgtacaccaagatgcaccttacgccttcctgcccatatggtatgtggaagctatgactcaggacctcccatcaccccccaagactccctctcccaaatagtaatgctttagagggaggcagtcatatctctgt

SEQ ID NO: 125762 - DNA, 1628 bp, Homo sapiens; identical to SEQ ID NO: 125759
  Payload ID: 4643
  Gene Symbol: DXO
  Gene Name: decapping exoribonuclease
  Uniprot ID: O77932
  ENST ID: ENST00000383330
  CDS Start-End: 371-1561

SEQ ID NO: 125763 - DNA, 1554 bp, Homo sapiens
  Payload ID: 4643
  Gene Symbol: DXO
  Gene Name: decapping exoribonuclease
  Uniprot ID: O77932
  ENST ID: ENST00000399936
  CDS Start-End: 297-1487
tgacgtcatagctctgcggaggtggaagttggggagctttgaggtaactggattcttgatctgagcgcagacgtccttcctaacctcactgcatttggaggacctggagggagggtgggtgaagggcaaggaaagaggcaggatgagagcttggccgcggtggcgtctgaggggcctgaatgtttcaaggccagagcctggcgatcaggtggctcgcttagtcctaaaccagtcatccttctccaggcctcctctgtagaatggaaactctgtacccctgcttgtcttaggacctcatggatcccagggggaccaagagaggagctgagaagacagaggtagctgagcctcggaacaaactacctcgtccagcaccttctctgcccacagaccctgccctctactctgggccctttcctttctaccggcgcccttcggaactgggctgcttctccctggatgctcaacgccagtaccatggagatgcccgagccctgcgctactatagcccaccccccactaacggtccaggccccaactttgacctcagagacggatacccggatcgataccagccccgggacgaggaggtccaggaaaggctggaccacctgctgtgctggctcctggaacaccgaggccggttggaggggggtccaggctggctggcagaggccatagtgacgtggcgggggcacctgacaaaactgctgacgacaccgtatgagcggcaggagggctggcagctggcagcctcccggttccagggaacactatacctgagtgaagtggagacaccgaacgctcgggcccagaggcttgctcggccaccgctcctccgggagcttatgtacatgggatacaaatttgagcagtacatgtgtgcagacaaacctggaagctccccagacccctctggggaggttaacaccaacgtggccttctgctctgtgctacgcagccgcctgggaagccaccctctgctcttctcaggggaggtagactgcacagacccccaagccccatccacacagcccccaacctgctatgtggagctcaagacctccaaggagatgcacagccctggccaatggaggagtttctacagacacaagctcctgaaatggtgggctcagtcattcctcccaggggtcccgaatgttgttgctggcttccgtaacccagacggttttgtctcttccctcaagacctttcctaccatgaagatgtttgaatatgtcaggaatgaccgtgacggctggaatccctctgtgtgcatgaacttctgtgccgccttccttagctttgcccagagcacggttgtccaggatgaccccaggctcgttcatctcttctcttgggagcctggcggcccagtcaccgtgtctgtacaccaagatgcaccttacgccttcctgcccatatggtatgtggaagctatgactcaggacctcccatcaccccccaagactccctctcccaaatagtaatgctttagagggaggcagtcatatctctgtgtgcagataataaaagcatatttctaagaggttc

SEQ ID NO: 125764 - DNA, 1516 bp, Homo sapiens
  Payload ID: 4643
  Gene Symbol: DXO
  Gene Name: decapping exoribonuclease
  Uniprot ID: O77932
  ENST ID: ENST00000399937
  CDS Start-End: 259-1449
tggcggcgtggaggggcgccggtggccacgttggtgtcaacctccttcgtgaagctcacacctcccccgccccgggaggggtttgcccgccactgtcgctgaatgattgcatcatcgaaagcagaaaaccacttttgcatccttcggcctctggcgtgcctgccatgacgtcatagctctgcggaggtggaagttggggagctttgaggcctcctctgtagaatggaaactctgtacccctgcttgtcttaggacctcatggatcccagggggaccaagagaggagctgagaagacagaggtagctgagcctcggaacaaactacctcgtccagcaccttctctgcccacagaccctgccctctactctgggccctttcctttctaccggcgcccttcggaactgggctgcttctccctggatgctcaacgccagtaccatggagatgcccgagccctgcgctactatagcccaccccccactaacggtccaggccccaactttgacctcagagacggatacccggatcgataccagccccgggacgaggaggtccaggaaaggctggaccacctgctgtgctggctcctggaacaccgaggccggttggaggggggtccaggctggctggcagaggccatagtgacgtggcgggggcacctgacaaaactgctgacgacaccgtatgagcggcaggagggctggcagctggcagcctcccggttccagggaacactatacctgagtgaagtggagacaccgaacgctcgggcccagaggcttgctcggccaccgctcctccgggagcttatgtacatgggatacaaatttgagcagtacatgtgtgcagacaaacctggaagctccccagacccctctggggaggttaacaccaacgtggccttctgctctgtgctacgcagccgcctgggaagccaccctctgctcttctcaggggaggtagactgcacagacccccaagccccatccacacagcccccaacctgctatgtggagctcaagacctccaaggagatgcacagccctggccaatggaggagtttctacagacacaagctcctgaaatggtgggctcagtcattcctcccaggggtcccgaatgttgttgctggcttccgtaacccagacggttttgtctcttccctcaagacctttcctaccatgaagatgtttgaatatgtcaggaatgaccgtgacggctggaatccctctgtgtgcatgaacttctgtgccgccttccttagctttgcccagagcacggttgtccaggatgaccccaggctcgttcatctcttctcttgggagcctggcggcccagtcaccgtgtctgtacaccaagatgcaccttacgccttcctgcccatatggtatgtggaagctatgactcaggacctcccatcaccccccaagactccctctcccaaatagtaatgctttagagggaggcagtcatatctctgtgtgcagataataaaagcatatttctaagaggttc

SEQ ID NO: 125765 - DNA, 1628 bp, Homo sapiens
  Payload ID: 4643
  Gene Symbol: DXO
  Gene Name: decapping exoribonuclease
  Uniprot ID: O77932
  ENST ID: ENST00000414092
  CDS Start-End: 371-1561
gtgatgacgaaaggagcgtcaacttgtcgtccctcaggcccgtcagtgctgggaggggcggtggcgacgcacataccagcatcacctccgccaggccgggccccacgccggccgcggattggctccctccaagggcacgcacgcccggggactcgttggcggcgtggaggggcgccggtggccacgttggtgtcaacctccttcgtgaagctcacacctcccccgccccgggaggggtttgcccgccactgtcgctgaatgattgcatcatcgaaagcagaaaaccacttttgcatccttcggcctctggcgtgcctgccatgacgtcatagctctgcggaggtggaagttggggagctttgaggacctcatggatcccagggggaccaagagaggagctgagaagacagaggtagctgagcctcggaacaaactacctcgtccagcaccttctctgcccacagaccctgccctctactctgggccctttcctttctaccggcgcccttcggaactgggctgcttctccctggatgctcaacgccagtaccatggagatgcccgagccctgcgctactatagcccaccccccactaacggtccaggccccaactttgacctcagagacggatacccggatcgataccagccccgggacgaggaggtccaggaaaggctggaccacctgctgtgctggctcctggaacaccgaggccggttggaggggggtccaggctggctggcagaggccatagtgacgtggcgggggcacctgacaaaactgctgacgacaccgtatgagcggcaggagggctggcagctggcagcctcccggttccagggaacactatacctgagtgaagtggagacaccgaacgctcgggcccagaggcttgctcggccaccgctcctccgggagcttatgtacatgggatacaaatttgagcagtacatgtgtgcagacaaacctggaagctccccagacccctctggggaggttaacaccaacgtggccttctgctctgtgctacgcagccgcctgggaagccaccctctgctcttctcaggggaggtagactgcacagacccccaagccccatccacacagcccccgacctgctatgtggagctcaagacctccaaggagatgcaaagccctggccaatggaggagtttctacagacacaagctcctgaaatggtgggctcagtcattcctcccaggggtcccgaatgttgttgctggcttccgtaacccagacggttttgtctcttccctcaagacctttcctaccatgaagatgtttgaatatgtcaggaatgaccgtgacggctggaatccctctgtgtgcatgaacttctgtgccgccttccttagctttgcccagagcacggttgtccaggatgaccccaggctcgttcatctcttctcttgggagcctggcggcccagtcaccgtgtctgtacaccaagatgcaccttacgccttcctgcccatatggtatgtggaagctatgactcaggacctcccatcaccccccaagactccctctcccaaatagtaatgctttagagggaggcagtcatatctctgtgtgcagataataaaagcatatttctaagaggttc

SEQ ID NO: 125766 - DNA, 1516 bp, Homo sapiens; identical to SEQ ID NO: 125764
  Payload ID: 4643
  Gene Symbol: DXO
  Gene Name: decapping exoribonuclease
  Uniprot ID: O77932
  ENST ID: ENST00000446967
  CDS Start-End: 259-1449

SEQ ID NO: 125767 - DNA, 1628 bp, Homo sapiens; identical to SEQ ID NO: 125759
  Payload ID: 4643
  Gene Symbol: DXO
  Gene Name: decapping exoribonuclease
  Uniprot ID: O77932
  ENST ID: ENST00000419797
  CDS Start-End: 371-1561

SEQ ID NO: 125768 - DNA, 1516 bp, Homo sapiens; identical to SEQ ID NO: 125764
  Payload ID: 4643
  Gene Symbol: DXO
  Gene Name: decapping exoribonuclease
  Uniprot ID: O77932
  ENST ID: ENST00000426498
  CDS Start-End: 259-1449

SEQ ID NO: 125769 - DNA, 1516 bp, Homo sapiens; identical to SEQ ID NO: 125764
  Payload ID: 4643
  Gene Symbol: DXO
  Gene Name: decapping exoribonuclease
  Uniprot ID: O77932
  ENST ID: ENST00000439989
  CDS Start-End: 259-1449

SEQ ID NO: 125770 - DNA, 1554 bp, Homo sapiens
  Payload ID: 4643
  Gene Symbol: DXO
  Gene Name: decapping exoribonuclease
  Uniprot ID: O77932
  ENST ID: ENST00000458308
  CDS Start-End: 297-1487
tgacgtcatagctctgcggaggtggaagttggggagctttgaggtaactggattcttgatctgagcgcagacgtccttcctaacctcactgcatttggaggacctggagggagggtgggtgaagggcaaggaaagaggcaggatgagagcttggccgcggtggcgtctgaggggcctgaatgtttcaaggccagagcctggcgatcaggtggctcgcttagtcctaaaccagtcatccttctccaggcctcctctgtagaatggaaactctgtacccctgcttgtcttaggacctcatggatcccagggggaccaagagaggagctgagaagacagaggtagctgagcctcggaacaaactacctcgtccagcaccttctctgcccacagaccctgccctctactctgggccctttcctttctaccggcgcccttcggaactgggctgcttctccctggatgctcaacgccagtaccatggagatgcccgagccctgcgctactatagcccaccccccactaacggtccaggccccaactttgacctcagagacggatacccggatcgataccagccccgggacgaggaggtccaggaaaggctggaccacctgctgtgctggctcctggaacaccgaggccggttggaggggggtccaggctggctggcagaggccatagtgacgtggcgggggcacctgacaaaactgctgacgacaccgtatgagcggcaggagggctggcagctggcagcctcccggttccagggaacactatacctgagtgaagtggagacaccgaacgctcgggcccagaggcttgctcggccaccgctcctccgggagcttatgtacatgggatacaaatttgagcagtacatgtgtgcagacaaacctggaagctccccagacccctctggggaggttaacaccaacgtggccttctgctctgtgctacgcagccgcctgggaagccaccctctgctcttctcaggggaggtagactgcacagacccccaagccccatccacacagcccccgacctgctatgtggagctcaagacctccaaggagatgcaaagccctggccaatggaggagtttctacagacacaagctcctgaaatggtgggctcagtcattcctcccaggggtcccgaatgttgttgctggcttccgtaacccagacggttttgtctcttccctcaagacctttcctaccatgaagatgtttgaatatgtcaggaatgaccgtgacggctggaatccctctgtgtgcatgaacttctgtgccgccttccttagctttgcccagagcacggttgtccaggatgaccccaggctcgttcatctcttctcttgggagcctggcggcccagtcaccgtgtctgtacaccaagatgcaccttacgccttcctgcccatatggtatgtggaagctatgactcaggacctcccatcaccccccaagactccctctcccaaatagtaatgctttagagggaggcagtcatatctctgtgtgcagataataaaagcatatttctaagaggttc

SEQ ID NO: 125771 - DNA, 1516 bp, Homo sapiens
  Payload ID: 4643
  Gene Symbol: DXO
  Gene Name: decapping exoribonuclease
  Uniprot ID: O77932
  ENST ID: ENST00000432110
  CDS Start-End: 259-1449
tggcggcgtggaggggcgccggtggccacgttggtgtcaacctccttcgtgaagctcacacctcccccgccccgggaggggtttgcccgccactgtcgctgaatgattgcatcatcgaaagcagaaaaccacttttgcatccttcggcctctggcgtgcctgccatgacgtcatagctctgcggaggtggaagttggggagctttgaggcctcctctgtagaatggaaactctgtacccctgcttgtcttaggacctcatggatcccagggggaccaagagaggagctgagaagacagaggtagctgagcctcggaacaaactacctcgtccagcaccttctctgcccacagaccctgccctctactctgggccctttcctttctaccggcgcccttcggaactgggctgcttctccctggatgctcaacgccagtaccatggagatgcccgagccctgcgctactatagcccaccccccactaacggtccaggccccaactttgacctcagagacggatacccggatcgataccagccccgggacgaggaggtccaggaaaggctggaccacctgctgtgctggctcctggaacaccgaggccggttggaggggggtccaggctggctggcagaggccatagtgacgtggcgggggcacctgacaaaactgctgacgacaccgtatgagcggcaggagggctggcagctggcagcctcccggttccagggaacactatacctgagtgaagtggagacaccgaacgctcgggcccagaggcttgctcggccaccgctcctccgggagcttatgtacatgggatacaaatttgagcagtacatgtgtgcagacaaacctggaagctccccagacccctctggggaggttaacaccaacgtggccttctgctctgtgctacgcagccgcctgggaagccaccctctgctcttctcaggggaggtagactgcacagacccccaagccccatccacacagcccccgacctgctatgtggagctcaagacctccaaggagatgcaaagccctggccaatggaggagtttctacagacacaagctcctgaaatggtgggctcagtcattcctcccaggggtcccgaatgttgttgctggcttccgtaacccagacggttttgtctcttccctcaagacctttcctaccatgaagatgtttgaatatgtcaggaatgaccgtgacggctggaatccctctgtgtgcatgaacttctgtgccgccttccttagctttgcccagagcacggttgtccaggatgaccccaggctcgttcatctcttctcttgggagcctggcggcccagtcaccgtgtctgtacaccaagatgcaccttacgccttcctgcccatatggtatgtggaagctatgactcaggacctcccatcaccccccaagactccctctcccaaatagtaatgctttagagggaggcagtcatatctctgtgtgcagataataaaagcatatttctaagaggttc

SEQ ID NO: 125772 - DNA, 1554 bp, Homo sapiens; identical to SEQ ID NO: 125763
  Payload ID: 4643
  Gene Symbol: DXO
  Gene Name: decapping exoribonuclease
  Uniprot ID: O77932
  ENST ID: ENST00000427690
  CDS Start-End: 297-1487

SEQ ID NO: 125773 - DNA, 1628 bp, Homo sapiens; identical to SEQ ID NO: 125759
  Payload ID: 4643
  Gene Symbol: DXO
  Gene Name: decapping exoribonuclease
  Uniprot ID: O77932
  ENST ID: ENST00000453742
  CDS Start-End: 371-1561

SEQ ID NO: 125774 - DNA, 1628 bp, Homo sapiens; identical to SEQ ID NO: 125759
  Payload ID: 4643
  Gene Symbol: DXO
  Gene Name: decapping exoribonuclease
  Uniprot ID: O77932
  ENST ID: ENST00000454430
  CDS Start-End: 371-1561

SEQ ID NO: 125775 - DNA, 1554 bp, Homo sapiens; identical to SEQ ID NO: 125763
  Payload ID: 4643
  Gene Symbol: DXO
  Gene Name: decapping exoribonuclease
  Uniprot ID: O77932
  ENST ID: ENST00000427627
  CDS Start-End: 297-1487

SEQ ID NO: 125776 - DNA, 1554 bp, Homo sapiens; identical to SEQ ID NO: 125763
  Payload ID: 4643
  Gene Symbol: DXO
  Gene Name: decapping exoribonuclease
  Uniprot ID: O77932
  ENST ID: ENST00000443250
  CDS Start-End: 297-1487

SEQ ID NO: 125777 - DNA, 1346 bp, Homo sapiens
  Payload ID: 4643
  Gene Symbol: DXO
  Gene Name: decapping exoribonuclease
  ENST ID: ENST00000480240
  CDS Start-End: 259-891
tggcggcgtggaggggcgccggtggccacgttggtgtcaacctccttcgtgaagctcacacctcccccgccccgggaggggtttgcccgccactgtcgctgaatgattgcatcatcgaaagcagaaaaccacttttgcatccttcggcctctggcgtgcctgccatgacgtcatagctctgcggaggtggaagttggggagctttgaggcctcctctgtagaatggaaactctgtacccctgcttgtcttaggacctcatggatcccagggggaccaagagaggagctgagaagacagaggtagctgagcctcggaacaaactacctcgtccagcaccttctctgcccacagaccctgccctctactctgggccctttcctttctaccggcgcccttcggaactgggctgcttctccctggatgctcaacgccagtaccatggagatgcccgagccctgcgctactatagcccaccccccactaacggtccaggccccaactttgacctcagagacggatacccggatcgataccagccccgggacgaggaggtccaggaaaggctggaccacctgctgtgctggctcctggaacaccgaggccggttggaggggggtccaggctggctggcagaggccatagtgacgtggcgggggcacctgacaaaactgctgacgacaccgtatgagcggcaggagggctggcagctggcagcctcccggttccagggaacactatacctgagtgaagtggagacaccgaacgctcgggcccagaggcttgctcggccaccgctcctccgggagcttatgtacatgggatacaaatttgagcagtacatgtgtgcagccgcctgggaagccaccctctgctcttctcaggggaggtagactgcacagacccccaagccccatccacacagcccccaacctgctatgtggagctcaagacctccaaggagatgcacagccctggccaatggaggagtttctacagacacaagctcctgaaatggtgggctcagtcattcctcccaggggtcccgaatgttgttgctggcttccgtaacccagacggttttgtctcttccctcaagacctttcctaccatgaagatgtttgaatatgtcaggaatgaccgtgacggctggaatccctctgtgtgcatgaacttctgtgccgccttccttagctttgcccagagcacggttgtccaggatgaccccaggctcgttcatctcttctcttgggagcctggcggcccagtcaccgtgtctgtacaccaagatgcaccttacgccttcctgcccatatggtatgtggaagctatgactcaggacctccca

SEQ ID NO: 125778 - DNA, 586 bp, Homo sapiens
  Payload ID: 4643
  Gene Symbol: DXO
  Gene Name: decapping exoribonuclease
  ENST ID: ENST00000495340
  CDS Start-End: 1-524
acatgtgtgcagacaaacctggaagctccccagacccctctggggaggttaacaccaacgtggccttctgctctgtgctacgcagccgcctgggaagccaccctctgctcttctcaggggaggtagactgcacagacccccaagccccatccacacagcccccaacctgctatgtggagctcaagacctccaaggagatgcacagccctggccaatggaggagtttctacaggttcaggatcgggacctttcctaccatgaagatgtttgaatatgtcaggaatgaccgtgacggctggaatccctctgtgtgcatgaacttctgtgccgccttccttagctttgcccagagcacggttgtccaggatgaccccaggctcgttcatctcttctcttgggagcctggcggcccagtcaccgtgtctgtacaccaagatgcaccttacgccttcctgcccatatggtatgtggaagctatgactcaggacctcccatcaccccccaagactccctctcccaaatagtaatgctttagagggaggcagtcatatctctgtgtgcagataataaaagcatatttctaaga

SEQ ID NO: 125779 - DNA, 1853 bp, Homo sapiens
  Payload ID: 4644
  Gene Symbol: DCP1A
  Gene Name: decapping mRNA 1A
  Uniprot ID: Q9NPI6
  ENST ID: ENST00000294241
  CDS Start-End: 9-1643
gattcaagatggaggcgctgagtcgagctgggcaggagatgagcctagcggccctgaagcaacacgacccctatatcaccagcatcgcagacctcacgggccaggtcgctctgtacaccttctgccccaaggccaaccagtgggagaagactgatatagaagggaccttattcgtatatcgaaggtcagcttccccttaccatggttttaccattgtgaatcgactaaatatgcacaatctagttgaaccagtgaataaagatttggaatttcagctccatgaaccatttcttctgtatagaaatgcaagcttgtcgatatatagtatctggttttatgacaagaatgactgtcaccgcatagcaaaactcatggctgatgtggtagaagaggagacacggcgatcccagcaagctgctcgggacaaacagagtcccagccaggccaatggctgcagcgaccacaggcccatcgacatcctggagatgctgagcagagccaaggatgagtatgagaggtctgctccatctggacacaagcatctgacggtagaagagttatttggaacctctttgccaaaggaacaaccagcagttgtgggtctggattcagaagaaatggagaggttgccaggagatgcctcccagaaagagcccaattcattcctaccatttccctttgagcagttaggaggagcccctcaatcagaaaccctgggtgtcccttctgctgcccaccattcagtccagcctgaaatcaccaccccggtgctaatcactccagcctccatcacacagtccaatgaaaagcatgctccaacctacacaatcccgttgagccctgttctcagtcccactctgccagctgaagctcctactgcacaggttccccccagcttacctcgaaacagcaccatgatgcaggcagtgaagaccacgcctagacagaggtctccactcctgaaccagccagtccctgagctaagccatgccagtctgattgccaaccagagccccttcagggccccattgaacgtgacgaacacagctggcacatccctcccaagcgttgatcttctccagaaactcaggttgaccccacagcatgaccaaatacagacacaaccacttgggaaaggtgcaatggtagccagcttttctccggcagctggtcagctagccacacctgagagcttcatagagcctccctctaagacagcagcagcaagagtggcggcctcagcctccctgagcaacatggtgcttgctccccttcagtctatgcagcagaaccaggatcctgaagtatttgtgcagcctaaggtgttatccagtgccatcccggttgcaggcgccccactggttactgcaacgaccactgcagtgtcttcagtcctgctggccccaagtgttttccagcagacagttacaagatcttcggaccttgagaggaaagccagctccccttctcctctaactattggaacgccagaaagtcagagaaagccttccattattctcagcaagtctcagctccaggatacattaatacatctaataaagaatgattccagcttcctcagtacacttcatgaagtctacttgcaggttctgaccaagaacaaagacaaccacaacctatgactggagcagaataagtctaaaggcagagccccagcctcagagacaaataggcttcatcatggaaacttctgagcagaacattgagtttgagaatcctgaaattgagcctatgagaaagagactcatttcttaagaatgttttccaagtgacattctcagtgataatggaggtttcactgtgaagcatcaccagcagatccttgttttgac

SEQ ID NO: 125780 - DNA, 5994 bp, Homo sapiens
  Payload ID: 4644
  Gene Symbol: DCP1A
  Gene Name: decapping mRNA 1A
  Uniprot ID: Q9NPI6
  ENST ID: ENST00000610213
  CDS Start-End: 94-1842
ggggactgacgcagatgggggaattttgcctcgatggcactttcctgtccgcgactccgcccccaccagaggggctaggctctgggattcaagatggaggcgctgagtcgagctgggcaggagatgagcctagcggccctgaagcaacacgacccctatatcaccagcatcgcagacctcacgggccaggtcgctctgtacaccttctgccccaaggccaaccagtgggagaagactgatatagaagggaccttattcgtatatcgaaggtcagcttccccttaccatggttttaccattgtgaatcgactaaatatgcacaatctagttgaaccagtgaataaagatttggaatttcagctccatgaaccatttcttctgtatagaaatgcaagcttgtcgatatatagtatctggttttatgacaagaatgactgtcaccgcatagcaaaactcatggctgatgtggtagaagaggagacacggcgatcccagcaagctgctcgggacaaacagagtcccagccaggccaatggctgcagcgaccacaggcccatcgacatcctggagatgctgagcagagccaaggatgagtatgagaggaatcagatgggtgactcaaatatctccagccctgggttacagccaagcactcagctctccaatctgggaagcaccgagactctagaagaaatgccctccgggtcacaggataagtctgctccatctggacacaagcatctgacggtagaagagttatttggaacctctttgccaaaggaacaaccagcagttgtgggtctggattcagaagaaatggagaggttgccaggagatgcctcccagaaagagcccaattcattcctaccatttccctttgagcagttaggaggagcccctcaatcagaaaccctgggtgtcccttctgctgcccaccattcagtccagcctgaaatcaccaccccggtgctaatcactccagcctccatcacacagtccaatgaaaagcatgctccaacctacacaatcccgttgagccctgttctcagtcccactctgccagctgaagctcctactgcacaggttccccccagcttacctcgaaacagcaccatgatgcaggcagtgaagaccacgcctagacagaggtctccactcctgaaccagccagtccctgagctaagccatgccagtctgattgccaaccagagccccttcagggccccattgaacgtgacgaacacagctggcacatccctcccaagcgttgatcttctccagaaactcaggttgaccccacagcatgaccaaatacagacacaaccacttgggaaaggtgcaatggtagccagcttttctccggcagctggtcagctagccacacctgagagcttcatagagcctccctctaagacagcagcagcaagagtggcggcctcagcctccctgagcaacatggtgcttgctccccttcagtctatgcagcagaaccaggatcctgaagtatttgtgcagcctaaggtgttatccagtgccatcccggttgcaggcgccccactggttactgcaacgaccactgcagtgtcttcagtcctgctggccccaagtgttttccagcagacagttacaagatcttcggaccttgagaggaaagccagctccccttctcctctaactattggaacgccagaaagtcagagaaagccttccattattctcagcaagtctcagctccaggatacattaatacatctaataaagaatgattccagcttcctcagtacacttcatgaagtctacttgcaggttctgaccaagaacaaagacaaccacaacctatgactggagcagaataagtctaaaggcagagccccagcctcagagacaaataggcttcatcatggaaacttctgagcagaacattgagtttgagaatcctgaaattgagcctatgagaaagagactcatttcttaagaatgttttccaagtgacattctcagtgataatggaggtttcactgtgaagcatcaccagcagatccttgttttgacaaaaaaaaaaaaaaaaaaaaaaaaaaagagagcgatcattgtgttaagttatgtgggtgttttcatcagctaggagcaaggctgtggaataaggagtcagattctcagcttgctttcactttcaaggacttacagaggagtagtcaccagcctcacagcagaagttcagcccggcccccaccgcttcccccagcctaccccatagaaacgggctttgggctgacaagtcaagttttgaacagagtagaaggcagctctgcaaagtagcttctagtttttaggaccagaatttaagccggcaaattaggaattatttcctcaagtgaagtatattttatatgaatgccccatttgggccttaaaagttgtgaaatttcttaatagcattttgtttttaagtgccccagtcctgccctgcagcaggcccccagtgcagcattaccatttgaatagggcactgtcaggctctggtggtgtggacacaggcatgtcatacctttgaaggaaaggctggggctgggaatgcccacatcctatcaaatcttcattttaggttaaactctccattggttctgaaaatgctaagtttgtgtgtgaagcacagccttattttccttttctgtcattgttgattgttttccttaacactttgacaaaaggaccagtggaccaatctgacaaagccattctggttcctttccttgagtgtactgagaatagttttaaagctatgcagaaaagggagctgttattcacactgcccttattttgttgtagaattatggagttaaaagaaaatgtgattccgaactctaccaatgtattcctaggctgtgagtactttcccggcccaaagtgtgaaaatatgtaaagaagctttgttatgctgctattgatctgccatgatttctatttattcttttatggcatgtaatggtgtttagtaatattttaatgtagattttgatttatttcagcaatagtaattttaagatattctttgaatgaaagtgtcttcgtttctatgatacaggtcattttgtagtatttaaccaattaagatgcactgcttacttttctgagcactatttaatgatggggtaaaaacccaattggctcaaccagctagcataaggattagctgtgaataatgctgacagatatgatggttccttaggaacaatcatttaagctttaatggtaactcaatcataagtccatagattatttttttctagctaaaattttagaaaattacttgtgaattacatacttgttttagtttggtcttagtttttagcataaagaatgattggcttttgttgatctaaacatgcttcctggacagggtttctgcttctcattttagtgtcttctattgctgtctacctaattatgtgtgaattgtgcagaattcagggaagcttataagttttcatgctcaattgtgaatagtttgttttcacagatagtatgtaaattaagcaaccaaaaatgaattccttatgcatcatctgggaacgagaaagctatagtgggatacagagtgttgctgacaccgggagatggtgtccagggagccacgtgacttccataaagtggacgcaccagtaggtgtgattgcacctcaagtgtagtctcagtgggcttcggtgaacagacgaatcaagggattcttgaatcgaaattatgcttttgagtatgtaatattatgagagagttaagagagaatatcctaaagagagtctgtgatcatactaattttcacctttaatgctaggaatggatatgatagacagtaaagagcatctatgataaggcttccttagtgtgaaagtaaacttaagtgcccaagtcatggagacttgaaaagggtaaacctgtttcacctcccaaatttatatattcaaagtatttacttaaaattcagaagccagaagttcatgtcatgattaccaggaagttcaggccagaatgaatccctagagaagccaggccaagcctggataattgcagctggatgaccctggcccgaaagtcacagttcagttgccttattcctagttcaggcttactatctagaacctcatgctagcttaggttgcatgtttacattgctgcagtgtctttactggaagcttagttggatcgaaatggacaccgagatggagatgcttctggctagatttcgcagaaccccaggagacctgcatttagaccactctgtccatttgtgtgcccacccccacccccagggtctaagtgtagactccaagaggagcagcccagagcttggaggagaggtgtgtctggggcaccactggtgggtggtgctgctcttctttttgttgtagttaatgcggtgtcttttaatggactctcaggcctcccagacagccttgttcctttaaggcagaagctcttcttcattgtgtacctcctgggattcatgaggtgtgagatttggcctgcttgactttgaattcaagtttttcaagtgactctcagtgtcagaagaagcatttcatgctgtccacatgtggtatgtccacagctcaccttcaaaggcttagatgtagccatcacagagagtggtattttattaagaacccaagtcccagcctgaccaacatggtgaaaccccatctctactaaaaatacaaaaattagccgggcgtggtggcacgcgcctatactcccagctacttaggaggctgaggcaggagaatcacttgaacccgggaggcagaggttgcagtgagccaagatcacaccactgcactctagcctgggcgacagtgagactccacctcaaaaaaaaaaaaaaaaaaaaaaaaaaaaaagtcacgctgggcccctctctacagggggacacacaggcttagtttagtatatgtctaaccagattttgcatgtcaagcatttgtccttttcctggcttatgttttcttgtagaaattatataaaccctatcaaatccactactaggtaaatttttaaaccatgcagctttattactctcctcccccaaagaatgtagtttgaaattttctcatttccatagtagaggccctaactgccattgtattactaataatgcaacatgaaattgaaggtgcctaactgctcaaaaaacaaaatcagccatcatactgtaactctgagaggaatgagaggtggcacaggcacgagtgggctcagcccgtgtgagtgaggagaactgaggaatcctagggtgcgcatcctgcatcctggctgcacgtttgctgcagagtatgtttttctttcttgcctcccttcagttttcttcagttgcgttcagtgtatcttctggaaccaatagtgccctgtgttctcaagtctctaaaatgctaagatctgagcaaagtcaagcagcttacactaggcttttttacagctgtgcttgagaacatttccgagtggaccagggccttgaggagcctgtttttcagcaaattcaacagatgtgtgcagtgattccctccgttttgtatttgacaccttcatttaaaatgctaagatgcaatatcattcacttcaaagtggggaaaatgcagaattgtgtttcctttttatctgtgtgattccttaagaaacatgtttttaaaatatgtgttctaaatggttttttattctgtattactgctttggccatgtggctctcatgactttcattgtaccagattctcagctccctgaaacatggggacgagaagctctggaattacagcaagatttttgttccatgagcgcaatactgtatcattaacatttttaatggtatggattttatagcatctgtgtatgtttgcaaatattaagttattacatgttttaaaatgagcgtttttcatcttaaattttatatgtttgcaaatatatttttttaataaaatttcaaaaccaagttttagcacctac

SEQ ID NO: 125781 - DNA, 849 bp, Homo sapiens
  Payload ID: 4644
  Gene Symbol: DCP1A
  Gene Name: decapping mRNA 1A
  ENST ID: ENST00000560624
  CDS Start-End: 70-849
tttgcctcgatggcactttcctgtccgcgactccgcccccaccagaggggctaggctctgggattcaagatggaggcgctgagtcgagctgggcaggagatgagcctagcggccctgaagcaacacgacccctatatcaccagcatcgcagacctcacgggccaggagaagactgatatagaagggaccttattcgtatatcgaaggtcagcttccccttaccatggttttaccattgtgaatcgactaaatatgcacaatctagttgaaccagtgaataaagatttggaatttcagctccatgaaccatttcttctgtatagaaatgcaagcttgtcgatatatagtatctggttttatgacaagaatgactgtcaccgcatagcaaaactcatggctgatgtggtagaagaggagacacggcgatcccagcaagctgctcgggacaaacagagtcccagccaggccaatggctgcagcgaccacaggcccatcgacatcctggagatgctgagcagagccaaggatgagtatgagaggaatcagatgggtgactcaaatatctccagccctgggttacagccaagcactcagctctccaatctgggaagcaccgagactctagaagaaatgccctccgggtcacaggataagtctgctccatctggacacaagcatctgacggtagaagagttatttggaacctctttgccaaaggaacaaccagcagttgtgggtctggattcagaagaaatggagaggttgccaggagatgcctcccagaaagagcccaattcattcctaccatttccctttgagcagttaggaggagcccctcaatcagaaacc

SEQ ID NO: 125782 - DNA, 581 bp, Homo sapiens
  Payload ID: 4644
  Gene Symbol: DCP1A
  Gene Name: decapping mRNA 1A
  ENST ID: ENST00000559748
  CDS Start-End: 8-581
attcaagatggaggcgctgagtcgagctgggcaggagatgagcctagcggccctgaagcaacacgacccctatatcaccagcatcgcagacctcacgggccaggtcgctctgtacaccttctgccccaaggccaaccagtggactgatatagaagggaccttattcgtatatcgaaggtcagcttccccttaccatggttttaccattgtgaatcgactaaatatgcacaatctagttgaaccagtgaataaagatttggaatttcagctccatgaaccatttcttctgtatagaaatgcaagcttgtcgatatatagtatctggttttatgacaagaatgactgtcaccgcatagcaaaactcatggctgatgtggtagaagaggagacacggcgatcccagcaagctgctcgggacaaacagagtcccagccaggccaatggctgcagcgaccacaggcccatcgacatcctggagatgctgagcagagccaaggatgagtatgagaggaatcagatgggtgactcaaatatctccagccctgggttacagccaagcactcagctctccaatctgggaa

SEQ ID NO: 125783 - DNA, 625 bp, Homo sapiens
  Payload ID: 4644
  Gene Symbol: DCP1A
  Gene Name: decapping mRNA 1A
  ENST ID: ENST00000560076
  CDS Start-End: 27-335
agaggggctaggctctgggattcaagatggaggcgctgagtcgagctgggcaggagatgagcctagcggccctgaagcaacacgacccctatatcaccagcatcgcagacctcacgggccaggtcgctctgtacaccttctgccccaaggccaaccagtgggagaagactgatatagaagggaccttattcgtatatcgaaggtcagcttccccttaccatggttttaccattgtgaatcgactaaatatgcacaatctagttgaaccagtgaataaagatttggaatttcagctccatgaaccatttcttctgtatagaaatgcaagctgttgagaaaacaagaggctcagagctgtttaggaatctgctcgagattcgcaaagtgtcgatatatagtatctggttttatgacaagaatgactgtcaccgcatagcaaaactcatggctgatgtggtagaagaggagacacggcgatcccagcaagctgctcgggacaaacagagtcccagccaggccaatggctgcagcgaccacaggcccatcgacatcctggagatgctgagcagagccaaggatgagtatgagaggaatcagatgggtgactcaaatatctccagccctg

SEQ ID NO: 125784 - DNA, 2086 bp, Homo sapiens
  Payload ID: 4645
  Gene Symbol: DCP1B
  Gene Name: decapping mRNA 1B
  Uniprot ID: Q8IZD4
  ENST ID: ENST00000280665
  CDS Start-End: 81-1934
tgcgaggcagctcgctcgttctgcgatctattgagagtggcttccaagagccccgtgcctatgtctgggagggagggaagatggcagccgtggcggcaggcggcctggtgggaaaggggcgcgacatcagcctagcggccctgcagcgccacgacccctatatcaaccgcatcgtggacgtggccagccaggtggctctgtacaccttcggccatcgggccaacgagtgggagaaaactgatgtggaaggaaccttatttgtttatacaaggtctgcttctccaaagcatggattcaccattatgaataggctgagcatggaaaataggacagaacctattactaaagacttggatttccaactccaggaccctttccttctctacagaaatgccagattgtccatctatggaatttggttttatgataaggaagaatgccaaagaattgcagagcttatgaaaaacctaactcagtatgaacagttgaaagcccatcagggaactggagcaggaatttccccagtgatcctcaattcaggagagggcaaagaagtagacattttacgaatgctcatcaaggccaaagacgaatacacaaagtgtaaaacctgttctgagccaaaaaagataaccagttcctctgccatctatgacaatccaaatctcatcaaaccaattccagtgaaacccagtgaaaaccagcaacagcgtatacctcagcccaaccagaccttagaccctgaaccccaacacttatccttgacagctctgtttgggaagcaggacaaagctacatgtcaggaaactgtggagcctccgcagactctccaccagcagcagcagcagcagcagcagcagcaagagaagcttccaattaggcagggggttgtacgctccctgtcctatgaggaacccagaagacactcaccccccattgagaagcagctctgtccagccattcagaaactcatggtcaggagcgcagacctccacccattgtcagagctgcctgaaaaccggccttgtgaaaatggcagtacccattctgcgggagaattttttacaggacctgtccagccagggtctcctcacaacattggaacttctcgtggtgtacaaaatgcttccagaactcagaacctgttcgagaaacttcagagtaccccaggggcagcaaacaagtgtgaccctagtacaccagcacctgccagctcagctgccctgaaccgcagcagagctcccacttctgtcacccctgtggctccaggaaagggtctggctcagccaccacaggcctatttcaatggctcccttccacctcagacagtaggacatcaggctcatggaagagaacagtccacactcccaagacaaacactccccatctctggtagtcagactggcagctctggagtgatctcccctcaagagttactgaagaagcttcagattgtacagcaggagcagcagctgcatgcctctaaccggccagccttggccgctaagtttcctgtgctcgctcagagctctggaacagggaaacccttggaatcctggatcaacaagacacccaacacagaacagcagactcctcttttccaggtcatctcacctcagcgcatccctgctacagcagctccgtctctgcttatgtcccccatggtgttcgcacaacccacctccgtcccgccaaaggaaagggagagcggcctcttgcctgtgggaggccaggagccacctgctgctgccaccagcctcctcctgcccatacagagcccggagccctccgtgatcaccagcagcccactcaccaagctccagctccaggaggcactgctgtacctcattcagaatgatgacaacttcttaaatataatctatgaagcctatctcttcagcatgactcaagcagccatgaaaaagactatgtgacagcaaggccttttaaaactgattttcaaggtccttctagaactccggcacaaggttctttcatgttgagtgttgtttccttcaatgtttctgccttttttaaaaaaaaagtatgtgtaatatgaagtaaaatgtttcagacttttttttat

SEQ ID NO: 125785 - DNA, 1547 bp, Homo sapiens
  Payload ID: 4645
  Gene Symbol: DCP1B
  Gene Name: decapping mRNA 1B
  ENST ID: ENST00000540622
  CDS Start-End: 60-1232
tgtccatctatggaatttggttttatgataaggaagaatgccaaagaattgcagagcttatgaaaaacctaactcagtatgaacagttgaaagcccatcagggaactggagcaggaatttccccagtgatcctcaattcaggagagggcaaagaagtagacattttacgaatgctcatcaaggccaaagacgaatacacaaagtgtaaaacctgttctgagccaaaaaagataaccagttcctctgccatctatgacaatccaaatctcatcaaaccaattccagtgaaacccagtgaaaaccagcaacagcgtatacctcagcccaaccagaccttagaccctgaaccccaacacttatccttgacagctctgtttgggaagcaggacaaagctacatgtcaggaaactgtggagcctccgcagactctccaccagcagcagcagcagcagcagcagcagcaagagaagcttccaattaggcagggggttgtacgctccctgtcctatgaggaacccagaagacactcaccccccattgagaagcagctctgtccagccattcagaaactcatggtcaggagcgcagacctccacccattgtcagagctgcctgaaaaccggccttgtgaaaatggcagtacccattctgcgggagaattttttacaggacctgtccagccagggtctcctcacaacattggaacttctcgtggtgtacaaaatgcttccagaactcagaacctgttcgagaaacttcagagtaccccaggggcagcaaacaagtgtgaccctagtacaccagcacctgccagctcagctgccctgaaccgcagcagagctcccacttctgtcacccctgtggctccaggaaagggtctggctcagccaccacaggcctatttcaatggctcccttccacctcagacagtaggacatcaggctcatggaagagaacagtccacactcccaagacaaacactccccatctctggtagtcagactggcagctctggagtgatctcccctcaagagttactgaagaagcttcagattgtacagcaggagcagcagctgcatgcctctaaccggccagccttggccgctaagtttcctgtgctcgctcagagctctggaacagggaaacccttggaatcctggatcaacaagacacccaacacagaacagcagactcctcttttccagtactcacaaatatcaagagccgagtgagaaaggcaagcatttcagcagcccacgctgtgctcagaatgcttgactccacctccgggagcatcactgctcagcaccgctcctcgaaatgtcatgtagggacaagttaaaagaaacagcctgccttcctctaggccaacttttgctcaaagagacgctaagggattgattataaaattacagcaacttctagcttgctggcctccttgcctccctcttaggagttctttcggggagttcggaggctgataaataacattctttttcttccctgagttagaagcaaatgatagctgtaggagtcagtcagataag

SEQ ID NO: 125786 - DNA, 2073 bp, Homo sapiens
  Payload ID: 4645
  Gene Symbol: DCP1B
  Gene Name: decapping mRNA 1B
  ENST ID: ENST00000543381
  CDS Start-End: 40-399
ttccaagagccccgtgcctatgtctgggagggagggaagatggcagccgtggcggcaggcggcctggtgggaaaggggcgcgacatcagcctagcggccctgcagcgccacgacccctatatcaaccgcatcgtggacgtggccagccaggtggctctgtacaccttcggccatcgggccaacgagtgggagaaaactgatgtggaaggaaccttatttgtttatacaaggtctgcttctccaaagcatggattcaccattatgaataggctgagcatggaaaataggacagaacctattactaaagacttggatttccaactccaggaccctttccttctctacagaaatgccagatatgaggaaactgagactccagtgaggaggcagactgtgtaaaaacccacagattctgatttcacttccgttgctttttccacaccacctgtactgctctactattaaacatggatgcaaattaaagtgtccatctatggaatttggttttatgataaggaagaatgccaaagaattgcagagcttatgaaaaacctaactcagtatgaacagttgaaagcccatcagggaactggagcaggaatttccccagtgatcctcaattcaggagagggcaaagaagtagacattttacgaatgctcatcaaggccaaagacgaatacacaaagtgtaaaacctgttctgagccaaaaaagataaccagttcctctgccatctatgacaatccaaatctcatcaaaccaattccagtgaaacccagtgaaaaccagcaacagcgtatacctcagcccaaccagaccttagaccctgaaccccaacacttatccttgacagctctgtttgggaagcaggacaaagctacatgtcaggaaactgtggagcctccgcagactctccaccagcagcagcagcagcagcagcagcagcaagagaagcttccaattaggcagggggttgtacgctccctgtcctatgaggaacccagaagacactcaccccccattgagaagcagctctgtccagccattcagaaactcatggtcaggagcgcagacctccacccattgtcagagctgcctgaaaaccggccttgtgaaaatggcagtacccattctgcgggagaattttttacaggacctgtccagccagggtctcctcacaacattggaacttctcgtggtgtacaaaatgcttccagaactcagaacctgttcgagaaacttcagagtaccccaggggcagcaaacaagtgtgaccctagtacaccagcacctgccagctcagctgccctgaaccgcagcagagctcccacttctgtcacccctgtggctccaggaaagggtctggctcagccaccacaggcctatttcaatggctcccttccacctcagacagtaggacatcaggctcatggaagagaacagtccacactcccaagacaaacactccccatctctggtagtcagactggcagctctggagtgatctcccctcaagagttactgaagaagcttcagattgtacagcaggagcagcagctgcatgcctctaaccggccagccttggccgctaagtttcctgtgctcgctcagagctctggaacagggaaacccttggaatcctggatcaacaagacacccaacacagaacagcagactcctcttttccaggtcatctcacctcagcgcatccctgctacagcagctccgtctctgcttatgtcccccatggtgttcgcacaacccacctccgtcccgccaaaggaaagggagagcggcctcttgcctgtgggaggccaggagccacctgctgctgccaccagcctcctcctgcccatacagagcccggagccctccgtgatcaccagcagcccactcaccaagctccagctccaggaggcactgctgtacctcattcagaatgatgacaacttcttaaatataatctatgaagcctatctcttcagcatgactcaagcagccatgaaaaagactatgtgacagcaaggccttttaaaactgattttcaaggtccttctagaactccggcacaag

SEQ ID NO: 125787 - DNA, 2231 bp, Homo sapiens
  Payload ID: 4645
  Gene Symbol: DCP1B
  Gene Name: decapping mRNA 1B
  ENST ID: ENST00000535873
  CDS Start-End: 105-566
gtgtggtcgccgtgggttctcggttgcgaggcagctcgctcgttctgcgatctattgagagtggcttccaagagccccgtgcctatgtctgggagggagggaagatggcagccgtggcggcaggcggcctggtgggaaaggggcgcgacatcagcctagcggccctgcagcgccacgacccctatatcaaccgcatcgtggacgtggccagccaggtggctctgtacaccttcggccatcgggccaacgagtgggagaaaactgatgtggaaggaaccttatttgtttatacaaggtctgcttctccaaagcatggattcaccattatgaataggctgagcatggaaaataggacagaacctattactaaagacttggatttccaactccaggaccctttccttctctacagaaatgccagatgtgagtctttcttactacagtgggttgttttacttctgaagtttggccaagtgtttaaaattgtacagtgtttgccattgtgtttgcatttggtatcagtggctatggggggtgtcagcattttaacaaatgttaatgtttaggaaatgcatgccctaatgatggaatagattcttccttggaagagtttaagtgaatataaatatgatgatataaacctaaaccctgtcttttgaagctttatggatttgtagtgtgaacccattgctgatcttaagcctgagcagggctgggtgaggcaagttcttagtgaggagactgcagagacacacacataggtggctccctgaacgaagaattaacgagtctgctatggcactttttctttatgtatcacttttggccgagtgagctgacaaagtgtttgagggcctgtattgtaggagtgccatcttctgaatacaagtaaataaaaaatcaaagtccaaaaagtttctttcagtcattaagaatttaataaccctttgtaatgtggaagtcgtagtaggtaactaaatagtccttgtcagatttgaaatgaagtagccatcgcctttctcatactacattttactctcgtatcgtttctgaccacttgtgttgcactgctggtcagcccagaggaagattgctgaaaatatgccagttgcagggacatctctacacacagaaaacaagaacataatactcaatatataaatacatatgtgtgcacacacatgcaccttatgctttgtggacagctttcataaagaccttgcagtgaagaaatgttttctgtatatttttcatcctactctttgaactcaagatacatgaatttgcctaccatatactattcagtgtaattttaatgagtataatgtaaataatatttgacattttaaccccaatgcatcattaagatgcattaaaatgatgctgtatataattgtcataataggtggttatcctattatttagagaataaatttttatgagagaaaaaaataaagctattgaaactataatatgacttactaatggcaggtcctgtgaaatgaaaagttttgcaatatagaaaaatattgtgttttctcctcatgtttctttgccgaaaggtacactttatcaattgtagtttattactaaagacttggaattccaactccaggaccctttccttctctacagaaatgccagtttgaattgtttatagtttgaattgttttgtgtgcttatagttatgtcagggttttttttgagattattagattttatgtcaaattaatatataatttaagtcctaataaaataactacaaagttacctgtaatcatcacttttggttgcttttattttggataaatacatggtctgatcagttataggtaatattttattttaaattcttattatagatcacatattaactactataccaaaaatataaaaacacaaactctctttaatgcatcaatttaaaaaataaccttcttaagtcccacagggtttatctgatagaaaatactatttagatctaataaacatacaccttggttctaagcgtgtgctgtccactatgatagtcactaactactgtggccgtttagtacctgaagtgtggctagtctaaacggagctgcactgtgagtgtccaacaggcaccaactgtcagacagtgcaaaaaaaaaaggaaaaaacctcaattattaattattttatattaacatgttgaaatgacaatattttggataaattgggcaaaataaaatatattattaatttca

SEQ ID NO: 125788 - DNA, 8947 bp, Homo sapiens
  Payload ID: 4646
  Gene Symbol: DCP2
  Gene Name: decapping mRNA 2
  Uniprot ID: Q8IU60
  ENST ID: ENST00000389063
  CDS Start-End: 199-1461
agtcttggggtccaaggctgagggagcgggacggaagtgagcgggtcccgccccttccccttctcgtctccgttggagtcgtctctgccgcggcttcctcggctgccagctctccggcgagccggagtcctagtgccgtaccgtcagtccccggccgcgcggagccgggatgcactgttcctgctgtgggtcctcatcatggagaccaaacgggtggagattcccggcagcgtcctggacgatctctgcagccgatttattttgcatattcccagcgaggaaagagacaatgcaatccgagtgtgttttcagattgaacttgcccattggttttacttggatttctacatgcagaacacaccaggattacctcagtgtgggataagagactttgctaaagctgtcttcagtcattgtccgtttttgctgcctcaaggtgaagatgtggaaaaagttttggatgaatggaaggaatataaaatgggagtaccaacatatggtgcaattattcttgatgagacacttgaaaatgtactactagttcaggggtacctagcaaaatcaggctggggatttccaaaaggaaaagtaaataaagaagaagctcctcatgattgtgctgctagagaggtctttgaagaaactggttttgatatcaaagactatatttgtaaggatgattacattgaacttcgaatcaatgaccagcttgctcgtttgtacatcattccaggaattccaaaagacacaaaatttaacccaaaaactagaagagaaattcggaacattgagtggttctctattgagaaattgccttgtcatagaaatgatatgacccccaaatccaaacttggtttggcacctaacaaattttttatggccattccctttatcagaccattaagggactggctttctcgaagatttggcgattcctcagacagtgacaatggattttcctcaactggtagcacgccggctaaacccactgtggaaaaattgagtcgaaccaaattccgccacagtcagcagttatttcctgacggttctcctggtgaccagtgggtaaagcacaggcaaccactgcagcaaaagccatataataatcattctgaaatgtctgaccttttaaaaggaaagaatcaaagtatgaggggaaatggcagaaaacagtatcaagattcacctaatcaaaagaaaagaacaaatgggcttcagccagcaaagcagcagaattctttgatgaagtgtgaaaagaaacttcatccacggaaacttcaggataattttgaaacagatgctgtatatgacttgcctagctccagtgaagaccagttgctagaacatgctgagggacagcccgtggcatgtaatggacattgcaagttccccttttcatccagagcctttttgagtttcaagtttgaccataatgctataatgaaaatcttggacctttgatagcagcacatgtattgtaaatgtcccaggatcagagacctgttgaatttgagtgggtgtctcctcaagccttacctttctcaggtgttttaaagaaatgcagggaggcaatgtttctgaagacattttctgtttataagagagtagaaagaaacacgagtttgcactgtaaatgcagttataaccttttatacagatttaccttttcagtgttcagtacaagtttaagttgctttctttgagggcatttattctgtgtgactgtgggttttattttgtattctggttaagaaaataatgtattgagttactgtcaagtagccaagttaatgggaatgctccatctacctgttacagtgattgcaataatagtatattggagtttttcaaagaaacttaaagtaatgcccaattattaaatgaacacaagagctgagatgtcacattcgtcagcattacaggtgatctattttggtggcattttgtacttctctctgcttctaaccactgaggctctctaatcttcctctggagttttagtgaaaggatttattgagcagcttctggaatataatgtgcatgtccaaaatgaactcagcgcttcaaaaggacaaagtctgtagcctggaggggcttgagtggatgggagctgatgctgtgattttgagctgtggttacatgcagtcagtaaacctgtgagactgctggaggaaatgtagcagacagcatggaggctgggacccagcagctactttgggtcatgtctttactgtcctgcctccaaccctttagtctcgtagacttttgttcttgtggaaatttcttctgtattccagttgtgtaaatatgtatggaaaactgatattactaggttttacgttgcatctccagtattgatctttggaaactgatgttacattaggttccaattcgcaatagtagcagagactgacatgcttttattgacctgctaagcccctggatgatggagcgagaagggaaggggtatgcagtttacccaagtccaaataaagcatttcactaggttacacgttatgtatatgtgttacataacagtaacatacataactcactcctaggaatgtattttgcttcaggatttttaaattcaaataaggatggcagtgcccattttaaggaggatttcagctataactgaggacaatcaccagggcgttaagggggctttagtgttttggctgcatctgacctcattgaaggaatttcttgggagtcgggggtgtttgagtatatgtgtgtgtgtgtaactatcatgtgggttttaaaaatccttttttacagtggtatccacaaaatacttctctgcttataaatgttattgtagaaatctttattctgtgtaggtagcctatttaattgggttccactgaacctcatgggacttttaaaagaagggctatttaaggaattcacttggtagtactttgctttagcttttaaatggcttgattttaaaggagaaattctatttattaatgaaagtgtcacccttttggtgctaagcaggagaattcacaattaaagcagtgtgtatagaattatgatattcagaatcctgcatcttttaatgtgacaaatttttgaatcctgtgacttttgctttttaatgcattatatgattgtgtttggaagcttttactgttcttttcagaaatacggctgctttgcttgggtctcttcgagccatatttatagttggtcccagcattccagacttctggtaaattgttaaaggagtgaaaatgtagtttgcctggcagatgaataattttcactcatttattgtcttctggaaaccatttaacttttactgttttttatttttttggtatgtgtttttttttttctttttaagtgcatactttggccagtcttcctggtgcctgtagagttggatttttcagctctcaatactgaagcaaaagagattatagttaccagaagtatggcctctaatggtgttgagccttttcaagaaccaacaaattatctttgtgattacagtagtttaactatggttaaatgttactgctgttgcgctgctttatttaatgcactgtggaacaaaatataagggtactgttggggtgtgattatgataacttcaggcttttagctctcctcaaagtttgaggttaaaaaaatgttaaaagatgtgagttaaagtttatgtgtgtgatgtgacttaactatgcagaaaatatttaagttggatgtacttgttttaggtacatctactatacttattctctcaaacctgggtaatagtttctcagtgttcaggttaccttgagaaaggccatgcttagcgaactggatttctcctttgagaaattttagtatggtttgaggaaatcaagtgataaaggagtatgctgaatatgcaatcatttacttctactgagtgctgcattttaagatgctagatgagaagagtagttggttttgcttcattatgttttatgtctttgagagagatacaggtcttggaattcactttttaaatgttacgttccaaccttatatgttccaaggtgcagtgcactgtgaatcttttatttttaaaaaaatttgtaggtgcttttatgtataactttaatgatttataagatgctaaatgaattgtttttgtacctaaccattgtaatccaaaagataagggtgtggtttacatgcttttcaaaaatttttgttaagaagtagcaaatgaatggtttaggatttcaaatagtgataccctcctgagacatgagcatttggagaggcctgagaacctaatagaactcatatagtgtgagtgaaatttgattaaagatgttggaaaatgaagttggatttttgtattcatgtataaaggaaagtctcccagtgctgtcaaaggaattgtggttactacttgctgttctgagctttgaatatcgttatttttctattaaatatcaattagtaagtatagctaatgaagacatataatgaaagtaattttatgctgtaagattgaattggtacttttccttattaaggctttagtaatttgtatgtaatgtcaaataaaaggaattcaaatctgagtaaataacagcctcctactataggaattagattcttctataaaagtcaccatattgtatcctatagaaaagttaaggtctgagtgcatgtgtgcattaaaaacatttcactacctattctctcatggacttctcatcctttcttttttcatctccaacagttaaatggtaaggagagcaaagttaattataaaaattagacattttgccaagttagttttcttaccacaataccctcttggcttttttttttttttttttgagatggagtttcactcctgttgcccaggctggagtgcaatggtgcaatttcggctcaccgcaacctacgcctcccgggttcaagtgattctcctgcctcagcctcccaagtagctgggattacaggcatgcgccaccacgccctgctaattctgtctttttagtagagacggggtttctccatgttggtcagggtggtctctcttggctttttatctttatttttgtaccagtggaccttcctgctccctgagactgttttgattgacatcttttgtgtttctatattttccgaggcagtattttctttgtatgttaatcatagttatagtaaagtcagactcattaacttttcttcctagtaattttgacttggattattttctagcctgggggatggggttcatatgtgttgttgtaactttagattactaaacaaaacaaactgtttttttgtttgaaggtatcctttacatacctgtctgtaggtaagcaagtgttagtaaaaacaattttgtcaaacagtactcctgacagcttggtaaagtctaggtagagtttctgattttgtattatgtcctaagacttgaaagtgcatttgtctagttgccaaaagttctaaaaatgagatggtgggctttctcagcatctttttgcttcctagaattgagttgctcttgaagtctgtactcctgtgtcagaaagatggcagactgcaaatgggcagtacaggctttgccccatgctttcaaagtaggattctggattgcagtttcaaaaaaatatgatagattattgttatagaatcaaagtgtcctgaagggagaagaatagctatagttgctgggcaaagagtgtaagaaagaaactttagagcatttatcaatacttgagtgctttattatgttccaggctagaaatgtgatcattgcatggcctaagtgtagtcattcatatatatatgaatatctatatctatatctatacatatatatgtatcgccattatcgagtgttttctagccctggataaagttaatttttttgaagtttgattgccaagcaatccagtgaatctaaagtaatttttctcactttaaagaccagtgatgaggagtctggtccttcctgtactgatactgtagaactccagtcaaacttcagtgcactgctttcttacaggaagacaactcagaacacacagccataatctgctttggtgtcagtcacatcacagtggttatacatttgtcctgaatggtgattcattcctttccatctaacttccttgtgacaaatagcatttactattgaaatagtcttaaaatagggaaaagagtgaaagttactcttatgcatgggagtgggcttaaagggttgacttccaccagctgagtacaaacaagtgtaaagaaaaactatgataaagtatggaggtcttgagaattgttcataatgaaatctttaatctgggttatcagagtaatgaaatcaccaataaaaacattccatttatcttggatcttctgtggttagcagaggagtatggtctagctatgttagcagcttgaaggcacaacgtaaaaggaatgagctttcacaaggtgcttacgttagctgggtagtattggtcaaaggtactctgaagagtgaatgcagaaatcagttggctgtgtttgtaatcttgtcccacatggaccctaacctttagtagacttcagtcttttagtccagtagaagacaatggccctgaatatgtgttttctgctttttggtggaaggtttcctgcaggtggttgggtggtttttgggttattggctactgttcgttcagtgccatttgaagacctgttgtttcttaatcctttttcttggtgtgactggccaggaaaaagtccattgagtcctttttttctccctggtgtcttaccccttctgtagaataatccatattttaaaatttgtttcacatctttatagcaaacctgccacagacttgcaagcagtgattttatctttccttcctgagaaggtgatctcacttttgatgtttgggtcacctgtggacacctgtgctcttttgagtctcaaggcttatagctttcacattggcttgggaacaacagacttgtgtgtggttctagagtgaaatgggcagtgttctgctggtcctcagtctttgagaggtcttaggcaacatccttagtatagtggaatttctgaggtcaaatttaacatttaatatattctccttttagttcattgaatctgaggttctaaatctgtagcttcattttgagcacaagtctgcattgtcattttttaagagattggcaggcatatccttttgtgatacttaggaaaagactatggatggcagcaaatgaaagtaaaggttctcaactgtgaatgaaatttagaaagataattcttcagcagttggttgattagatgggttagtgcttttggaatatataacagtagacttgtattctttatgcactatacatatgatacgcactgacagaaaagcacagaagacatactgctaagagtttctttgtgcatttcactactgttctaggggactgctgtctctttggttccttttaggtttgtgttaggatgttgcacaagtaatcatttaatgttaaatgcaagtgtccaaagaaatgagtcttaaagttctttggtcatatttcactttagagttaggacaggagacagctaacctgacttccattttacaaatattagaaactttttcttcagtaacaaaaacagggaaggacaataaaaccatgaactattttgctttatgtctgtttttaaaaaataattgttttgaagtttgcttattagcttaataccttatagtacttttaaaaaatcatccttggtaattattgacttatcctagatccatgtacaattcagacttttatctgttagctttaataaaaatttaaaaccatctcatttcagaataaaataaacggaattacagttcatgcattagcatttttaagtgaagttctcttaataagattgccttttgtctaaccgaaatagggcatacagattagtttggatgggaaagtggtaagacttgactttttaatactgtgcctatttccaaaagaagacttgatgtggctttttacattatgctttaaagatgttaatggaggatacatagtcttaaaacaatttgtttgggagtaagttttagtcggaaaaaggtgaagatatttatgctgagttatgttaagcaaattattttgagaccttttgctggtagacaaaaactgaggaaatgtttcactaaatatattatggtcaatgaaaaaaccagactttagagtaaatgtgataaccaagtagatttgtgaactttatttctttagtaattatttttatcttatgtgaaatgattcaacctttaatttttgcctagattatagcaatgttttgttttaccttatagggcattttaatgcttggagaaagactataagtgaatctacttcaagggattctgttcatggtggtatacagttcttggtgctcttttggaaattgtcaaacatttactgatagcagaaaaggaaccccaaaacacctgtagtgttcaccttgttataagaacagaaacatttggaacaggtttcattctgtttctagatttatgttgttgtagttgaacagcaactgtttttttccctcagtgttaacgaaaggataaagactacctgtattgttgggtatgactatcaaaggatttccggtgattcatgtttgtgaattggagtttaaatgtttgcaggattactgtacttccaaagacccactagaatgtcagctgtactctgtactctccactgagaaaatgaacaaaatcctatgtcttaacagttatgctctaactttttgaaagctttttgatgtaaataataggttagaaactaaaagccttttaatcttacaaaatacaatttgaacgatggaaggttgttcagatactggctttctgtaaaaacatcattgtgttagattgtttgtaatgtactatcaataaaattggctgcttgggcggttttagttaccacctta

SEQ ID NO: 125789 - DNA, 1572 bp, Homo sapiens
  Payload ID: 4646
  Gene Symbol: DCP2
  Gene Name: decapping mRNA 2
  ENST ID: ENST00000513585
  CDS Start-End: 1-1207
gggggctccgccccgagccttggcccagtcttggggtccaaggctgagggagcgggacggaagtgagcgggtcccgccccttccccttctcgtctccgttggagtcgtctctgccgcggcttcctcggctgccagctctccggcgagccggagtcctagtgccgtaccgtcagtccccggccgcgcggagccgggatgcactgttcctgctgtgggtcctcatcatggagaccaaacgggtggagattcccggcagcgtcctggacgatctctgcaggtactactagttcaggggtacctagcaaaatcaggctggggatttccaaaaggaaaagtaaataaagaagaagctcctcatgattgtgctgctagagaggtctttgaagaaactggttttgatatcaaagactatatttgtaaggatgattacattgaacttcgaatcaatgaccagcttgctcgtttgtacatcattccaggaattccaaaagacacaaaatttaacccaaaaactagaagagaaattcggaacattgagtggttctctattgagaaattgccttgtcatagaaatgatatgacccccaaatccaaacttggtttggcacctaacaaattttttatggccattccctttatcagaccattaagggactggctttctcgaagatttggcgattcctcagacagtgacaatggattttcctcaactggtagcacgccggctaaacccactgtggaaaaattgagtcgaaccaaattccgccacagtcagcagttatttcctgacggttctcctggtgaccagtgggtaaagcacaggcaaccactgcagcaaaagccatataataatcattctgaaatgtctgaccttttaaaaggaaagaatcaaagtatgaggggaaatggcagaaaacagtatcaagattcacctaatcaaaagaaaagaacaaatgggcttcagccagcaaagcagcagaattctttgatgaagtgtgaaaagaaacttcatccacggaaacttcaggataattttgaaacagatgctgtatatgacttgcctagctccagtgaagaccagttgctagaacatgctgagggacagcccgtggcatgtaatggacattgcaagttccccttttcatccagagcctttttgagtttcaagtttgaccataatgctataatgaaaatcttggacctttgatagcagcacatgtattgtaaatgtcccaggatcagagacctgttgaatttgagtgggtgtctcctcaagccttacctttctcaggtgttttaaagaaatgcagggaggcaatgtttctgaagacattttctgtttataagagagtagaaagaaacacgagtttgcactgtaaatgcagttataaccttttatacagatttaccttttcagtgttcagtacaagtttaagttgctttctttgagggcatttattctgtgtgactgtgggttttattttgtattctggttaagaaaataatgtattgagttactgtcaagtagccaagttaatgggaatgctccatctacctgttacagtgattgca

SEQ ID NO: 125790 - DNA, 8029 bp, Homo sapiens
  Payload ID: 4646
  Gene Symbol: DCP2
  Gene Name: decapping mRNA 2
  Uniprot ID: Q8IU60
  ENST ID: ENST00000515408
  CDS Start-End: 233-1390
gtgactccgggggctccgccccgagccttggcccagtcttggggtccaaggctgagggagcgggacggaagtgagcgggtcccgccccttccccttctcgtctccgttggagtcgtctctgccgcggcttcctcggctgccagctctccggcgagccggagtcctagtgccgtaccgtcagtccccggccgcgcggagccgggatgcactgttcctgctgtgggtcctcatcatggagaccaaacgggtggagattcccggcagcgtcctggacgatctctgcagccgatttattttgcatattcccagcgaggaaagagacaatgcaatccgagtgtgttttcagattgaacttgcccattggttttacttggatttctacatgcagaacacaccaggattacctcagtgtgggataagagactttgctaaagctgtcttcagtcattgtccgtttttgctgcctcaaggtgaagatgtggaaaaagttttggatgaatggaaggaatataaaatgggagtaccaacatatggtgcaattattcttgatgagacacttgaaaatgtactactagttcaggggtacctagcaaaatcaggctggggatttccaaaaggaaaagtaaataaagaagaagctcctcatgattgtgctgctagagaggtctttgaagaaactggttttgatatcaaagactatatttgtaaggatgattacattgaacttcgaatcaatgaccagcttgctcgtttgtacatcattccaggaattccaaaagacacaaaatttaacccaaaaactagaagagaaattcggaacattgagtggttctctattgagaaattgccttgtcatagaaatgatatgacccccaaatccaaacttggtttggcacctaacaaattttttatggccattccctttatcagaccattaagggactggctttctcgaagatttggcgattcctcagacagtgacaatggattttcctcaactggtagcacgccggctaaacccactgtggaaaaattgagtcgaaccaaattccgccacagtcagcagttatttcctgacggttctcctggtgaccagtgggtaaagcacaggcaaccactgcagcaaaagccatataataatcattctgaaatgtctgaccttttaaaaggaaagaagtgtgaaaagaaacttcatccacggaaacttcaggataattttgaaacagatgctgtatatgacttgcctagctccagtgaagaccagttgctagaacatgctgagggacagcccgtggcatgtaatggacattgcaagttccccttttcatccagagcctttttgagtttcaagtttgaccataatgctataatgaaaatcttggacctttgatagcagcacatgtattgtaaatgtcccaggatcagagacctgttgaatttgagtgggtgtctcctcaagccttacctttctcaggtgttttaaagaaatgcagggaggcaatgtttctgaagacattttctgtttataagagagtagaaagaaacacgagtttgcactgtaaatgcagttataaccttttatacagatttaccttttcagtgttcagtacaagtttaagttgctttctttgagggcatttattctgtgtgactgtgggttttattttgtattctggttaagaaaataatgtattgagttactgtcaagtagccaagttaatgggaatgctccatctacctgttacagtgattgcaataatagtatattggagtttttcaaagaaacttaaagtaatgcccaattattaaatgaacacaagagctgagatgtcacattcgtcagcattacaggtgatctattttggtggcattttgtacttctctctgcttctaaccactgaggctctctaatcttcctctggagttttagtgaaaggatttattgagcagcttctggaatataatgtgcatgtccaaaatgaactcagcgcttcaaaaggacaaagtctgtagcctggaggggcttgagtggatgggagctgatgctgtgattttgagctgtggttacatgcagtcagtaaacctgtgagactgctggaggaaatgtagcagacagcatggaggctgggacccagcagctactttgggtcatgtctttactgtcctgcctccaaccctttagtctcgtagacttttgttcttgtggaaatttcttctgtattccagttgtgtaaatatgtatggaaaactgatattactaggttttacgttgcatctccagtattgatctttggaaactgatgttacattaggttccaattcgcaatagtagcagagactgacatgcttttattgacctgctaagcccctggatgatggagcgagaagggaaggggtatgcagtttacccaagtccaaataaagcatttcactaggttacacgttatgtatatgtgttacataacagtaacatacataactcactcctaggaatgtattttgcttcaggatttttaaattcaaataaggatggcagtgcccattttaaggaggatttcagctataactgaggacaatcaccagggcgttaagggggctttagtgttttggctgcatctgacctcattgaaggaatttcttgggagtcgggggtgtttgagtatatgtgtgtgtgtgtaactatcatgtgggttttaaaaatccttttttacagtggtatccacaaaatacttctctgcttataaatgttattgtagaaatctttattctgtgtaggtagcctatttaattgggttccactgaacctcatgggacttttaaaagaagggctatttaaggaattcacttggtagtactttgctttagcttttaaatggcttgattttaaaggagaaattctatttattaatgaaagtgtcacccttttggtgctaagcaggagaattcacaattaaagcagtgtgtatagaattatgatattcagaatcctgcatcttttaatgtgacaaatttttgaatcctgtgacttttgctttttaatgcattatatgattgtgtttggaagcttttactgttcttttcagaaatacggctgctttgcttgggtctcttcgagccatatttatagttggtcccagcattccagacttctggtaaattgttaaaggagtgaaaatgtagtttgcctggcagatgaataattttcactcatttattgtcttctggaaaccatttaacttttactgttttttatttttttggtatgtgtttttttttttctttttaagtgcatactttggccagtcttcctggtgcctgtagagttggatttttcagctctcaatactgaagcaaaagagattatagttaccagaagtatggcctctaatggtgttgagccttttcaagaaccaacaaattatctttgtgattacagtagtttaactatggttaaatgttactgctgttgcgctgctttatttaatgcactgtggaacaaaatataagggtactgttggggtgtgattatgataacttcaggcttttagctctcctcaaagtttgaggttaaaaaaatgttaaaagatgtgagttaaagtttatgtgtgtgatgtgacttaactatgcagaaaatatttaagttggatgtacttgttttaggtacatctactatacttattctctcaaacctgggtaatagtttctcagtgttcaggttaccttgagaaaggccatgcttagcgaactggatttctcctttgagaaattttagtatggtttgaggaaatcaagtgataaaggagtatgctgaatatgcaatcatttacttctactgagtgctgcattttaagatgctagatgagaagagtagttggttttgcttcattatgttttatgtctttgagagagatacaggtcttggaattcactttttaaatgttacgttccaaccttatatgttccaaggtgcagtgcactgtgaatcttttatttttaaaaaaatttgtaggtgcttttatgtataactttaatgatttataagatgctaaatgaattgtttttgtacctaaccattgtaatccaaaagataagggtgtggtttacatgcttttcaaaaatttttgttaagaagtagcaaatgaatggtttaggatttcaaatagtgataccctcctgagacatgagcatttggagaggcctgagaacctaatagaactcatatagtgtgagtgaaatttgattaaagatgttggaaaatgaagttggatttttgtattcatgtataaaggaaagtctcccagtgctgtcaaaggaattgtggttactacttgctgttctgagctttgaatatcgttatttttctattaaatatcaattagtaagtatagctaatgaagacatataatgaaagtaattttatgctgtaagattgaattggtacttttccttattaaggctttagtaatttgtatgtaatgtcaaataaaaggaattcaaatctgagtaaataacagcctcctactataggaattagattcttctataaaagtcaccatattgtatcctatagaaaagttaaggtctgagtgcatgtgtgcattaaaaacatttcactacctattctctcatggacttctcatcctttcttttttcatctccaacagttaaatggtaaggagagcaaagttaattataaaaattagacattttgccaagttagttttcttaccacaataccctcttggcttttttttttttttttttgagatggagtttcactcctgttgcccaggctggagtgcaatggtgcaatttcggctcaccgcaacctacgcctcccgggttcaagtgattctcctgcctcagcctcccaagtagctgggattacaggcatgcgccaccacgccctgctaattctgtctttttagtagagacggggtttctccatgttggtcagggtggtctctcttggctttttatctttatttttgtaccagtggaccttcctgctccctgagactgttttgattgacatcttttgtgtttctatattttccgaggcagtattttctttgtatgttaatcatagttatagtaaagtcagactcattaacttttcttcctagtaattttgacttggattattttctagcctgggggatggggttcatatgtgttgttgtaactttagattactaaacaaaacaaactgtttttttgtttgaaggtatcctttacatacctgtctgtaggtaagcaagtgttagtaaaaacaattttgtcaaacagtactcctgacagcttggtaaagtctaggtagagtttctgattttgtattatgtcctaagacttgaaagtgcatttgtctagttgccaaaagttctaaaaatgagatggtgggctttctcagcatctttttgcttcctagaattgagttgctcttgaagtctgtactcctgtgtcagaaagatggcagactgcaaatgggcagtacaggctttgccccatgctttcaaagtaggattctggattgcagtttcaaaaaaatatgatagattattgttatagaatcaaagtgtcctgaagggagaagaatagctatagttgctgggcaaagagtgtaagaaagaaactttagagcatttatcaatacttgagtgctttattatgttccaggctagaaatgtgatcattgcatggcctaagtgtagtcattcatatatatatgaatatctatatctatatctatacatatatatgtatcgccattatcgagtgttttctagccctggataaagttaatttttttgaagtttgattgccaagcaatccagtgaatctaaagtaatttttctcactttaaagaccagtgatgaggagtctggtccttcctgtactgatactgtagaactccagtcaaacttcagtgcactgctttcttacaggaagacaactcagaacacacagccataatctgctttggtgtcagtcacatcacagtggttatacatttgtcctgaatggtgattcattcctttccatctaacttccttgtgacaaatagcatttactattgaaatagtcttaaaatagggaaaagagtgaaagttactcttatgcatgggagtgggcttaaagggttgacttccaccagctgagtacaaacaagtgtaaagaaaaactatgataaagtatggaggtcttgagaattgttcataatgaaatctttaatctgggttatcagagtaatgaaatcaccaataaaaacattccatttatcttggatcttctgtggttagcagaggagtatggtctagctatgttagcagcttgaaggcacaacgtaaaaggaatgagctttcacaaggtgcttacgttagctgggtagtattggtcaaaggtactctgaagagtgaatgcagaaatcagttggctgtgtttgtaatcttgtcccacatggaccctaacctttagtagacttcagtcttttagtccagtagaagacaatggccctgaatatgtgttttctgctttttggtggaaggtttcctgcaggtggttgggtggtttttgggttattggctactgttcgttcagtgccatttgaagacctgttgtttcttaatcctttttcttggtgtgactggccaggaaaaagtccattgagtcctttttttctccctggtgtcttaccccttctgtagaataatccatattttaaaatttgtttcacatctttatagcaaacctgccacagacttgcaagcagtgattttatctttccttcctgagaaggtgatctcacttttgatgtttgggtcacctgtggacacctgtgctcttttgagtctcaaggcttatagctttcacattggcttgggaacaacagacttgtgtgtggttctagagtgaaatgggcagtgttctgctggtcctcagtctttgagaggtcttaggcaacatccttagtatagtggaatttctgaggtcaaatttaacatttaatatattctccttttagttcattgaatctgaggttctaaatctgtagcttcattttgagcacaagtctgcattgtcattttttaagagattggcaggcatatccttttgtgatacttaggaaaagactatggatggcagcaaatgaaagtaaaggttctcaactgtgaatgaaatttagaaagataattcttcagcagttggttgattagatgggttagtgcttttggaatatataacagtagacttgtattctttatgcactatacatatgatacgcactgacagaaaagcacagaagacatactgctaagagtttctttgtgcatttcactactgttctaggggactgctgtctctttggttccttttaggtttgtgttaggatgttgcacaagtaatcatttaatgttaaatgcaagtgtccaaagaaatgagtcttaaagttctttggtcatatttcactttagagttaggacaggagacagctaacctgacttccattttacaaatattagaaactttttcttcagtaacaaaaacagggaaggacaataaaaccatgaactattttgctttatgtctgtttttaaaaaataattgttttgaagtttgcttattagcttaataccttatagtacttttaaaaaatcatccttggtaattattgacttatcctagatccatgtacaattcagacttttatctgttagctttaataaaaatttaaaaccatctcatttcagaataaaataaacggaattacagttcatgcattagcatttttaagtgaagttctcttaataagattgccttttgtctaaccgaaatagggcatacagattagtttggatgggaaagtggtaagacttgactttttaatactgtgcctatttccaaaagaagacttgatgtggctttttacattatgctttaaagatgttaatggaggatacatagtcttaaaacaatttgtttgggagtaagttttagtcggaaaaaggtgaagatatttatgctgagttat

SEQ ID NO: 125791 - DNA, 570 bp, Homo sapiens
  Payload ID: 4646
  Gene Symbol: DCP2
  Gene Name: decapping mRNA 2
  ENST ID: ENST00000512751
  CDS Start-End: 125-349
caaacgggtggagattcccggcagcgtcctggacgatctctgcaggtactactagttcaggggtacctagcaaaatcaggctggggatttccaaaaggaaaagtaaataaagaagaagctcctcatgattgtgctgctagagaggtctttgaagaaactggttttgatatcaaagactatatttgtaaggatgattacattgaacttcgaatcaatgaccagcttgctcgtttgtacatcattccaggaattccaaaagacacaaaatttaacccaaaaactagaagagaaattcggaacattgagtggttctctattgagaaattgccttgtcatagaaatgatatgacccccaaatccaaacttggtttggcacctaacaaattttttatggccattccctttatcagaccattaagggactggctttctcgaagatttggcgattcctcagacagtgacaatggattttcctcaactggtagcacgccggctaaacccactgtggaaaaattgagaatcaaagtatgaggggaaatggcagaaaacagtatcaagattcacctaatc

SEQ ID NO: 125792 - DNA, 7156 bp, Homo sapiens
  Payload ID: 4647
  Gene Symbol: DCN
  Gene Name: decorin
  Uniprot ID: P07585
  ENST ID: ENST00000052754
  CDS Start-End: 503-1582
aatgctacttgtaaacaaggctagaaagggtggagaatgaaatgagatggggggtggggaaacaaaccctttagttacaatatcttagggaaatgaatctacaataagacaaatttcaaatcaagttgctccactatactgcataagcagtttagaatcttaagcagatgcaaaaagaataaagcaaatgggaggaaaaaaaaggccgataaagtttctggctacaatacaagagacatatcattaccatatgatctaatgtgggtgtcagccggattgtgttcattgagggaaaccttattttttaactgtgctatggagtagaagcaggaggttttcaacctagtcacagagcagcacctaccccctcctcctttccacacctgcaaactcttttacttgggctgaatatttagtgtaattacatctcagctttgagggctcctgtggcaaattcccggattaaaaggttccctggttgtgaaaatacatgagataaatcatgaaggccactatcatcctccttctgcttgcacaagtttcctgggctggaccgtttcaacagagaggcttatttgactttatgctagaagatgaggcttctgggataggcccagaagttcctgatgaccgcgacttcgagccctccctaggcccagtgtgccccttccgctgtcaatgccatcttcgagtggtccagtgttctgatttgggtctggacaaagtgccaaaggatcttccccctgacacaactctgctagacctgcaaaacaacaaaataaccgaaatcaaagatggagactttaagaacctgaagaaccttcacgcattgattcttgtcaacaataaaattagcaaagttagtcctggagcatttacacctttggtgaagttggaacgactttatctgtccaagaatcagctgaaggaattgccagaaaaaatgcccaaaactcttcaggagctgcgtgcccatgagaatgagatcaccaaagtgcgaaaagttactttcaatggactgaaccagatgattgtcatagaactgggcaccaatccgctgaagagctcaggaattgaaaatggggctttccagggaatgaagaagctctcctacatccgcattgctgataccaatatcaccagcattcctcaaggtcttcctccttcccttacggaattacatcttgatggcaacaaaatcagcagagttgatgcagctagcctgaaaggactgaataatttggctaagttgggattgagtttcaacagcatctctgctgttgacaatggctctctggccaacacgcctcatctgagggagcttcacttggacaacaacaagcttaccagagtacctggtgggctggcagagcataagtacatccaggttgtctaccttcataacaacaatatctctgtagttggatcaagtgacttctgcccacctggacacaacaccaaaaaggcttcttattcgggtgtgagtcttttcagcaacccggtccagtactgggagatacagccatccaccttcagatgtgtctacgtgcgctctgccattcaactcggaaactataagtaattctcaagaaagccctcatttttataacctggcaaaatcttgttaatgtcattgctaaaaaataaataaaagctagatactggaaacctaactgcaatgtggatgttttacccacatgacttattatgcataaagccaaatttccagtttaagtaattgcctacaataaaaagaaattttgcctgccattttcagaatcatcttttgaagctttctgttgatgttaactgagctactagagatattcttatttcactaaatgtaaaatttggagtaaatatatatgtcaatatttagtaaagcttttcttttttaatttccaggaaaaaataaaaagagtatgagtcttctgtaattcattgagcagttagctcatttgagataaagtcaaatgccaaacactagctctgtattaatccccatcattactggtaaagcctcatttgaatgtgtgaattcaatacaggctatgtaaaatttttactaatgtcattattttgaaaaaataaatttaaaaatacattcaaaattactattgtatacaagcttaattgttaatattccctaaacacaattttatgaagggagaagacattggtttgttgacaataacagtacatcttttcaagttctcagctatttcttctacctctccctatcttacatttgagtatggtaacttatgtcatctatgttgaatgtaagcttataaagcacaaagcatacatttcctgactggtctagagaactgatgtttcaatttacccctctgctaaataaatattaaaactatcatgtgacttcatgtaatcaggctgaacatttctacaattactagatgtattagacgtaagtattttctttagttaaaccacccatgttagaaatgttttctgtagaatttataaacaactatcaatgcagacaatttaataagcctggggatgatttacttacagtaaacatttatcaaattgtacatttgtgctatcaacaattaataagcaaatatgtgaaaatagtttctgtcttctatgaagttagatatttgatggttaaaacccctataaatcatagtttcatatgggaaaaaataattgaaatacagtgtaaatttaaataatttattaagtatagcaaataattgaaatatggtggactaaattttgtcatagaaatatgtgcaagttatagtagtggctcacatgagaggtaatcaattctgctaatagtagcagaatgagtgcagtggaacatgaaaaacttgaggagataacagttgaggtgggtttccatagatgcataatagttcaagagcaagatttggtggggaggcactattcaagacagggactaagttcaaaatccaagacgtatgctgggacacacctctgacaggttggcataaaggaggcttaatcaaactatttttcttcttctgaaacagaagcaataattttcatttacatttgacatatcccgaggtaatattaacattagggaaagttactcttttccatctttccacattcttgcaggaccataaaatctgaattttccagtatttttaataagagggaagaaacctctctttttcttctctttttcatctcccaagagatcctcctctcatgactacagttgaataggtggtttctattggaagacattcaggaattcaaggtgcatgtccataaatggactttttttgttgttgttcagagctggaccttgaatgatgcatccttctctctgttgtaaccatgaataatgcacccttcatgctatagcctttaacgattcacccttcttattgtaaccttgaatgattcaccctttatggtgtagccttgagtgacgcacccttcatgttgtagccttcaatgatgcacactccatgttatagccttgaatgatataccctttatgctgcagcctttctcttatggggaaaagcctgcagatatcctgctgcttaactgacaagtgtggtgagaaataagtagaaatctaaagaggggaagaccattttggacacttatctgcaaggcagatccaacacacttttccagtagtcaagctacttctaattttgttcagtatcaaaatgagaaacaggcctgattctccagcactcttgtcaacacaacttccccccatatttatatatatacacacacatatatatctttatatatatacacacatatatatctttatatatatatatttatatatatatctttttgcatatatacatatatatgtatctttatttcctttgaaataaagataaatatagctgatttctttggcttcgacacttactatttgcatgactaagggaagctagttaacctttctgtgactcatttccttgtccataaaatgggaatattaattgtacatgtcttatggattggtgtgtgaattcagttagcgagtgtagaatataacttatagatcaaagtagagtaaatggaaagggctcaactatggtgttgctactgccattgttattacaggcacacagttcgagctataatcatttcaagggaaattcttatgtgtcagttctggatcgaggtctgagattctgcatttcaaacaaacttccaggaatgctgctgcttcttggtccacacttggagaaataagtcagcagagagtcctctcgtttcctattgtaccatgtctgtcttttgtctcctgcttattggcctctgtaaggaactcacagctgctataataaagtaccaaaaactgggtggcttaaaacaacagaaacttactttctcacaattctggaggctaaaaattcaaaatcaaggtgtcagcagggtcagattccttccaaagcctttaggagaggacctttccttgctcctcctaggtttctggttaaatctaggtgttctttgccttatggcagcgtgactctaatttatgcctccatcttcaccctcacatggccttctctctcatgtgtttgtgtcttttctcttcttcttctatgaacatgagttatattggattaaggctcaccctaatttagtatgaacccatcttaacttgattatatctgcaaagactctatttccaaatgaagtcagactcacaggtattgggggtttgatattgaacatatcttctgggaggagacacaacttaatcattaatatccactttcttttttccttattaaatgtttaatttttttgttttcattaaaactgttgttcgattatgggtgcttcacataaaaggttggaaacttaaaaatttgtctctgacccctcctggttggaaaggcctctgttgtacatttatgctagcctaggccataccactttctgtcttcagtacagccatcttagtttattcaagtgacacagattttccagaacacagtattcatgatcttttaaagcatttttcttcaaagactttgatctggcaataaatgttactatgtaattctcatgacataaattaggcataacttggatctcctcttcttctgctcattcatttgtctgaatcatcactattatcttttttatattcctttaccgttctccataatgcttttccaagaaactggtttattccacaattttattgcagaggcagctgcaggatatcataatcttatctttatacgaaggaagaattgcctaatccctcaagtaaactaaaaatgttttatacagtcatttctcattcatccaatgttccaggcagtcccagtccaagactgccccttcacacacacaacaactcttcacaagacttcactgtccttcagactctcctgcagcacagacattcgaggttgctgagtcgacattgcagttatttcactcttgattttgctgctcaattttaagtttccacacttattgctaaaacattccttctagtggatctgtttatgtattcaagcacaccatctgtcacaattatttcaaatcacaggtctgtgacagactgtcaatttcacaccacaaagtataatagtggaaaacaaagtaaaatcaagaaagggagaacactaaacttattaaaaccatatacaagcatacgcattcaggaaactaaaacaaccttcaaagaagttgaacaattttgagccaaaagaaagggcatatgcacaccctaccccagtataagataaccagaaaaggactgggtgagttgcctcctgagtattatgactgccatcaatcacttaggcattggagatcaggagactcttcccaggccacacattctgcagtgactgtgagggctgaatgaatgcttccaggccatcaggaacaagcatagaaacacaaatcaattttaaaatacactcaaaaatgtcaaaataatccaacttttttgtcttgatcagatatatctactagcacatattacttcattttttcagccaatatttattaataacctactgtgtgcttgacagtgttctagtggcagagacacagcagtgcataatgccttgccctctgaagcagatgttgcagcaggaggagacattccaggacatgacaattaaagtggaggaatgtcaagcagaactggggaataagggatgtgaagggggtgagacttgctattttatataggatggtcggaaaaaggacttatcaggagtgacatttgagcagggagatgaagaactgaagggagcaagccaagaaaagaggccctgaatttggaaaatacatggcacgttccaacaagagcagagaggacaaacgtgagcagagtaaagtgagcaagaagagataatatatgatacaaggtcagaaaggtaatgacaatcgcatcctgtaggactttttaggccattgtaaagatgagcttttactctgagtaagacagagagctattagaggggtctcggtagaggagtgacttgattcaactgtctttgagaggatccctttgcgtgtatagactgtaaggtaacaggaataggccaagagagaatatttcggatgctagtgcaataatcaggtgagagatgatgaagactttgacctggataatagtagaaaaattgttgagaagggatcaaaatatggggtttgttttgatggtagagaggccagggatggctgaatgatcagatggggcatgagagagaaagaaaagaaacagagatgacttcaggaattttggcctgggccactggaaggatgaagtcaccatttactgagatggtaatgactgggaggttgagctggaagaactgagaatcaaatatctggttttgaatctgttctttttgagatgcatattcaacttccatatggaggtgtcaaggaggatttagatctagaattttggagctcaagggaaagggttgagctgtagacataaattctagagatgccggaatatagattgtgatccttctttatcagcacagaaatgacttgactttgtccaaactaagcaatcatactgtacatgttagcaacacattttacagggccaatttggccttttgcaatgttctgtggtttctaagataaataaacatattatatgtttccctctgga

SEQ ID NO: 125793 - DNA, 2133 bp, Homo sapiens
  Payload ID: 4647
  Gene Symbol: DCN
  Gene Name: decorin
  Uniprot ID: P07585
  ENST ID: ENST00000393155
  CDS Start-End: 255-1334
ggaataataagacacgccctgaaggagtacatcgtctagtgagggacagaccaagcacgcaaaacaaattgcaatataatgtgataagttctttaaaagaggtaagagcaacgtgctttgggagcagagaagagggagaaagcagcatcttgcctggatgagccaggggacacagaagagaagcccactatctcatttaatctttacaactctcttgcaaggttccctggttgtgaaaatacatgagataaatcatgaaggccactatcatcctccttctgcttgcacaagtttcctgggctggaccgtttcaacagagaggcttatttgactttatgctagaagatgaggcttctgggataggcccagaagttcctgatgaccgcgacttcgagccctccctaggcccagtgtgccccttccgctgtcaatgccatcttcgagtggtccagtgttctgatttgggtctggacaaagtgccaaaggatcttccccctgacacaactctgctagacctgcaaaacaacaaaataaccgaaatcaaagatggagactttaagaacctgaagaaccttcacgcattgattcttgtcaacaataaaattagcaaagttagtcctggagcatttacacctttggtgaagttggaacgactttatctgtccaagaatcagctgaaggaattgccagaaaaaatgcccaaaactcttcaggagctgcgtgcccatgagaatgagatcaccaaagtgcgaaaagttactttcaatggactgaaccagatgattgtcatagaactgggcaccaatccgctgaagagctcaggaattgaaaatggggctttccagggaatgaagaagctctcctacatccgcattgctgataccaatatcaccagcattcctcaaggtcttcctccttcccttacggaattacatcttgatggcaacaaaatcagcagagttgatgcagctagcctgaaaggactgaataatttggctaagttgggattgagtttcaacagcatctctgctgttgacaatggctctctggccaacacgcctcatctgagggagcttcacttggacaacaacaagcttaccagagtacctggtgggctggcagagcataagtacatccaggttgtctaccttcataacaacaatatctctgtagttggatcaagtgacttctgcccacctggacacaacaccaaaaaggcttcttattcgggtgtgagtcttttcagcaacccggtccagtactgggagatacagccatccaccttcagatgtgtctacgtgcgctctgccattcaactcggaaactataagtaattctcaagaaagccctcatttttataacctggcaaaatcttgttaatgtcattgctaaaaaataaataaaagctagatactggaaacctaactgcaatgtggatgttttacccacatgacttattatgcataaagccaaatttccagtttaagtaattgcctacaataaaaagaaattttgcctgccattttcagaatcatcttttgaagctttctgttgatgttaactgagctactagagatattcttatttcactaaatgtaaaatttggagtaaatatatatgtcaatatttagtaaagcttttcttttttaatttccaggaaaaaataaaaagagtatgagtcttctgtaattcattgagcagttagctcatttgagataaagtcaaatgccaaacactagctctgtattaatccccatcattactggtaaagcctcatttgaatgtgtgaattcaatacaggctatgtaaaatttttactaatgtcattattttgaaaaaataaatttaaaaatacattcaaaattactattgtatacaagcttaattgttaatattccctaaacacaattttatgaagggagaagacattggtttgttgacaataacagtacatcttttcaagttctcagctatttcttctacctctccctatcttacatttgagtatggtaacttatgtcatctatgttgaatgtaagcttataaagcacaaagcatacatttcctgactggtctagagaactgatgtttcaatttacccctctgctaaataaatattaaaactatcatgtg

SEQ ID NO: 125794 - DNA, 228 bp, Homo sapiens
  Payload ID: 4647
  Gene Symbol: DCN
  Gene Name: decorin
  Uniprot ID: P07585
  ENST ID: ENST00000456569
  CDS Start-End: 1-228
atgaaggccactatcatcctccttctgcttgcacaagtttcctgggctggaccgtttcaacagagaggcttatttgactttatgctagaagatgaggcttctgggataggcccagaagttcctgatgaccgcgacttcgagccctccctaggcccagtgtgccccttccgctgtcaatgccatcttcgagtggtccagtgttctgatttgggttgtctaccttcataa

SEQ ID NO: 125795 - DNA, 519 bp, Homo sapiens
  Payload ID: 4647
  Gene Symbol: DCN
  Gene Name: decorin
  Uniprot ID: P07585
  ENST ID: ENST00000441303
  CDS Start-End: 1-519
atgaaggccactatcatcctccttctgcttgcacaagtttcctgggctggaccgtttcaacagagaggcttatttgactttatgctagaagatgaggcttctgggataggcccagaagttcctgatgaccgcgacttcgagccctccctaggcccagtgtgccccttccgctgtcaatgccatcttcgagtggtccagtgttctgatttgggtctggacaaagtgccaaaggatcttccccctgacacaactctgctagacctgcaaaacaacaaaataaccgaaatcaaagatggagactttaagaacctgaagaaccttcacgttgtctaccttcataacaacaatatctctgtagttggatcaagtgacttctgcccacctggacacaacaccaaaaaggcttcttattcgggtgtgagtcttttcagcaacccggtccagtactgggagatacagccatccaccttcagatgtgtctacgtgcgctctgccattcaactcggaaactataagtaa

SEQ ID NO: 125796 - DNA, 1438 bp, Homo sapiens
  Payload ID: 4647
  Gene Symbol: DCN
  Gene Name: decorin
  Uniprot ID: P07585
  ENST ID: ENST00000425043
  CDS Start-End: 1-639
atgaaggccactatcatcctccttctgcttgcacaagtttcctgggctggaccgtttcaacagagaggcttatttgactttatgctagaagatgaggcttctgggataggcccagaagttcctgatgaccgcgacttcgagccctccctaggcccagtgtgccccttccgctgtcaatgccatcttcgagtggtccagtgttctgatttgggtcttcctccttcccttacggaattacatcttgatggcaacaaaatcagcagagttgatgcagctagcctgaaaggactgaataatttggctaagttgggattgagtttcaacagcatctctgctgttgacaatggctctctggccaacacgcctcatctgagggagcttcacttggacaacaacaagcttaccagagtacctggtgggctggcagagcataagtacatccaggttgtctaccttcataacaacaatatctctgtagttggatcaagtgacttctgcccacctggacacaacaccaaaaaggcttcttattcgggtgtgagtcttttcagcaacccggtccagtactgggagatacagccatccaccttcagatgtgtctacgtgcgctctgccattcaactcggaaactataagtaattctcaagaaagccctcatttttataacctggcaaaatcttgttaatgtcattgctaaaaaataaataaaagctagatactggaaacctaactgcaatgtggatgttttacccacatgacttattatgcataaagccaaatttccagtttaagtaattgcctacaataaaaagaaattttgcctgccattttcagaatcatcttttgaagctttctgttgatgttaactgagctactagagatattcttatttcactaaatgtaaaatttggagtaaatatatatgtcaatatttagtaaagcttttcttttttaatttccaggaaaaaataaaaagagtatgagtcttctgtaattcattgagcagttagctcatttgagataaagtcaaatgccaaacactagctctgtattaatccccatcattactggtaaagcctcatttgaatgtgtgaattcaatacaggctatgtaaaatttttactaatgtcattattttgaaaaaataaatttaaaaatacattcaaaattactattgtatacaagcttaattgttaatattccctaaacacaattttatgaagggagaagacattggtttgttgacaataacagtacatcttttcaagttctcagctatttcttctacctctccctatcttacatttgagtatggtaacttatgtcatctatgttgaatgtaagcttataaagcacaaagcatacatttcctgactggtctagagaactgatgtttcaatttacccctctgctaaataaatattaaaactatcatgtg

SEQ ID NO: 125797 - DNA, 753 bp, Homo sapiens
  Payload ID: 4647
  Gene Symbol: DCN
  Gene Name: decorin
  Uniprot ID: P07585
  ENST ID: ENST00000420120
  CDS Start-End: 1-753
atgaaggccactatcatcctccttctgcttgcacaagtttcctgggctggaccgtttcaacagagaggcttatttgactttatgctagaagatgaggcttctgggataggcccagaagttcctgatgaccgcgacttcgagccctccctaggcccagtgtgccccttccgctgtcaatgccatcttcgagtggtccagtgttctgatttggaactgggcaccaatccgctgaagagctcaggaattgaaaatggggctttccagggaatgaagaagctctcctacatccgcattgctgataccaatatcaccagcattcctcaaggtcttcctccttcccttacggaattacatcttgatggcaacaaaatcagcagagttgatgcagctagcctgaaaggactgaataatttggctaagttgggattgagtttcaacagcatctctgctgttgacaatggctctctggccaacacgcctcatctgagggagcttcacttggacaacaacaagcttaccagagtacctggtgggctggcagagcataagtacatccaggttgtctaccttcataacaacaatatctctgtagttggatcaagtgacttctgcccacctggacacaacaccaaaaaggcttcttattcgggtgtgagtcttttcagcaacccggtccagtactgggagatacagccatccaccttcagatgtgtctacgtgcgctctgccattcaactcggaaactataagtaa

SEQ ID NO: 125798 - DNA, 586 bp, Homo sapiens
  Payload ID: 4647
  Gene Symbol: DCN
  Gene Name: decorin
  ENST ID: ENST00000546370
  CDS Start-End: 112-378
agcatcttgcctggatgagccaggggacacagaagagaagcccactatctcatttaatctttacaactctcttgcaaggttccctggttgtgaaaatacatgagataaatcatgaaggccactatcatcctccttctgcttgcacaagtttcctgggctggaccgtttcaacagagaggcttatttgactttatgctagaagatgaggcttctgggataggcccagaagttcctgatgaccgcgacttcgagccctccctaggcccagtgtgccccttccgctgtcaatgccatcttcgagtggtccagtgttctgatttggtagagacggggtttcaccgtgttagccaggatggtctcgatctcctgatctcgtgatccacccgcctcggcttcccaaagtgctgggattacaggcgtgagtcaccgcgcccggcctcaatatgtcttctaatcttaaagataaagaagaggaaccagaattgaaattcacataacagtcttataaaaaaatgttattataggagcatgtttaaatatgaaaattctgcagaataaaatgaccccattgggtacccaccacaga

SEQ ID NO: 125799 - DNA, 716 bp, Homo sapiens
  Payload ID: 4647
  Gene Symbol: DCN
  Gene Name: decorin
  ENST ID: ENST00000546391
  CDS Start-End: 186-716
tgcaatataatgtgataagttctttaaaagaggtaagagcaacgtgctttgggagcagagaagagggagaaagcagcatcttgcctggatgagccaggggacacagaagagaagcccactatctcatttaatctttacaactctcttgcaaggttccctggttgtgaaaatacatgagataaatcatgaaggccactatcatcctccttctgcttgcacaagtttcctgggctggaccgtttcaacagagaggcttatttgactttatgctagaagatgaggcttctgggataggcccagaagttcctgatgaccgcgacttcgagccctccctaggcccagtgtgccccttccgctgtcaatgccatcttcgagtggtccagtgttctgatttgggtcttcctccttcccttacggaattacatcttgatggcaacaaaatcagcagagttgatgcagctagcctgaaaggactgaataatttggctaagttgggattgagtttcaacagcatctctgctgttgacaatggctctctggccaacacgcctcatctgagggagcttcacttggacaacaacaagcttaccagagtacctggtgggctggcagagcataagtacatccaggttgtctaccttcataacaacaatatctctgtagttggatcaagtgacttctgcccacctggacacaacaccaaaaaggcttcttat

SEQ ID NO: 125800 - DNA, 1930 bp, Homo sapiens
  Payload ID: 4647
  Gene Symbol: DCN
  Gene Name: decorin
  Uniprot ID: P07585
  ENST ID: ENST00000552962
  CDS Start-End: 529-1608
attttttaactgtgctatggagtagaagcaggaggttttcaacctagtcacagagcagcacctaccccctcctcctttccacacctgcaaactcttttacttgggctgaatatttagtgtaattacatctcagctttgagggctcctgtggcaaattcccggattaaaagactgattgcttggaacaaatggaataaatcgtcttgtcaataaagtgatggtcaattgagtcatttgtgtgcaaaatattgtgcaaggcccgggtacagaacaaggaataataagacacgccctgaaggagtacatcgtctagtgagggacagaccaagcacgcaaaacaaattgcaatataatgtgataagttctttaaaagaggtaagagcaacgtgctttgggagcagagaagagggagaaagcagcatcttgcctggatgagccaggggacacagaagagaagcccactatctcatttaatctttacaactctcttgcaaggttccctggttgtgaaaatacatgagataaatcatgaaggccactatcatcctccttctgcttgcacaagtttcctgggctggaccgtttcaacagagaggcttatttgactttatgctagaagatgaggcttctgggataggcccagaagttcctgatgaccgcgacttcgagccctccctaggcccagtgtgccccttccgctgtcaatgccatcttcgagtggtccagtgttctgatttgggtctggacaaagtgccaaaggatcttccccctgacacaactctgctagacctgcaaaacaacaaaataaccgaaatcaaagatggagactttaagaacctgaagaaccttcacgcattgattcttgtcaacaataaaattagcaaagttagtcctggagcatttacacctttggtgaagttggaacgactttatctgtccaagaatcagctgaaggaattgccagaaaaaatgcccaaaactcttcaggagctgcgtgcccatgagaatgagatcaccaaagtgcgaaaagttactttcaatggactgaaccagatgattgtcatagaactgggcaccaatccgctgaagagctcaggaattgaaaatggggctttccagggaatgaagaagctctcctacatccgcattgctgataccaatatcaccagcattcctcaaggtcttcctccttcccttacggaattacatcttgatggcaacaaaatcagcagagttgatgcagctagcctgaaaggactgaataatttggctaagttgggattgagtttcaacagcatctctgctgttgacaatggctctctggccaacacgcctcatctgagggagcttcacttggacaacaacaagcttaccagagtacctggtgggctggcagagcataagtacatccaggttgtctaccttcataacaacaatatctctgtagttggatcaagtgacttctgcccacctggacacaacaccaaaaaggcttcttattcgggtgtgagtcttttcagcaacccggtccagtactgggagatacagccatccaccttcagatgtgtctacgtgcgctctgccattcaactcggaaactataagtaattctcaagaaagccctcatttttataacctggcaaaatcttgttaatgtcattgctaaaaaataaataaaagctagatactggaaacctaactgcaatgtggatgttttacccacatgacttattatgcataaagccaaatttccagtttaagtaattgcctacaataaaaagaaattttgcctgccattttcagaatcatcttttgaagctttctgttgatgttaactgagctactagagatattcttatttcactaaatgtaaaatttggagtaaatatatatgtcaatatttagtaaagcttttcttttttaatttcca

SEQ ID NO: 125801 - DNA, 823 bp, Homo sapiens
  Payload ID: 4647
  Gene Symbol: DCN
  Gene Name: decorin
  Uniprot ID: P07585
  ENST ID: ENST00000547568
  CDS Start-End: 185-823
gagtagaagcaggaggttttcaacctagtcacagagcagcacctaccccctcctcctttccacacctgcaaactcttttacttgggctgaatatttagtgtaattacatctcagctttgagggctcctgtggcaaattcccggattaaaaggttccctggttgtgaaaatacatgagataaatcatgaaggccactatcatcctccttctgcttgcacaagtttcctgggctggaccgtttcaacagagaggcttatttgactttatgctagaagatgaggcttctgggataggcccagaagttcctgatgaccgcgacttcgagccctccctaggcccagtgtgccccttccgctgtcaatgccatcttcgagtggtccagtgttctgatttgggtcttcctccttcccttacggaattacatcttgatggcaacaaaatcagcagagttgatgcagctagcctgaaaggactgaataatttggctaagttgggattgagtttcaacagcatctctgctgttgacaatggctctctggccaacacgcctcatctgagggagcttcacttggacaacaacaagcttaccagagtacctggtgggctggcagagcataagtacatccaggttgtctaccttcataacaacaatatctctgtagttggatcaagtgacttctgcccacctggacacaacaccaaaaaggcttcttattcgggtgtgagtcttttcagcaacccggtccagtactgggagatacagccatccaccttcagatgtgtctacgtgcgctctgccattcaactcggaaactataagtaa

SEQ ID NO: 125802 - DNA, 648 bp, Homo sapiens
  Payload ID: 4647
  Gene Symbol: DCN
  Gene Name: decorin
  ENST ID: ENST00000552145
  CDS Start-End: 113-648
atggttttcaataattgtcctgaactctgctacagactaataaaacttcggtcaagttgcgagcaaaagggattatttggttccctggttgtgaaaatacatgagataaatcatgaaggccactatcatcctccttctgcttgcacaagtttcctgggctggaccgtttcaacagagaggcttatttgactttatgctagaagatgaggcttctgggataggcccagaagttcctgatgaccgcgacttcgagccctccctaggcccagtgtgccccttccgctgtcaatgccatcttcgagtggtccagtgttctgatttgggtctggacaaagtgccaaaggatcttccccctgacacaactctgctagacctgcaaaacaacaaaataaccgaaatcaaagatggagactttaagaacctgaagaaccttcacgcattgattcttgtcaacaataaaattagcaaagttagtcctggagcatttacacctttggtgaagttggaacgactttatctgtccaagaatcagctgaaggaattgccagaaaaaatgcccaaaactcttcaggagctgcgtgcccatgagaatgagatcaccaaagtgcgaaaagttactttcaatggactgaaccagatgattgtcat

SEQ ID NO: 125803 - DNA, 719 bp, Homo sapiens
  Payload ID: 4647
  Gene Symbol: DCN
  Gene Name: decorin
  ENST ID: ENST00000550099
  CDS Start-End: 168-464
gttctttaaaagaggtaagagcaacgtgctttgggagcagagaagagggagaaagcagcatcttgcctggatgagccaggggacacagaagagaagcccactatctcatttaatctttacaactctcttgcaaggttccctggttgtgaaaatacatgagataaatcatgaaggccactatcatcctccttctgcttgcacaagtttcctgggctggaccgtttcaacagagaggcttatttgactttatgctagaagatgaggcttctgggataggcccagaagttcctgatgaccgcgacttcgagccctccctaggcccagtgtgccccttccgctgtcaatgccatcttcgagtggtccagtgttctgatttggaaaagaagtattgcaataatttatcttcgtacaacctctacacaacaaactgccttatactttgtagactctttacacatcactgaacgattgatgaatgaatacacgaacatatgcatggcttggttcttgaattaatgcttggatgaatattctacaatattcttgactctagcaagctgcaaagagaagggaacatgcctgattgagaaacaaaagtgatttctcagtgcatccttgctccttccctttaaggacaactgtaaaaccaggaagcttagaaattccttgagtttgactggaaagagaatagaattaaagagaagaatcatctatgtatg

SEQ ID NO: 125804 - DNA, 2924 bp, Homo sapiens
  Payload ID: 4647
  Gene Symbol: DCN
  Gene Name: decorin
  ENST ID: ENST00000551354
  CDS Start-End: 206-508
accaagcacgcaaaacaaattgcaatataatgtgataagttctttaaaagaggtaagagcaacgtgctttgggagcagagaagagggagaaagcagcatcttgcctggatgagccaggggacacagaagagaagcccactatctcatttaatctttacaactctcttgcaaggttccctggttgtgaaaatacatgagataaatcatgaaggccactatcatcctccttctgcttgcacaagtttcctgggctggaccgtttcaacagagaggcttatttgactttatgctagaagatgaggcttctgggataggcccagaagttcctgatgaccgcgacttcgagccctccctaggcccagtgtgccccttccgctgtcaatgccatcttcgagtggtccagtgttctgatttggaaaaatttggtctggaaattccaagagcattacacttagaagataaatctccagaaagattgaagctcagtggatgggccaaaggggaatgaactcagtttacatggcagctcattcacattcctccttttgaaggggtgtattttcttactggagatgaaaagaaaaaaaaatctttatatcatgattccgccatgtgtacttccttctggaagaaattccatactatgatcaggcacttctttcagaagtcctatatttactcagaacatgctttctagcagtagtttgcagaagaaaaatgcaacttctacaattggaataaactgcctataggaacccagaaaaaatataaagtatattcagtagtaacgactgaaaaacacttgaaatagcttcttcaacacatatattgtatagctatttaaaacccaaatacaaatgttatatgaagactttcaaaaggccgcaggataattccaatggatctatttgttcagtcattcagaagctatatcgggaacccatcatggatgagctctgctctaggcatggggagaaaggatgaggaagacaaatatggccctagttcttgtggatcttatgttctagtggtggtgactattactttttgaattgtgtatttgccacaggggagattggattactcttcagaaattttataagcatctagagatgacctgcattattgccttgggcaggaaaataacagggttgaaaaaaatctgaacaaagaaatcaccatttgatggatatacacaggataatcttttctgaagttactaaaatggcgaagttcccaaaaaatgtaatgcgaattaaatttcactttgcctctgagaaaaagttaaaagaatttattattactctcgctacatgtattatcaaaaatgaagggttgatatttttaaggaaagaagagttggccagtcactttagtgaagttttattttttcgtaaatatagtttgcctttgcttccatgaaaaaatagctcataaaccttgaccctgatgaaagcactgggccagttttccaattctctgttatgtaaaaaggcataagtcaattgttcaaagtgaaacaacaacaacaacaacaaaatgtagtcttaggaagcagcaagttcactgacttgggatctttatgacagttttgttgttgccattgatattgttttgtttattttttgttttcagatgagaaagttttctacatgttatcttttttctaggagctcaaagtgtacatcattcctttattatagctaggtttactgactcatatactaaggaagtagctaaaattataaaaataatttgtttttaaaaccatatttaactaagggaactaagtaagttccaatgagcagtggtctcatgcaaggtattttcaatattttaaaatttacagatgaatatttaaatatattataaaagttttaatcagctatctctaagaaaatacatttcttaaagggaaatgaaattcacttgactttaaataaaacaaatgaactcatttcatgtttttaactattatctaactcttccttactttatgatgctggcaagctgttgagagccttgacatctccatctgcagaaaaatcacagtcttagaaatcctattaatcgtgtgaggtacctgggtcatagtagcagcttcatgcagtgttaaaattatatgatgattatatgcagtaacagatgaagaaaaaaagaaagaaagcaggagaaatgcaccacctcattcattgtaaatgcagtatagttgattttttaatttgttttatgtcctctagtgatctaagcatgaagcttgaattattataataaagaaaataaatgcaatgcagttggggatggcaaatgttaatgcttatctgtatcaaagactaacactgtcttcaggattatccttggtggattatccttggcagacacttaatgagcagagagaagctacaatgttgaaggacaaaagtcctttgtcatcttattatcgaaataatgtttaatacaaataaactttttaaattaaaatgtttgactactttttaccactaagaaatattcttggcaaagttaaacaacatcaaaattttaaacaattctttcaaagctaagaagtaaaaacctatgaaattaaaattatgtaattactctgcaggataatttgatgcctctggaaaaatgcatggactgttttagtccctaattctaatttatcacagtagtattaacacgtgcttttttttttttttaagaggatgagggattgagacagtaaacatgaattcctcatagatattggccaagttgtttcattgaacttgttgcaacttaccttgtaattggaaccacaattttatgagacccatatcttgtcttcttttatctatcatgttaagaaataaaccagttccctcttaattatagcatttatttcaaaaagcaatgttaaaaataaatgtagagttagcaaa

SEQ ID NO: 125805 - DNA, 356 bp, Homo sapiens
  Payload ID: 4647
  Gene Symbol: DCN
  Gene Name: decorin
  ENST ID: ENST00000548218
  CDS Start-End: 1-157
tgacttctgcccacctggacacaacaccaaaaaggcttcttattcgggtgtgagtcttttcagcaacccggtccagtactgggagatacagccatccaccttcagatgtgtctacgtgcgctctgccattcaactcggaaactataagaaaaaataaaaagagtatgagtcttctgtaattcattgagcagttagctcatttgagataaagtcaaatgccaaacactagctctgtattaatccccatcattactggtaaagcctcatttgaatgtgtgaattcaatacaggctatgtaaaatttttactaatgtcattattttgaaaaaataaatttaaaaatacattcaaaatta

SEQ ID NO: 125806 - DNA, 1026 bp, Homo sapiens
  Payload ID: 4647
  Gene Symbol: DCN
  Gene Name: decorin
  ENST ID: ENST00000546745
  CDS Start-End: 89-385
agtgtaattacatctcagctttgagggctcctgtggcaaattcccggattaaaaggttccctggttgtgaaaatacatgagataaatcatgaaggccactatcatcctccttctgcttgcacaagtttcctgggctggaccgtttcaacagagaggcttatttgactttatgctagaagatgaggcttctgggataggcccagaagttcctgatgaccgcgacttcgagccctccctaggcccagtgtgccccttccgctgtcaatgccatcttcgagtggtccagtgttctgatttggaaaagaagtattgcaataatttatcttcgtacaacctctacacaacaaactgccttatactttgtagactctttacacatcactgaacgattgatgaatgaatacacgaacatatgcatggcttggttcttgaattaatgcttggatgaatattctacaatattcttgactctagcaagctgcaaagagaagggaacatgcctgattgagaaacaaaagtgatttctcagtgcatccttgctccttccctttaaggacaactgtaaaaccaggaagcttagaaattccttgagtttgactggaaagagaatagaattaaagagaagaatcatctatgtatgaagcctggtctaactgataacgcagtcagattgccatttttaagatggaaaaaggggaacatgcttgccttgagcagaaaagtttttggtggggctggagctcctaaatattattttggtcatttgcccaaaaactgaagtacaccaccaatgtcccaattatgaagttgaatacagaattataaaaaaaaattgttgaaagtcaataagaataaatcttagaatttggactcctgccacatggcagaaaaaaagcatgatgttttaagacaacctggcctttgtccaacatgatgtttaccagattgctgacattttctagcataacaatactattcatcattgggataaccaaaagaagggaaataaaaaaaaaaagaagtcta

SEQ ID NO: 125807 - DNA, 593 bp, Homo sapiens
  Payload ID: 4647
  Gene Symbol: DCN
  Gene Name: decorin
  ENST ID: ENST00000550563
  CDS Start-End: 72-593
attctacatggcaagtagctttgattgtcagggttcaggttccctggttgtgaaaatacatgagataaatcatgaaggccactatcatcctccttctgcttgcacaagtttcctgggctggaccgtttcaacagagaggcttatttgactttatgctagaagatgaggcttctgggataggcccagaagttcctgatgaccgcgacttcgagccctccctaggcccagtgtgccccttccgctgtcaatgccatcttcgagtggtccagtgttctgatttgggtctggacaaagtgccaaaggatcttccccctgacacaactctgctagacctgcaaaacaacaaaataaccgaaatcaaagatggagactttaagaacctgaagaaccttcacgcattgattcttgtcaacaataaaattagcaaagttagtcctggagcatttacacctttggtgaagttggaacgactttatctgtccaagaatcagctgaaggaattgccagaaaaaatgcccaaaactcttcaggagctgcgtgcccatgagaatgagatcaccaaagtgcgaaaagttactttcaatggactgaac

SEQ ID NO: 125808 - DNA, 1064 bp, Homo sapiens
  Payload ID: 4647
  Gene Symbol: DCN
  Gene Name: decorin
  ENST ID: ENST00000550758
  CDS Start-End: 1-286
caaaatcagcagagttgatgcagctagcctgaaaggactgaataatttggctaagttgggattgagtttcaacagcatctctgctgttgacaatggctctctggccaacacgcctcatctgagggagcttcacttggacaacaacaagcttaccagagtacctggtgggctggcagagcataagtacatccaggtaatgcaaagccactgcttatgtgaggaatatccaaaaagcaagacccccaccctgcttatgggatgctgggaagcaggaagctcttcttagaagttttttttccagagtgtcttagttagaatttctatgacaaaataccataaaaaaaattaaatcatgaagcacaatttacattagctagatttcaataaagtttttgatttagaagtatggagatgaaacttaaagtcttctgtaatgctgatatttttttcagtaggggtggtgatgttggtgccatagtgagtagggggagtttgaagccacaagtaaaataaaaattctttttttttactgtcactaattttaattttcaaattattcaagaattgactggaaagagcttctttggtctagctcctgattctttttgacatggcctcatcatttttctttatttcctctaaaaaaaaaatgagatacgtttgcagaatgtgcaggtttgttatataggtatacgtgtgccatggtggtttgctggccctactgacccatcctctaagttcgcccgctcaccccctaccccctgttgtgtgttttgttaccctctctgtgtccgtgtgttctcagcattcaacttccatttatgcgtgagaacatgcagtatttggttttctgttcctgtgttagtttgctgaggatgatggcttctagtttcatccatgtccttgtaaaggacatgatcccattcctttttatggctgcatagtattccacggtgtatatgtaccacatttcctttatccagtctatcattgatgtgcatttggattggttccatgtttttgctattgtaaaatagtgctgcaataaacattatgtgtgcata

SEQ ID NO: 125809 - DNA, 920 bp, Homo sapiens
  Payload ID: 4647
  Gene Symbol: DCN
  Gene Name: decorin
  ENST ID: ENST00000549513
  CDS Start-End: 563-920
aacattttctttttgtgggttgttagtgaaacaaccaggcatgttctgctctggagaaaagatttcaaagtgacatctgcattaactgtcgttgctatttattaaatctgcaatgactttgcttcatttttcttttaaacttgtaagacattaaatatgcaaggctagcaagcttgtggtaaaccataaacattgcatttttaatgggaaacagatacaaaaccactccctcagatacaatccaaaggaacaggctgccaaaacaaaagtcttctcttaaagggatactcagtaactgaatgagagtgggctgctagaagaagcttaatgttgaacttaaagtggcagtgtgaataataatctttatgatattttgttaaatgaaaagccacaagcctgtattcaacatgtgctgccttagacacatatcagtagtaaatataaactaagaacaaacatgtaagaaactgaaaaacatttgtttcttctctagagaatctaggcaaaaattcccagaagataccttaaggttccctggttgtgaaaatacatgagataaatcatgaaggccactatcatcctccttctgcttgcacaagtttcctgggctggaccgtttcaacagagaggcttatttgactttatgctagaagatgaggcttctgggataggcccagaagttcctgatgaccgcgacttcgagccctccctaggcccagtgtgccccttccgctgtcaatgccatcttcgagtggtccagtgttctgatttgggtctggacaaagtgccaaaggatcttccccctgacacaactctgctagacctgcaaaacaacaaaataaccgaaatcaaagatggagactttaagaacctgaagaaccttcacgcattgattcttgtcaacaataaaattagcaaag

SEQ ID NO: 125810 - DNA, 750 bp, Homo sapiens
  Payload ID: 4647
  Gene Symbol: DCN
  Gene Name: decorin
  ENST ID: ENST00000547937
  CDS Start-End: 213-750
tttctttttctctttctttctttccttttctttcttccttctttctttctttcttccttccttctttctttcttcttttttttaatatgctacaattggataatgactcaaaacagctgtaagattctacttacgaacgtacagctttaatatggattcgtctaagtgtacaattcaaggttccctggttgtgaaaatacatgagataaatcatgaaggccactatcatcctccttctgcttgcacaagtttcctgggctggaccgtttcaacagagaggcttatttgactttatgctagaagatgaggcttctgggataggcccagaagttcctgatgaccgcgacttcgagccctccctaggcccagtgtgccccttccgctgtcaatgccatcttcgagtggtccagtgttctgatttgggtctggacaaagtgccaaaggatcttccccctgacacaactctgctagacctgcaaaacaacaaaataaccgaaatcaaagatggagactttaagaacctgaagaaccttcacgcattgattcttgtcaacaataaaattagcaaagttagtcctggagcatttacacctttggtgaagttggaacgactttatctgtccaagaatcagctgaaggaattgccagaaaaaatgcccaaaactcttcaggagctgcgtgcccatgagaatgagatcaccaaagtgcgaaaagttactttcaatggactgaaccagatgattgtcatag

SEQ ID NO: 125811 - DNA, 6797 bp, Homo sapiens
  Payload ID: 4648
  Gene Symbol: DOCK1
  Gene Name: dedicator of cytokinesis 1
  Uniprot ID: Q14185
  ENST ID: ENST00000280333
  CDS Start-End: 110-5707
ctccgccgcaaactttttcctccccatcctgtcgcggctcgaaaggaatggaaaatggcggcctagacgcggagtttcctgcccgacccgcggcggctccggcggcgccatgacgcgctgggtgcccaccaagcgcgaggagaagtacggcgtggctttttataactatgatgccagaggagcggatgaactttctttacagatcggagacactgtgcacatcttagaaacatatgaagggtggtaccgaggttacacgttacgaaaaaagtctaagaagggtatatttcctgcttcatatattcatcttaaagaagcgatagttgaaggaaaagggcaacatgaaacagtcatcccgggtgacctccccctcatccaggaagtcaccacgacactccgagagtggtccaccatctggaggcagctctacgtgcaagataacagggagatgtttcgaagtgtgcggcacatgatctatgaccttattgaatggcgatcacaaattctttctggaactctgcctcaggatgaactcaaagaactgaagaagaaggtcacagccaaaattgattatggaaacagaattctagatttggacctggtggttagagatgaagatgggaatattttggatccagaattaactagcacgattagtctcttcagagctcatgaaatagcttctaaacaagtggaggaaaggttacaagaggaaaaatctcaaaagcagaacatagatattaacagacaagccaagtttgctgcaaccccttctctggccttgtttgtgaacctcaaaaatgtggtttgtaaaataggagaagatgctgaagtcctcatgtctctatatgaccctgtggagtccaaattcatcagtgagaactacctggttcgctggtccagttcaggattacctaaagacatagacagattacataatttgcgagccgtgtttactgacctcggaagcaaagacctgaaaagggagaaaatcagttttgtctgtcagattgttcgcgtgggtcgcatggagctgagggacaacaacaccaggaaactgacctcggggttgcggcgaccttttggagtggctgtgatggatgtaacagatataataaatggaaaagtagatgatgaagataagcagcatttcattccctttcagccggtggcaggggagaatgacttccttcagactgttataaacaaagtcatcgctgccaaagaagtcaaccacaaggggcagggtttgtgggtaacattgaaattacttcctggagatatccatcagatccgaaaagagtttccgcatttagtggacaggaccacagctgtggctcgaaaaacagggtttccggagataatcatgcctggtgatgttcgaaatgatatctatgtaacattagttcaaggagattttgataaaggaagcaaaacaacagcgaagaacgtggaggtcacggtgtctgtgtacgatgaggatgggaaacgattagagcatgtgattttcccgggtgctggtgatgaagcgatttcagagtacaaatctgtgatttactaccaagtaaagcagccacgctggtttgagactgttaaggtggccattcccatcgaggacgttaaccgcagtcaccttcggtttaccttccgccacaggtcatcacaggactctaaggataaatctgagaaaatatttgcactagcatttgtcaagctgatgagatacgatggtaccaccctgcgagacggagagcacgatcttatcgtctataaggccgaagcaaagaagctggaagatgctgccacgtacttgagtctgccctccacgaaggcagagttggaagaaaagggccactcggccaccggcaagagcatgcagagccttgggagctgcaccattagcaaggactccttccagatctccacgctcgtgtgctccaccaaactgactcagaacgtggaccttctggggctcttgaaatggcgctccaacaccagcctgctgcagcagaacttgaggcagctgatgaaagtcgatggtggtgaagtagtgaagtttcttcaggacacgttggatgccctcttcaacatcatgatggagaactcagagagtgagacttttgacacgttagtctttgatgctctggtatttatcattggactgattgctgatagaaaatttcagcattttaatcctgttttggaaacttacattaagaaacactttagtgcaacgttagcctacacgaagttgacaaaagtgttgaagaactacgtggacggtgctgagaagccgggagtaaatgagcagctgtacaaagccatgaaagcgctagaatccatcttcaagttcatcgtgcgctccaggatcctgttcaatcaactgtatgaaaacaagggagaggctgacttcgtggaatctttgctgcagctcttcaggtccatcaatgacatgatgagcagcatgtcagaccagaccgtccgggtgaagggggcagcactgaaatacttaccaacgatcgtcaacgatgtgaaattggtgtttgatcccaaagagctcagcaaaatgtttactgaattcatcctcaatgttcccatgggcttgctgaccatccagaaactctactgcttgatcgaaatcgtccacagtgacctcttcacacagcatgactgcagagagatcctgcttcccatgatgaccgatcagctcaagtaccatctggagagacaggaggacctggaggcctgctgtcagctgctcagccacatcctggaggtgctgtacaggaaggacgtggggccaacccagaggcacgtccagattatcatggagaaacttctccggaccgtgaaccgaaccgtcatttccatgggacgagattctgaactcattggaaacttcgtggcttgcatgacagctattttacgacaaatggaagattaccattatgcccacttgatcaagacttttgggaaaatgaggactgatgtggtagatttcctaatggaaacattcatcatgtttaagaacctcattggaaagaacgtttaccccttcgactgggtgatcatgaacatggtgcaaaataaagtcttcctgcgagcaattaatcagtatgcagatatgctgaacaaaaaatttctggatcaagccaactttgagctacagctgtggaacaactactttcacctggctgttgctttccttactcaagagtccctgcaactggagaatttttcaagtgccaagagagccaaaatccttaacaagtacggagatatgaggagacagattggctttgaaatcagagacatgtggtacaaccttggtcaacacaagataaagttcattccagaaatggtgggcccaatattagaaatgacattaattcccgagacggagctgcgcaaagccaccatccccatcttctttgatatgatgcagtgtgaattccattcgacccgaagcttccaaatgtttgaaaatgagatcatcaccaagctggatcatgaagtcgaaggaggcagaggagacgaacagtacaaagtgttatttgataaaatccttctggaacactgcaggaagcacaaatacctcgccaaaacaggagaaacttttgtaaaactcgttgtgcgcttaatggaaaggcttttggattatagaaccatcatgcacgacgagaacaaagaaaaccgcatgagctgcaccgtcaatgtgctgaatttctacaaagaaattgaaagagaagaaatgtatataaggtatttgtacaagctctgtgacctgcacaaggagtgtgataactacaccgaagcggcttacaccttgcttctccatgcaaagcttcttaagtggtcggaggatgtgtgtgtggcccacctcacccagcgggacgggtaccaggccaccacgcagggacagctgaaggagcagctctaccaggaaatcatccactacttcgacaaaggcaagatgtgggaggaggccattgccttgggcaaggagctagccgagcagtatgagaacgaaatgtttgattatgagcaactcagcgaattgctgaaaaaacaggctcagttttatgaaaacatcgtcaaagtgatcaggcccaagcctgactattttgctgttggctactacggacaagggttccccacattcctgcggggaaaagttttcatttaccgagggaaagagtatgagcgccgggaagattttgaggctcggctcttaactcagtttccaaacgccgagaaaatgaagacaacatctccaccaggcgacgatattaaaaactctcctggccagtatattcagtgcttcacagtgaagcccaaactcgatctgcctcctaagtttcacaggccagtgtcagagcagattgtaagtttttacagggtgaacgaggtccagcgatttgaatattctcggccaatccggaagggagagaaaaacccagacaatgaatttgcgaatatgtggatcgagagaaccatatatacaactgcatataaattacctggaattttaaggtggtttgaggtcaagtctgttttcatggtggaaatcagccccctggagaatgccattgagaccatgcagctgacgaacgacaagatcaacagcatggtgcagcagcacctggatgaccccagcctgcccatcaacccgctctccatgctcctgaacggcatcgtggacccagctgtcatggggggcttcgcaaactacgaaaaggccttctttacagaccggtacctgcaggagcaccctgaggcccatgaaaagatcgagaagctcaaggacctgattgcttggcagattccttttctggccgaagggatcagaatccatggagacaaagtcacggaggcactgaggccgttccacgagaggatggaggcctgtttcaaacagctgaaggaaaaggtggagaaagagtacggcgtccgaatcatgccctcaagtctggatgatagaagaggcagccgcccccggtccatggtgcggtccttcacgatgccttcctcatcccgccctctgtctgtggcctctgtctcttccctctcatcggacagcaccccttccagaccaggctccgacgggtttgccctggagcctctcctgccaaagaaaatgcactccaggtcccaggacaagctggacaaggatgacctggagaaggagaagaaggacaagaagaaggaaaaaaggaacagcaaacatcaagagatatttgagaaagaatttaaacccaccgacatttccctgcagcagtctgaggctgtgatcctttcggaaacgataagtcccctgcggccccagagaccgaagagccaggtgatgaacgtcattggaagcgaaaggcgcttctcggtgtccccctcgtcaccgtcctcccagcaaacaccccctccagttacaccaagggccaagctcagcttcagcatgcagtcgagcttggagctgaacggcatgacgggggcggacgtggccgatgtcccaccccctctgcctctcaaaggcagcgtggcagattacgggaatttgatggaaaaccaggacttgctgggctcgccaacacctccacctccccctccacaccagaggcatctgccacctccactgcccagcaaaactccgcctcctccccctccaaagacaactcgcaagcaggcatcggtggactccgggatcgtgcagtgacgtcgcaagcctctctggaaagagtgtgctgcccctccccatctccatgccctctccttctgtgtcccctgagtctgctgtttacctcattgggcctgtgatgttaacatttcgtgcgactgctttttcttcaaaggagttcagttctcaccatggagtgagtggcctttagcgtcatggagcaaggtgggtctgggaggtagatatgggtccgggatgtgctatcgtagttatcagagttgggggcctctgagtgtgtctggctctgagagagtctgagtcttgcccaaacattctttctttttgtgccaaatgacttgcatttgcaaagagctcaattgctctgagctcagccaagtaggagaggctaggccatcactcttaggaagctgtgtagtgatgatgtataagaatcctcctcactgtcatgggatgttgtatccagcccctccttgttccagccggtggtgtgacttcgttggttgaggtgtgtctccaacctacatcagaccatgaagttcaacccctccagggaagctcctgatttcccctgcataattgaaaataggatatttctcagctattgaacagttactaatttatggggtggaaacagcattaagaatactgaatcaaatggaaaaacaaatgaatacaggaagataagtgttcgttcttttctgaaaaagagtatgtgtaccacaagagctggttttaattgggtgaattgtttttgtcctcattctgtacagaaatttgtatatatgatggttcttagaacttgttttaatttttgtggtccttccgtttattataataggcgtccaccaatgattatccatatgtgttcttaatttttaactgctggaagtgttaaaacacacacacacacacacacacattttttttttgagaactccaaagtcctgaaaattttggtggacaatgatttttaaaaaactaactttgtataacctaatatttgtattctctcatctatatttttttattcactataatcatgatactcttctaatagacttaaaagttaatcattgacaacgaaaaataaaatgttattttaaaagac

SEQ ID NO: 125812 - DNA, 5761 bp, Homo sapiens
  Payload ID: 4648
  Gene Symbol: DOCK1
  Gene Name: dedicator of cytokinesis 1
  ENST ID: ENST00000623213
  CDS Start-End: 63-5723
atggaaaatggcggcctagacgcggagtttcctgcccgacccgcggcggctccggcggcgccatgacgcgctgggtgcccaccaagcgcgaggagaagtacggcgtggctttttataactatgatgccagaggagcggatgaactttctttacagatcggagacactgtgcacatcttagaaacatatgaagggtggtaccgaggttacacgttacgaaaaaagtctaagaagggtatatttcctgcttcatatattcatcttaaagaagcgatagttgaaggaaaagggcaacatgaaacagtcatcccgggtgacctccccctcatccaggaagtcaccacgacactccgagagtggtccaccatctggaggcagctctacgtgcaagataacagggagatgtttcgaagtgtgcggcacatgatctatgaccttattgaatggcgatcacaaattctttctggaactctgcctcaggatgaactcaaagaactgaagaagaaggtcacagccaaaattgattatggaaacagaattctagatttggacctggtggttagagatgaagatgggaatattttggatccagaattaactagcacgattagtctcttcagagctcatgaaatagcttctaaacaagtggaggaaaggttacaagaggaaaaatctcaaaagcagaacatagatattaacagacaagccaagtttgctgcaaccccttctctggccttgtttgtgaacctcaaaaatgtggtttgtaaaataggagaagatgctgaagtcctcatgtctctatatgaccctgtggagtccaaattcatcagtgagaactacctggttcgctggtccagttcaggattacctaaagacatagacagattacataatttgcgagccgtgtttactgacctcggaagcaaagacctgaaaagggagaaaatcagttttgtctgtcagattgttcgcgtgggtcgcatggagctgagggacaacaacaccaggaaactgacctcggggttgcggcgaccttttggagtggctgtgatggatgtaacagatataataaatggaaaagtagatgatgaagataagcagcatttcattccctttcagccgctcgcgttggacgacgccattcgacacaagccgctgaacatgtcatcccgtttttcacccagggtggcaggggagaatgacttccttcagactgttataaacaaagtcatcgctgccaaagaagtcaaccacaaggggcagggtttgtgggtaacattgaaattacttcctggagatatccatcagatccgaaaagagtttccgcatttagtggacaggaccacagctgtggctcgaaaaacagggtttccggagataatcatgcctggtgatgttcgaaatgatatctatgtaacattagttcaaggagattttgataaaggaagcaaaacaacagcgaagaacgtggaggtcacggtgtctgtgtacgatgaggatgggaaacgattagagcatgtgattttcccgggtgctggtgatgaagcgatttcagagtacaaatctgtgatttactaccaagtaaagcagccacgctggtttgagactgttaaggtggccattcccatcgaggacgttaaccgcagtcaccttcggtttaccttccgccacaggtcatcacaggactctaaggataaatctgagaaaatatttgcactagcatttgtcaagctgatgagatacgatggtaccaccctgcgagacggagagcacgatcttatcgtctataaggccgaagcaaagaagctggaagatgctgccacgtacttgagtctgccctccacgaaggcagagttggaagaaaagggccactcggccaccggcaagagcatgcagagccttgggagctgcaccattagcaaggactccttccagatctccacgctcgtgtgctccaccaaactgactcagaacgtggaccttctggggctcttgaaatggcgctccaacaccagcctgctgcagcagaacttgaggcagctgatgaaagtcgatggtggtgaagtagtgaagtttcttcaggacacgttggatgccctcttcaacatcatgatggagaactcagagagtgagacttttgacacgttagtctttgatgctctggtatttatcattggactgattgctgatagaaaatttcagcattttaatcctgttttggaaacttacattaagaaacactttagtgcaacgttagcctacacgaagttgacaaaagtgttgaagaactacgtggacggtgctgagaagccgggagtaaatgagcagctgtacaaagccatgaaagcgctagaatccatcttcaagttcatcgtgcgctccaggatcctgttcaatcaactgtatgaaaacaagggagaggctgacttcgtggaatctttgctgcagctcttcaggtccatcaatgacatgatgagcagcatgtcagaccagaccgtccgggtgaagggggcagcactgaaatacttaccaacgatcgtcaacgatgtgaaattggtgtttgatcccaaagagctcagcaaaatgtttactgaattcatcctcaatgttcccatgggcttgctgaccatccagaaactctactgcttgatcgaaatcgtccacagtgacctcttcacacagcatgactgcagagagatcctgcttcccatgatgaccgatcagctcaagtaccatctggagagacaggaggacctggaggcctgctgtcagctgctcagccacatcctggaggtgctgtacaggaaggacgtggggccaacccagaggcacgtccagattatcatggagaaacttctccggaccgtgaaccgaaccgtcatttccatgggacgagattctgaactcattggaaacttcgtggcttgcatgacagctattttacgacaaatggaagattaccattatgcccacttgatcaagacttttgggaaaatgaggactgatgtggtagatttcctaatggaaacattcatcatgtttaagaacctcattggaaagaacgtttaccccttcgactgggtgatcatgaacatggtgcaaaataaagtcttcctgcgagcaattaatcagtatgcagatatgctgaacaaaaaatttctggatcaagccaactttgagctacagctgtggaacaactactttcacctggctgttgctttccttactcaagagtccctgcaactggagaatttttcaagtgccaagagagccaaaatccttaacaagtacggagatatgaggagacagattggctttgaaatcagagacatgtggtacaaccttggtcaacacaagataaagttcattccagaaatggtgggcccaatattagaaatgacattaattcccgagacggagctgcgcaaagccaccatccccatcttctttgatatgatgcagtgtgaattccattcgacccgaagcttccaaatgtttgaaaatgagatcatcaccaagctggatcatgaagtcgaaggaggcagaggagacgaacagtacaaagtgttatttgataaaatccttctggaacactgcaggaagcacaaatacctcgccaaaacaggagaaacttttgtaaaactcgttgtgcgcttaatggaaaggcttttggattatagaaccatcatgcacgacgagaacaaagaaaaccgcatgagctgcaccgtcaatgtgctgaatttctacaaagaaattgaaagagaagaaatgtatataaggtatttgtacaagctctgtgacctgcacaaggagtgtgataactacaccgaagcggcttacaccttgcttctccatgcaaagcttcttaagtggtcggaggatgtgtgtgtggcccacctcacccagcgggacgggtaccaggccaccacgcagggacagctgaaggagcagctctaccaggaaatcatccactacttcgacaaaggcaagatgtgggaggaggccattgccttgggcaaggagctagccgagcagtatgagaacgaaatgtttgattatgagcaactcagcgaattgctgaaaaaacaggctcagttttatgaaaacatcgtcaaagtgatcaggcccaagcctgactattttgctgttggctactacggacaagggttccccacattcctgcggggaaaagttttcatttaccgagggaaagagtatgagcgccgggaagattttgaggctcggctcttaactcagtttccaaacgccgagaaaatgaagacaacatctccaccaggcgacgatattaaaaactctcctggccagtatattcagtgcttcacagtgaagcccaaactcgatctgcctcctaagtttcacaggccagtgtcagagcagattgtaagtttttacagggtgaacgaggtccagcgatttgaatattctcggccaatccggaagggagagaaaaacccagacaatgaatttgcgaatatgtggatcgagagaaccatatatacaactgcatataaattacctggaattttaaggtggtttgaggtcaagtctgttttcatggtggaaatcagccccctggagaatgccattgagaccatgcagctgacgaacgacaagatcaacagcatggtgcagcagcacctggatgaccccagcctgcccatcaacccgctctccatgctcctgaacggcatcgtggacccagctgtcatggggggcttcgcaaactacgaaaaggccttctttacagaccggtacctgcaggagcaccctgaggcccatgaaaagatcgagaagctcaaggacctgattgcttggcagattccttttctggccgaagggatcagaatccatggagacaaagtcacggaggcactgaggccgttccacgagaggatggaggcctgtttcaaacagctgaaggaaaaggtggagaaagagtacggcgtccgaatcatgccctcaagtctggatgatagaagaggcagccgcccccggtccatggtgcggtccttcacgatgccttcctcatcccgccctctgtctgtggcctctgtctcttccctctcatcggacagcaccccttccagaccaggctccgacgggtttgccctggagcctctcctgccaaagaaaatgcactccaggtcccaggacaagctggacaaggatgacctggagaaggagaagaaggacaagaagaaggaaaaaaggaacagcaaacatcaagagatatttgagaaagaatttaaacccaccgacatttccctgcagcagtctgaggctgtgatcctttcggaaacgataagtcccctgcggccccagagaccgaagagccaggtgatgaacgtcattggaagcgaaaggcgcttctcggtgtccccctcgtcaccgtcctcccagcaaacaccccctccagttacaccaagggccaagctcagcttcagcatgcagtcgagcttggagctgaacggcatgacgggggcggacgtggccgatgtcccaccccctctgcctctcaaaggcagcgtggcagattacgggaatttgatggaaaaccaggacttgctgggctcgccaacacctccacctccccctccacaccagaggcatctgccacctccactgcccagcaaaactccgcctcctccccctccaaagacaactcgcaagcaggcatcggtggactccgggatcgtgcagtgacgtcgcaagcctctctggaaagagtgtgctgcccctcc
